United States Patent Application Publication US 2011/0191912 A1 - sequence listing, part 14

SEQ ID NO: 18510 - DNA, 3003 bp, Unknown
  misc_feature (1)..( 3003): 2750-1469P.txt file - cDNA_ID_1818009; gDNA_ID_1621149; Annot_ID_56823
aatataatgtttttgcagaaagaacaaaagggaagcattggcattgtggtacaaacatcatggtttgaacccattagtgattccaatgcggataaagaagctgctgagagagctcaatcattttactctaattggtatgttatattactatatatgttgagatcatatttgtagatatgaagtatagtacttcacccacatatggaatatatattgttttatctatttgtattctaacatgtactaggattctagatcccgttatatatgggaaatatccaaaagaaatggtagatattcttggaccagccttgccacaattttcgagcaatgaagtgaagaacttagagaagtcgagggcagatttcgttggtattaatcactatacaagttacttcattcaagattgtttgacctctgcttgtaatactggacatggagcttttaaggccgaaggatatgctctcaagttagaccggaaaggcaatgttactataggagaacttgtaagtacattcattcagtttcttatattcaatattttacgactatattcaaatgttttagtaaattttattgtttattgaccatgtttctattgttagaccgatgtaaattggcagcatattgatcccacaggattccacaagatgctgaattatttaaaagataggtacccaaacatgccaatgttcataactgaaaacggtacaagacctcaaatttgatcaatgatcgagtcatcaaccatatttgaaattatcatgaaaaattattattaatggcttgaaggttttggagacttgcaaaaacctgaaacaacggataaagaacttctaaatgatacaaaaaggatccaatacatgagtggatacttagaagctttacaagcagcaatgaggtaaataatttatgtaaatttatgcagaaatccaattcttaaaatcatgcattcaaatagtctttaaaccaatttttatctaatgaaaatttactaattctatataagttgtgaattgttttggtagggatggagcaaatgtgaagggttattttgtgtggtcactattagacaattttgagtggttgttcggatacaaggttcggtttggtctattccatgtggatctaacaactcttaaaaggtcaccgaaacaatcagcttcatggtacaaaaattatatcgaagaacacgtgaatcgaagagatatcgtagataattattaaacacatttatttttaattcgtattcactgccaaagaaagtcaaaaattacaaaagcatttaaaattgatacttatcattgttgttgattgttgaatgattaaatttgtcttttcctcctaaaagtgaatgtttaatgtgttacatgattatttgtctaatcttgcacaataattctattagcttaagatgttgaagaacacgtgagaagagaatttaggttttttttttggtcaaaggaagaatagtaattcgtattcctaagtaaagaaagtcaaactaggaaagaatttatgtaacttcgttaaatgaatgattaatggttttctttaccttaaagtgaatgtttaatcagtgttacgcgccatacggaagtaattgtctaatcttgcacaatcattcaacacgttttcaaagaaaactttttttgttctctatgatgataatagtgttaaatcaaaagtagtacaaaagtaaactaaacttattttagattaaaaatcaccgaaaaaactaaacacgcgttagaaagcatttgacatcacctccaaatttaatttcacgcaagcaagcgtttctaagatatggattctaaacgctatatcactgttttttgtaagataaattcttcttaattttttcaataaaaaaatttaaaattaaaaataaaatcataaactaactgataatgaccaaaggaaccataaacacctagaaaattatatttctgtgttttctatctgcggtttaacgtcagtaacatctaggaaagttattttacgaaagtgaacttggtttttgtttgattgaaatatgtttcagactttcagaagaaaaaaaaagatacttatttaaaatatgttaagattttagttcacttcaaattatgtaaacatgctgatttttttttttttttttttttttttttttgcaatcatccttcaatattgtctgcgaaacagtcaagtttcaagtacgattcacaacatttttcaaaaaatttattcattcatttcactcccaaaactttttaatttacaaaactacccgtacacgtatattggttgaatagaaattttttgaatatttattatattttgagttacatatagactatgatttaatcaaatacacaatgagtcgttaaacaatctaaagaaaaagacacacgaacaaactgataacatagataacatataagcaaaataggtcggaatcaacaattacatatataaatggttgcgtggttaatgatttcatttggtattttcacgacaagatcgtttctaggtacatagaagtcaacttcgttgccatataaactgtataacacttagtcatacaatctggtttatttatcaagttcaaaaatttaatttaatcaaaatatttgtttgcgaaattttcaatcgagaattaaaaaattaaaaaaagttgcgtggttgagttaatcgtttggtctccatcgctgatatcttcaatttctctgaattaatcttcacatagctgtataaagacctagaaaagaaaacagatatactagtaaccaaacttagaatcaagaaagaaaaaaacagctatagagttgaataagaagaagaagaagatgacattttttaaaccaattagaatcatcaattttttattcctatttttcatatttcttgtggtatacgcaaccgtgttctgcaaattttgttcagacactggaaacttcaaaagaagtaagttgaggtacgaaacttccgatgatagttatgaagctaggagtagccatg

SEQ ID NO: 18511 - DNA, 3003 bp, Unknown
  misc_feature (1)..( 3003): 2750-1469P.txt file - cDNA_ID_1818013; gDNA_ID_1621149; Annot_ID_56822
cattttgtgggctagggatctacaatccaatgactgcaaaatatttacggcatgcaaaacttcttatgacaagtgtgtttgacacacgtctctaaaatttcaattatgtggatgtgcttatttgtatcaatgcatttcatgcttgcttggcttcgtatggaaaaagtatgagccatcataaaaatttgttaaaaaagattcgagtcatttacattgttttaggagccttttttgatcggttagggtgctagagaacccattacatactagtcatctgggggtattagtattttgtaagctgttttaaacgattccgaattttgtttctatattttgtggtcagatctgatggcctgaaaatcatccccaataatcaaatcttaatgcgcgtttaatattttactaaattatgatcatattattttttgcgatctagtcagtagtcactgtagtgaagttggtgagacgacacccacccaaaaggagtacgtaaagcaattccggcttccaattattttatgctaatcttgtcggcagatgagatggatacatttatacatatcatatataataggttgggaaattgttagtttcgttgataaaataattaaggttttgacttttgactgattctggatttgatttcaggaaatgtaaaattttccagattctgtatgtactttttgataagaaatttcaagttgctgcatgtcaaaaatttcaactaatctcttttgtagtgtataaatttatttactgtccaatagacaattgccaccgatcctaaggagcaacgtacaataccaaaagtttgcatgcataataaaagttcatttaaacataacgtataataattttcagagtgattattgtaactttcaaattttcacataaattttagagtattaaatcaaatagcctttgtaatttttgagtaaactaaatgacggtctttttttactcaaaatcaattacaaccctttaaaatatcctaaaagctttgttttaaaaaagaagataaattatcacaacaagaatataatctaactcactacaaaatgtaaggccaaagaagagatacgttcactgattggacgtgatggagagagctcacatctcgtctggccttatcatcatcgtaatctattgaagatatatatatggtaagacaaattaactttactcacggattctattctttttacccattctcggttttgtaacgaacgacgaaccaccaactagacaacgaaacgtcccacttgtttccattagttaaatttgggtaacaccaaaatcgcattaacttaataaaacactgttccaatatcaaccactgccatattttctcccttatttttttttgacatcaaaactgattttggagaggctttgaaaccccgactataaatttgatttaggtgttattctgatttatgagtgaatagttacacagtcggagtttgaactgaaagttataggattacatttttggtaaaaaattgttgagtcgtatttttggtagaaaacagtaaaattatgttttttgacagaaaattggaggatagtaattttggaggaaatcatatatatgaaaattgaccaactctctccatatgattgacacataatcactttagcatttgacatgtgtctattaaataattaatgtaagctcttcaacttctaatttataggttaaagatatatttattatttaattttacatcttattttattttacgtatttaattatactattactatatttattttaatattacatgatttttcaataaaaccattttaatagttttcttatactctgaagttttttttttttttttgtaatccaaactcaaagtatgagtgtataatagtcgtggattacttaataatttgagtaagttattctcttaaatgaatatttatattttcttaaattgatatttatataataaatcactaagggtgaaaaatgcgtaaggagttccatcatcaaattcttaggtttctagaatccaacactaacctctgttaaattggtttaaaacaaacgttgtttatgaattatgtatatgatgcattgttgagaacgttgctagaaaaaaatatttttaatactaaaagtaattgtttattgcatgattgaatgattagataaatataaattatatttaaattaaacactacaaaagaatccgaaaaaaccgcgacgtagcgcggataattacctagtagtgttaaaacaaaattggaggaaattttggagatcacatttttaacataaaattagtagaaatatatattttaattattaaataaaaaattaaagtaagcgctaaatgtcattaagaaaattttgtgaaaggcggaaacaaaaattttaaaagaaaaagaaaggactaatcacatcatcgccattcaatgatatagtttgacaatgatatgattcattaactaccattcaataaatcggtttatgaaatctaacggttaaatattagttggtaaagcatgattaattaagataatcactcaacaatcaattcaggaccaacgtcacctagctaccaccacgaaggaaaatgctaatacaagaaccaaatcgtcttattaaccagttatctttttctcatggaccacatttaaatcgtcacggcaattaagctagattttaagaaagaataaatgggatactcaactaattgccacaaattttattacttttaaaactcggctgctcggcccaaacttatccggtacggatggatagacctatcttttatcgtgtaaagaaactcttgggctccactcttgacgttgctcattttatctacttttgttggtttcttagtgacctttgacgtttatttacatagagttgacagatttgaattgacgttttctcaataatgcagaccaaaattttcacgtttcttacatgtacatatatatagtaaaacaaatctctgaagacacacaagagaatcaagaacaatg

SEQ ID NO: 18512 - DNA, 3003 bp, Unknown; identical to SEQ ID NO: 18511
  misc_feature (1)..( 3003): 2750-1469P.txt file - cDNA_ID_1818013; gDNA_ID_1621149; Annot_ID_173158

SEQ ID NO: 18513 - DNA, 3003 bp, Unknown
  misc_feature (1)..( 3003): 2750-1469P.txt file - cDNA_ID_1818013; gDNA_ID_1620785; Annot_ID_168123
cattttgtgggctagggatctacaatccaatgactgcaaaatatttacggcatgcaaaacttcttatgacaagtgtgtttgacacacgtctctaaaatttcaattatgtggatgtgcttatttgtatcaatgcatttcatgcttgcttggcttcgtatggaaaaagtatgagccatcataaaaatttgttaaaaaagattcgagtcatttacattgttttaggagccttttttgatcggttagggtgctagagaacccattacatactagtcatctgggggtattagtattttgtaagctgttttaaacgattccgaattttgtttctatattttgtggtcagatctgatggcctgaaaatcatccccaataatcaaatcttaatgcgcgtttaatattttactaaattatgatcatattattttttgcgatctagtcagtagtcactgtagtgaagttggtgagacgacacccacccaaaaggagtacgtaaagcaattccggcttccaattattttatgctaatcttgtcggcagatgagatggatacatttatacatatcatatataataggttgggaaattgttagtttcgttgataaaataattaaggttttgacttttgactgattctggatttgatttcaggaaatgtaaaattttccagattctgtatgtactttttgataagaaatttcaagttgctgcatgtcaaaaatttcaactaatctcttttgtagtgtataaatttatttactgtccaatagacaattgccaccgatcctaaggagcaacgtacaataccaaaagtttgcatgcataataaaagttcatttaaacataacgtataataattttcagagtgattattgtaactttcaaattttcacataaattttagagtattaaatcaaatagcctttgtaatttttgagtaaactaaatgacggtctttttttactcaaaatcaattacaaccctttaaaatatcctaaaagctttgttttaaaaaagaagataaattatcacaacaagaatataatctaactcactacaaaatgtaaggccaaagaagagatacgttcactgattggacgtgatggagagagctcacatctcgtctggccttatcatcatcgtaatctattgaagatatatatatggtaagacaaattaactttactcacggattctattctttttacccattctcggttttgtaacgaacgacgaaccaccaactagacaacgaaacgtcccacttgtttccattagttaaatttgggtaacaccaaaatcgcattaacttaataaaacactgttccaatatcaaccactgccatattttctcccttatttttttttgacatcaaaactgattttggagaggctttgaaaccccgactataaatttgatttaggtgttattctgatttatgagtgaatagttacacagtcggagtttgaactgaaagttataggattacatttttggtaaaaaattgttgagtcgtatttttggtagaaaacagtaaaattatgttttttgacagaaaattggaggatagtaattttggaggaaatcatatatatgaaaattggccaactctctccatatgattgacacataatcactttagcatttgacatgtgtctattaaataattaatgtaagctcttcaacttctaatttataggttaaagatatatttattatttaattttacatcttattttattttacgtatttaattatactattactatatttattttaatattacatgatttttcaataaaaccattttaatagttttcttatactctgaagttttttttttttttttgtaatccaaactcaaagtatgagtgtataatagtcgtggattacttaataatttgagtaagttattctcttaaatgaatatttatattttcttaaattgatatttatataataaatcactaagggtgaaaaatgcgtaaggagttccatcatcaaattcttaggtttctagaatccaacactaacctctgttaaattggtttaaaacaaacgttgtttatgaattatgtatatgatgcattgttgagaacgttgctagaaaaaaatatttttaatactaaaagtaattgtttattgcatgattgaatgattagataaatataaattatatttaaattaaacactacaaaagaatccgaaaaaaccgcgacgtagcgcggataattacctagtagtgttaaaacaaaattggaggaaattttggagatcacatttttaacataaaattagtagaaatatatattttaattattaaataaaaaattaaagtaagcgctaaatgtcattaagaaaattttgtgaaaggcggaaacaaaaattttaaaagaaaaagaaaggactaatcacatcatcgccattcaatgatatagtttgacaatgatatgattcattaactaccattcaataaatcggtttatgaaatctaacggttaaatattagttggtaaagcatgattaattaagataatcactcaacaatcaattcaggaccaacgtcacctagctaccaccacgaaggaaaatgctaatacaagaaccaaatcgtcttattaaccagttatctttttctcatggaccacatttaaatcgtcacggcaattaagctagattttaagaaagaataaatgggatactcaactaattgccacaaattttattacttttaaaactcggctgctcggcccaaacttatccggtacggatggatagacctatcttttatcgtgtaaagaaactcttgggctccactcttgacgttgctcattttatctacttttgttggtttcttagtgacctttgacgtttatttacatagagttgacagatttgaattgacgttttctcaataatgcagaccaaaattttcacgtttcttacatgtacatatatatagtaaaacaaatctctgaagacacacaagagaatcaagaacaatg

SEQ ID NO: 18514 - DNA, 1470 bp, Unknown; identical to SEQ ID NO: 7509
  misc_feature (1)..( 1470): 2750-1469P.txt file - cDNA_ID_1818017; gDNA_ID_1621149; Annot_ID_56821

SEQ ID NO: 18515 - DNA, 3003 bp, Unknown
  misc_feature (1)..( 3003): 2750-1469P.txt file - cDNA_ID_1818050; gDNA_ID_1621150; Annot_ID_56861
ttattttattttgttgatataacagggaacatctaataatagttgttctcttcgaaatgcagagagttagctaaagattttgttgtatctggaactgcttcagaatcactctatggagcttgtgaggcaatgtacaagccagatatggtttgcccgctaacaacctcatcatctcttgttatatttctaaatcccgacaatgaaaatgcttaaattaccacatctaggcgttgcagtttggtaggttcaaggtttagtgttactatgtagaaaagttgaatcttgaattggtgtgaacattaaggtgcataatgcccgtaggaatcacgatagccattagttttctctttgatatcttcaattatccctctctggcatgaggtgtttaatagtctgagcttgttagccatactccattgtactactctagacttatgtatcgagactctggcttaacacatgaggattttcaggaagctgaggaattgttcgagacaatatcgcaagcacttctctcatctgttgaccgtgattgtctgagtggttggggagggcatgtttacattgtgtaagttctcatttcttctcttcttttccacacatttgttatccaaaattagttcttaaaacaaacttccatggtgatgtgttgtacagaacaccaacagagattaaggagaggatcctaaagggaaggatggattgatctgcttcttctattcaagttgttttccgctgtaatccggttttaagtagtgtaaccttcacatcccggtttaattatatgatcattccttggctgaaattatgggttatgtatgaagtttgattttcctcttggataatggattatatgattttaattcgtagagttatcgaagaataacacttttaactcaattgtttccaactaaataagaaaaaacaggggaaactaaaatatcacagtaaccgccagatcttagagcagttacagcgactaactcctcaaaggcctctctaatttcctgtcctaattcgatcggcttgttatgtctgttaatccgcataataactaatctagaataatccaaaatcggaagttggtcgtgatgggtaacgtaatggactcattcttcaccggattctctcattctatcggaaacttctttggttctccacttgactttttatctggaaaatcttgcaggtaattatacacaaaaccatcacttatattacaataatcttcaaagtttattggtttgcttaacggaaacttaaaactaatcttacttggaacagttcggtttgtccatcaccgtgggatttcatatgctacgttgagaatttctgcgtggctaatcttgcgaaaaccgccttaatcctaatcttatcctacttctttctattcttcatctacatgctatacaaagttggtttttggcattgtatcatccacggtttcttcaaactcctatgggttttggtctcttgttggttctacatgcttggctattgttgtagtttcttctgctatgatctgctacactctaaacgtagaagaagacgcagacacaacagatatatagaggaagattatgatgataatagtgatgacgatgatgatgttgatgatgatgggtcgttcacgtaccatagatcgaagcgagaatgcagaaaagaagaacgtcttagaaagtctctgagaccgaggaaccatcgtgttagagttggtgtgaggaaagaccatcgttctgactcgggtttgagccaacatgctgatggtggtagtccgatacatggtgttagagtgagtagagagtctaagttcgcacggaaggtttcaaaacgcagaaatcgagttcaccatggtgatagaatgaaccatgtcagtcttcttaattaatacatcacaatggaggaattacctgcaactgtcaatgatctcctctaagctttataattcctcttcttgaaagttgaccagctgcatgggtcaatttttataaaccaatctctctgtgtttttggaccttttcattatgtttaattcttgcttcttcggtttaataagtattgtaatcaacataataccaaatatttagttttgttatgacttatgagggcaaaaccaaaacatgaatgagaatctttagagtgctcgcaaaatcttgaatcaagaatcatatttatggtaatgggctcctcaatattgcttcagggacaacagctagaatgtgtgatgtacctaaaggaccacaaaaaaagaacacaagtttcagcaatttgttttcattggtcaacacatcaattgttcacaaaactacaaaacaatctaactgaggttttactaacatgaatcatgtaaatatgataggttgctcgatttgtgcaaacacaaacaataagaaaactataagacttaaggaatttcatcacacacaaaaatacaatttatttttctataatctataatgttttgctttcattccgattatacccttgataatgatgattaggtgagggtaatttcgttatttacaattaaactcacataattacaaaataatgttgccttgccctgagataaacatcaccaaaaaatgttttttttttctttcttagagcaaacaatttgttttcaaaaaattattatttttggcagctcagcaaaattatttaattctttctgtcagttcatcaaataatttaaatattttgtccatgtgataataatatgtagcgcagagagtaaaaataaataaattcatttacagaattgttttgtaaccaattagatagcagtactttaatatctgaggctattttcgtcattttcaaattatggtgtgtttttttggagggagtgggaaaaaaaaaatcgatacatgaatgacgtgacctccattgatttcggcgaacgagcttcttcttcttccctctctctctctctttggctccatctcttacagtaactgtctcttggaaccatttcctcttcactagtatcttctaacaatg

SEQ ID NO: 18516 - DNA, 3003 bp, Unknown
  misc_feature (1)..( 3003): 2750-1469P.txt file - cDNA_ID_1818058; gDNA_ID_1621150; Annot_ID_56858
tgagctctcagatataatcgattcatggatcagagatatctctaactggtgagatcataaggataataagaagcgcatatgaaatctgcatcggaaaaaagttcacaaaccaatgccataaccggattcggagacttcacaaatggaagcttgatctcagtgtcagaaccttgctcggaatatcctgcagacgcaagcggacaattagtatggcatgtcaaaggaaataactatggaaagtaattcattgctacaaattgaataaaacaaaatcaccaggtaaatccccatttgaatctgttcctttgtggtcatatccatttgtagggttttccgtattagttacaccagaaacctcaacattatctaatagaccatcctccacaggtaatcgaagaaaatgaagaatgcattgagcttttgacttggaaccaacatgatcagcaatttgaacccaattttcattgtagagttccacagcttcaagaagcaagagagtttcctgatcagtccaattgtctccatcttgatcgccataaaatttcattggatccactcttacaaagtcaagacaagaatgtccaacaacaaatcttccatggtgaaaacaatcacagcataagagtatatccccctgtaaagtagagatgaagatcctttagttagaagcggtccagtatccgagacagtaagcaagataaagcttggagtctattacatcactgggtgcaaaaaagaatcagataatgatacacaaagaacagtacgtaaggggaagcagcctaagaaccttcttttgcgattggaagtacacagttggaagcggtcgagaacaatggttgcaatgactatcacataggtgttcacgaattctgatgtccaagtcagggctgtcaccatccaaacttggcaaggatgaatagacttcaccccccttgtgtctacagttgggcttgtcaaatttgatcaaactatcaatagatgttaaagcagcagacggcacattgacctcgccatttgtgtcctccctcacatccgatacatctctcaaagggccaggatgtgactgggcagtggcacagtaattgattattccccagtgatcaagaaaacggaaaactcgtgcaaaatcttcaatgtcaacaccatctaccaatccttggcaatcagaaatcgtcagtgtcttttcagggttctctacatatttggaaacaatggcgttcctgaattccatataactttcgggtgtatgatttggcgatttcccagagaaaaactgtggcaccacttgcctttcaagtcgatctactgtgtttggtgcaaaccaatctgctcaaatgtaacagcaaaagtagaagaataaattcgagcattgggaacaaaaatatcagaaaataaaaataaaataagaggagaatctcgatatatttgagccataggactccaggaacaaaacccaaacgaattagaagaacatcacttgcatagtctattcaagttgtacttctgagataagacacctaaggctacttcaagccagcaggtactctaatttatcatgtacaaaagttataatacctcttcctttccatcagacagaacatgggaacatagagaaacatctgatatgaaattgagtcgcgttcagattaatgtaaactaagaaccaggcactagacaaaaggaagataagaacttatacgttaaggagataccggcatacaaacctgttttgactaattctcattccaatcacaagatatatactacaatactaccaaccagcaaaagctgatgctgcataaagcctaacctctaacataaatgcgcgtatcaagaggaagaaaaaacacacctgaatgcataggcaagacatgaaccagatccccaaaccgtttaacaactccttctccatccataataggtggtggagagataacataagccgaagacgatccatcactcctctcaagatcaagagaatcagcaggtacagtagataacgcttgcaattgcccaaacgaaatgttctccagagctggaagtgaaccttgccctctagtctcccctatcaaaccagctctctcagccgccacaacagccattacagacgcgtgtggccggatcacaacacgcttaaccactgccgggaaatcagagatgcgcgaaccagaatcttcaactacctcgccaataccaagtcccggatcgggagttgcgccgccgttttgctgaagctcatcggcattttcaacgtcatccatttcttcgttgttgttgttgttattctcttcgtcttcttcctccatatcttcctcctcttgtttcggtttcctcgccgccgataacccccctctcttcttccttttccatttccctcttctatctgcgacagaattgtaaaaagtgtaattcaattcacacgaattctcgaaatacccatcactacgatctatgtgggtaagtcaaatcccaatttaaatttggattttgagagagataaagatgtgaaacagcaatttaccttcagaagctggcatttttgtggatgaagatagagaaatagaggttttgggttctgtggaatcgaagcaagacccttagtaaaaagaattgctttctttgtcttctctcctccgagtcgttctgatttccagctctcgagctaaacaccaaacctttttctcgcaatttctttcaccatttccttcattaatctctatatattaattcattctccacgacgacctaaccttctcgacaaacaagagggttctgatttcgaaattcaagcttcgttgaccaatccaaattttggtttaacttcggttaaagtcaactttacttcggttttatttttcaattttgaatgagaaaaaccgaatcaattatttagttcggttcttaaagttcaaattggttaaaccggtttaaattgatacattagtcgaccgtcgcgcattaatactggtgtggtggttccgttaacgagcaacggcgatg

SEQ ID NO: 18517 - DNA, 3000 bp, Unknown; identical to SEQ ID NO: 7528
  misc_feature (1)..( 3000): 2750-1469P.txt file - cDNA_ID_1818061; gDNA_ID_1621150; Annot_ID_56857

SEQ ID NO: 18518 - DNA, 3000 bp, Unknown; identical to SEQ ID NO: 7528
  misc_feature (1)..( 3000): 2750-1469P.txt file - cDNA_ID_1818061; gDNA_ID_1621150; Annot_ID_173208

SEQ ID NO: 18519 - DNA, 3003 bp, Unknown
  misc_feature (1)..( 3003): 2750-1469P.txt file - cDNA_ID_1818067; gDNA_ID_1621150; Annot_ID_56855
aacggttgaattattgtcgtgtgctgcttgcaccatggtccatgctagatggaccgaccactatttttccaaacagtgcctatcctatcaagtagatattttctgaatacgtagataattgtagaatacaagaaaagaaatatcctctgtggaataaatgaataatatacttttgtcagaaacgttacaagttaaaattccacgactgattgccacgtgtaagcttatctcaaaagggccctacagtaccatgatgacgtcatctcttacaccactctctgaaaaattcctccgccttataaaaaaactcgattatcgtcttcacttagtagccaaccaccgaccaatccgccatgaatatatctcagattattttcttcgcgtcccttcttctacggcttcacttatcaacggcggaacatcaaaattcaaacgctggtgatggagacaccatcatattcaccactctaggacgatcgcactacgaatttgacatattcgccctctccacgactcaaccgccgtcagtttccggagagctccgaatcaccgatggggaatcggtaaatttcaacggctatttcccgtctccttctccggctctattatctctccttcccgacgaaaccctaattcaaatggaagattcgtctcctctgcatctcatatacgtcaccgagagaaacggtacttctagcttgtactacgatctagtttacggcggtaattctgattttaaaacgaaacgaagatcggtgttagaagcaccgtctcgagtccaagttccgttgttatcccgctttgatcatctgagtggcatgacggtaaattcttttaaagataagcctagtttgagtggtgagtttattgtctacgtgtcaacccatgagagctcaggtgagccgagagcaagctggaccgccgtttactctaccgagttaaaaaccgggttaaccaggcggttaacaccgagtggtgtagctgatttcagcccggcggtatcgccttccggaaatttaacggctgtggcttcatacggagagagaggctggacaggggaagttgaagagctacgtacggacatctatgtattcttgactcgggatgggtctcaccgtgtcaaggtggtggagcacggtggttggccgtgttgggttgatgagtcgactctgtatttccatagaagaagtgaggaggatggttggatcagcgtttaccgagccatcttacctgaaaacggaccgttgactactgagtcggtgacaattcagcgagtcacaccaccgggagttcacgctttcacaccggccacgtcaccaaacaaccacgagttcgttgcggtagctacaaggagaccaggctcggattaccgccacgtggagttgtttgatctaaagaggaatgagtttatagagttgactcgtttggtggcgccaaagagtcatcacttgaatccattcttgtcccctgactcgtctcgagtcggatatcatagttgtagaggcgatgctaatggacggagaagtcctctgctcttccttgaaaatattcaaaccactacaagggacctctctctctttagaattgatggttcgtttccttcgttctcacctggaggtgatcgtatcgcatacgttaagatgcctggtgtgtttgtggtgaagccggatggttcagggcagcgtgaagtgtacaagggaatggcgttttcgacagcttgggatccggttcgacctggaattgtgtactctagctcaggtccaacgtttgctacagagagaacagaggttgatgttatctctattgacgttgatgcagccgataagtcatcttccgtgaggaggctaacgacaaacgggaagaacaatgctttcccttggccatctcctgatggtaagcggatagtgtttcgttcggggcggactggtcacaaaaacctctacataatggatgctgagaaaggagaaagcggtggtctatggaggttaaccgaaggtgcgtggaccgacacaatgtgtaactggtcaccggatggggaatggatcgcgtttgcatcagatcgagaaagccctggctcgggtagttttgagctcttcttgatccaccccaacggaacagggttaaggaagctcatccaaagcgggacgggtgggagaacaaaccacccgatcttcagcccggacagtaaatcattagtcttcacttctgattatgctggaatctcggcggaaccgatctcgaacccgcatcattaccagccatacggtgatatcttcacggtgaaattagatggctctaatgtgaggaggctaacgcataactcttatgaagatgggacaccggcatgggcccctcggttcatccaccccaacaatgtggagctacaaaggaggaatgattctaggtgctcgttcgaagactgtcactggctcaacaagtaccctacactaaaaggccgaaaaatatcttgttaatatgtatctacagttttgtatcccagcttgtaactctacttatagatttgtatgagactgccactgtatatgcataagactttgtattatagagatcgttaatgtgatatgtatatcatattgtcaaaacagtcgtgataagatatcaaaccctcttctaaatgatagtcttgctattgcggtttggaatcctcatgaattatccaatgtcaattcaatctcagcgtgattgaagacaggtttttaaattccaaaatctcttctttaatcacgtttataaatcagttttgatacattattactatgttttgcgtacgtgtcagaagattactatccatgtaatgtctgaagaattaggtgcgagtcaaaagtcataacagtcgataagatatcaaaccctcttcgtgacttggaaggtttgaggcgggggcgggaaaatccagaaaacgtcggataatgtttataaaggagtctctccgtcaccggagaaaaattagaagaaaaaagaggcgaagaagagagaggaatg

SEQ ID NO: 18520 - DNA, 3000 bp, Unknown; identical to SEQ ID NO: 7531
  misc_feature (1)..( 3000): 2750-1469P.txt file - cDNA_ID_1818079; gDNA_ID_1621150; Annot_ID_56851

SEQ ID NO: 18521 - DNA, 3000 bp, Unknown; identical to SEQ ID NO: 7537
  misc_feature (1)..( 3000): 2750-1469P.txt file - cDNA_ID_1818083; gDNA_ID_1621150; Annot_ID_56850

SEQ ID NO: 18522 - DNA, 3003 bp, Unknown
  misc_feature (1)..( 3003): 2750-1469P.txt file - cDNA_ID_1818091; gDNA_ID_1621150; Annot_ID_56848
aatctcaagctcttgcaatcctacagaggaaacaagagtggtcaagagaaagaacgaggctgtaatggctgagaaacaagtcgttcttgccctgaagaagcccgaacatccacagacacgtgtaatcccagctcctcagaatctgaacatcccacgaacaaccccggacctgaacttgccaagttgacatcacgattgacaaaggagctcttagaaacgccggagacaataacctctggcctcttccttccttgtattttgaggtggcacggcattagtcctggcgatgccgatgcttggtttttttagctacaaagcatggtttataaagttgtctgtattccagtttggctcttattaagttagttactctatttacgtgtcctttttcaaaactctaatgtataaagttatgattttacgggcaactctttacttttgagtaaaaaaaacagagcaggttttagtactgaattttgggtaacgtagttgaaaatttgatttcggacgataatgtaaaattgatgaaatacatcaaaatgactacattaatccttttgacacaatatgaataatcaattttaattaatattattattacttgtaaaacagtataaatatggctcattatttcacagattctcaacactctctcattctccacaatttacgatggcacaccagctccgttttgccgccgcaagagaacccatctcagaagagtatccggcggttgctcttcctcatccacgttgcatctccgtcgcgtttcctcctccgagattcacaccatctccgtcgcctttaactaattactcattcttggccgcattaactcctcaagaactggagatgcgtttgcaaattgcaatggatgtccgtaatgactaataacgaagatcatgttgcggctccgtttgaagagatgatctcgaagttagaccaaagaaagcttcaaacgatggcgtcattgctgacatcagatcccgattacttcttgatgatcgcaagaaacatgaacggctccaaacgcattcagaaacttctcggaaaaacagatgacgtggacgctttattcgccgccgctatcttgcgccgcttcctccacatcatcaccgacaagtacgcgtcgtacgtggtgagacgggggatgacagttttcgataagaagaagaaaaaagcaatgtacgagcacattctccactacgcgagccacatagcgcgtgataaacacggtaacctcgcgctcaacgacatcataaccgacgcggtacagaaacaagctctttgacgtaatcgcgcacaaagctcttgtactaagcaacgatgcttatgggaactttgtgatacaacgcgtgcttaaactgaatgacttgcgtagcaagaacaacatcgtcgttagtctacgtggccactttgttgatctctcgtttcagaaatatggaagctacgttgtggatgtacttttggagacgaaggagtcaatggttgtggtggtggaggagcttatggaatgtgaaggagatatgttgatgaggttggcgaggaatgagtatgggaatttcttggtgtgcaaggcactgagagtcacgcagaaggagatggttaggactgatctgttttggggtttggtgcataagctcaagccttttcacaatctcttgcgttggtctcgtggaaagaacattgcatccatcttaaactcgattcgttagttcgtctcaaaactagttaacattgttcagttattaaaatctctgctgaaagttctcgatttgatgttgttagctaactcttttaaggaggtttaccataacttgtcaaaaacacaaagaaagggagaagagggattgatatacagtatatagaattctctctttcgtgttattacttattagaacaagtttgaaagctgaagcactcacagtaatttctgtaattaaggacgttttgccttatgatcaaattctacaatagatcacctgaaattttaatacaaatcctaaatccatcaaggtatgtatcaaattgagatttctgtaactactagagtttgaccaaacagttttagttaacctgaatgtgtatgcctaattgcctattgcctcataatgcatcaagcaataccatctactaagcgaaaatggctcaagaaacaaacgtagagaaatcaaacattaggcattaagatttgggatagatgtgctagaattttctttgattgttacgataaagaaacacaaccctccaaaacatttttatatgattgctttttttaggtcgggtttttatatgattgttatttccaaggaaaactaaacacaaaaaataattatgaaacgtttttcggattgttattattagtaatagattaaatctgtatttctaaattttaaattttattaccaacaaataaaatgatatgatttcatatatcaaattgtaagttttgtgagcaaattttcaaaaagaaactgtgggtattcatcaatgataatctatatttggattattatcatgacaaaaaaaggttacagaaaaattaaacaattgtagatattgtttttattttagatgaaaccttctgtccgtattataatttgcatctcgaggttcttatacgatttgtactgaataaaacatattttttttgtttttaatcataactttcccaaaaaccatctcttccatcgctagctgtaccggtttcaatctcaaatcctgggaattgaaatttgtttctctgtcggagaatcatcatcgacttctctgctacttctctccgcgctctccttcgtcgtcgtcgatctcttcagcttcaccgatctcatttccaatcctgaaaaatcgatgtggtactgatctacgattgtgctccgttggtagccttatgaattagggtttttcttacgcatcttcgtatgtggagattggatcgtgttcggaaaacttctggacactgtcttcgctgctagatttttggatcatccttttgcgaaaatg

SEQ ID NO: 18523 - DNA, 3003 bp, Unknown
  misc_feature (1)..( 3003): 2750-1469P.txt file - cDNA_ID_1818099; gDNA_ID_1621150; Annot_ID_56846
cacgccggctacaagttctaactagtccactcaacaacagtcaacaccatcccaatttctcaaatacaaacactttgttccaatcttgaatatgaaaatatctcatcacaagaataatacaagccatcataatcatcaattgaaaacttgaattaaacacctcaaaacttgcaaataagctagcttctctagtcattgaatgttagtccatcaaactattgcatctacacacttttttctagaggcccatattcatctaataacacatccatctctgctgctagtgcagtacctgaggtcaccaaaattgtataccctccaccatatcatcgatttagatcatctgctctcgttttccatctcaggaagaaagttatgctgacttgtcgtttggtgtctctcgagttcttctagaaccaatttgagacactgaagtctcgtagcttcctgagatgtttctccatgtcttctctagtcttggtccactcttctctttctattaccgttgttgggtcatctctttcaccctgaaagaatggaaatatatagacatagagtgaagatgagtaaagctagatgaaggaatacaaatgactgccagatgaaatggatttggtcatttggaaatggaaaggtaccacgtgtatgatcttaaaggaggttccattatctcgtatcacaagcaagtcatccttcctatccctttttcttcctcccggaactgtcacctgaaacaatctaaaaccttaacatcggaaagaagattgtcttcatagctttgagctatgcacagtatttaaagaactcataactcaagatatctgattcagaactagaggcataaatagcactaatataaaccagcatttcattagtgttatagcatgaaaaatattctataagaatatgtcaaaaaacccaattggctatggtctacggttgaggtttgtgctcagactcggaatgagaactttgttaataatgcttaaataacttggaagataagaattagtcataccagaactctggctctggtgattgactttgtcttggaatcaataacatatatctcttcaagatctagcacaaattctggatcgtttgtccttctgttccggtaatgttttgtcaagaaaacctgcataaaaaataaacacgatgaagacaatttgtatcagaaactgtaactactaaactaagtagtttcgtgttgatctcatccttaatgcttaaaaaacatatttcctggtgtggtttccaaaaatgttgtcaaatcaaaactaagtacatccttgttaatacatgttgctcaagactccctgcatcaaagacctaatggatttaacatcaatgtacatggtccaatatgtaccttggatatctccctctcagatttgtacagtggatctctgggggcatcaataggtggttcagtgacattgtaacatccatagtcactcattgcacatcgaatatactgtacttgtaacatcattaaacaagcccttgttagcaccactcactcattgtaacaacttgcttataaataaaccttacaatgtaaaacatacgcaatcatgaagcagcaaagagtacaaaactggccacagaatgaaaggaaagtgactaaacaaacacccagctgctacattctgactctctaatcatactaaatgctgaccatttacggcactttttgagattatatgttcaaaattccagtctatcagtgtgagtagaagttccaaacaataccaaacgtgtacagctctgtgtagataagatttcttaagttatacaattactaggtagagtgaaggtatatgggttatacaattactaggtagagctctgtgcagataagatttcttaagtgatacaattactaggtagagtggaggtatatgggttcaattagcaattaagcacaatatgaaaagcaattatcttgctgaacaaaaggaagtctcagaacaacgcataggcattacaaaaacagcaaccgataaggataaatgactgaccttttgaggcatcggtgcaagaactctcggaattgagtaaatatctgtatccggaggagtaacatacatctgcagccacccacacaaaacaatttacaattgaagaatgagcacagactctagagaaatcgaagaaatgagcaattagagtcactgggaattcacacacctctctgaaatcataaacatcattatctggatcaggaggttttctgataaagaaatcacagtccattaagctgagtttatgaaactcatcttcgtttatccgataatcaaccaccatatccgaatcccatccttgtgtcgatataaaactcttactctgaacaaaagcgatatctccatcaccaccaccgcctgcagcggctatcgcggcggccaaggggtcatactcgacatcatagtccttcttgttgtcaacttcctctacctcctcatcatccatatcatactcgtccgctccacctccatcagcatcgacgtcatctactttaacgactataccacggccgcgtcgggatttcagtgttaaaggcgcgaaaagaccgtccgttctgaatgacgcaaatagccgctgagagccggagggataaggtggcttcgaggtgaatgagagtagagataaggaaggagaagcggcggaagacgccattggaagcggataaagctcacagagtgttctatctatctgtggattagatatttcgaggaaaaatacaattaaaaaaaaaagaaaaactatataatataataataatcctttttagtgaataaaacaacaaaaataaattaggaaataattaagagcgtcatttttggtatcccgcgcaactttttcttctcagtttcagtttctctacatcgattcatcgattccactctcttgattgctgtttagatcaatccgtctcgaacccaggggttagtatatagtggatcaaactgatccgacccgacccgacccgaattattaatg

SEQ ID NO: 18524 - DNA, 3000 bp, Unknown
  misc_feature (1)..( 3000): 2750-1469P.txt file - cDNA_ID_1818115; gDNA_ID_1621151; Annot_ID_56890
gctactatgtgacttgtatgacaaatacagtcgaaacttaatatgatattcggtacccaaatgacaaaaacccacgtacatcaaaagcagagaggctttataagaaatctatgactatcaattttattttttcccataaattatatgcatggtagaaatattatgaaatgagtttccttaactatggttggcaactaaaaatgtctttagtgacaaaaatatgcaacttttctacaaactgcaaatattagtttagattaaatcaaacaaatcatgccttcaaaaatctgtaaaacaaatctttttatttttaacgccggtggcaccatagacgaaatcgacaattttgaaggttggagttggatttgtctgaattttttttttattggaatttggaaagcagctgaaagatgactaaatgcgcagcaaaactcttcattcaggcttggcgtaacttgaatttgttttctttcttctatttttttagtttcattctagtttccgatcaagtcttatggttaaaatactcaattatatactcatcatttaggcatcgaaaacggtcctaacaaaacaccaaacatatattcctaggctttcacgtgtttaattcttacccgcatgatacatttccctcaaatggattgacataatgctattgttgttaactttttgtttgacacaaaatctatctagcaaattttttatagttatagatttaatatacgcaatgttagcttgattttgtttctaacttaaggaaaagttgaaggatgttttaatttgcaaggttctctttcaaaaagatttcgtgtaaattcgacaacggcctcaaacctactctaatcctgactctaaataatattataggttgaaagctttgtaattattgtttactaaaataagagaagaaaacattattacttactctcctttagaaatatatgtttgcattatgctgtatatatagatgaataaatgccataaacgtttaaatgtgtgttggtagatgtcattttacttcattcttagaggtctcttctatcaaatttagttacgtatataaatatagatgtcttgtgctttcttgcaaggaaataaacagagataatatactatttcatacacatccacacacatatagatgtctttttgtttgttgcatggatgtagacatacatccattcacatttccaagtatatacactaacctaatgacctaatgttcttgagagagacttctttcacaacctcttctagaatgtgagtttcttatatttttgttggtataaagtatttgaacatctttatcaaaagttaaaatgtttgaccatattcttggtaattcaaccggtaagtaaatgttattcttctatgacagaacccttaattttgcctgttgtatactagaggtttggttgggtgaaaagtgggcatgataaaaagaacaacatttagttttcctccttgatttttctaaattagagtttcgtatcaaaatacctaaaaaagcttgttttgtggtgcttccaatttcgaaatcggctaaactttttccacatgatttcttcttttacgatagtaagatttagaagaaaataaaaactgaataacgtcagattttccttaataaaagaagaagaaaaatctcacaacattttaagttcctttatttttttgatatgtgccctaataaatgcagtgaaataagctcacaacaaaagatgcacaacgagataaagccaaatgaaatttagtactggtatacaaattttaatgacacgttaatactctttttcgttttggttttataatcgtacttaatattcataactagcttcgaatctggtatttgtatacttaaaaagcttacatcagccaatctactatcattgaaattgtagtgagaaaatctaatataattctttagtgactgtttgtcaaaaaaaaaaaaaactcatgtctaaagtacataacaaattcaaattttgatacaaaattagttatttgtatttgttgtgaccatttctattctacattttgtttgattattagttgaattattcttagttaaatagagcaaacaaattaaattaaatgatttcttaatctataattactgtaaatacttcaaacatcttttaaatagaaacaaataaaataattactaagacatttgtccttatataagtctaataaatgtgtgttttaattcaatacctccaaaaataatttcaaaaaactagagttactgaattggtgctttcacacggtgcatgcattgtattcacacctatatgcatgtcatatattcatggtctctatgatctcgctctatataaacaccacccaatcgaccaaccttcttctctgattattttctcaaattatttaattaatttcttcttcttcatcaccaccaattacactcaaaattatggtgtttgcacatttgaaccttcttcggaagattgtggggattataggttagtccagaattttgacatctacaagttattatatctatcatgatttttttgtcccttcttcttaactttggatgatcttgtttgcaggaaacttcatcgctctatgtctgttcttgtcaccaacgtaagtattttgctatatctatgatttaaataaaattccagaaacaatgaaagatacgtgaaaaagagattcataaaaacgaaaatcgtatttcttaaagaaaaccaaacttgtttcatgaatttaacacatgcatggttcatcctgactactgaaagatctgaaattttttgtttttcattctcactgcagctttcaaaattttctttgtgtagtataatcacaatgtgaaaattgatacttttttcctcataatataatgttttttcctattatactaattgataacaattaagaaagtttatttatgtaatagagtttcttccaaaacaagagaaaaactaaaagtatgtatcatcaataaatgactaatacttttaataaatg

SEQ ID NO: 18525 - DNA, 3003 bp, Unknown
  misc_feature (1)..( 3003): 2750-1469P.txt file - cDNA_ID_1818129; gDNA_ID_1621151; Annot_ID_56881
ttatttaccgttattttgtaccattttaactattcgcattttcggcttaaaaacttgtatagcgttgtgtcaatgtaattttatatgttaatgttaattattacaatttctttttctctaagttttataacccaaaaataattatttatgtattaaatattagtttaggcctaatgagtaccatgtgaaagagtaattgttctactttctatttttgtatttcatataaagtttaatcttgttcttctgaattagtttgtattatgtttacttacggtcaaaagaatctgttagttactgtcaaaagttaaaacttgattgttctgtcttaatttgcaggtggatcttcgagacaggtctgctcttgagaagatattctcagaaacaaagtatgattgagaaaaaaacaaacattcttttagcttcttcactttatcactaacaatgagtgataatgcatattattgggtttattctttattgattgatgaacgtggaattattattattttacaggtttgatgcagtgatacattttgctggacttaaagcagttggtgagagtgtagagaagcctttgctttattataataataatcttgttggtactattactcttttggaagttatggctcaacatggctgcaaaaatgtatgtataatttgccactacacaacaagttcgaatccatttttactttgcttgatcaattctcatgattagctacttttactctgtttccagcttgtgttttcatcatcagcaactgtgtatggctctccaaaagaagttccttgtacagaggagtttccaatttctgctttgaacccatatggacgaacaaaggttgttttcttgacaaaacccacttgagtattgtggttaattatgaagtgtgaatctgacttattatggatgtttttgtagctattcattgaggaaatctgccgcgatgtatacggttctgacccggaatggaagattatattgcttaggtatttcaatcctgttggtgcacatcctagtggtgacattggtgaagaccctcgtggtattccaaacaatctcatgccctttgtacaacaagtggctgttggtaggagacctcatctcactgtctttggaaatgattacaatacaaaagatggaacaggggtatgtacttgtcttttatgttttcataaaacaagaagaggttttcaacattttgatctcatgttttgttttaggttcgagattacattcatgttattgatttagctgatggacacatagcggctctacgtaagctagaagattgcaagatcggtatattatgatttccattcgtttctcttatctactacaatcattctcaagtctcttaactttgtttgtgtgttgtttatattcaggttgtgaagtgtacaatctcggaacaggaaatggaacatcagttcttgaaatggttgatgcttttgaaaaagcatccggaaaggtaaaaagtgacactttctttcatctttagatacttggattctaagtcatgttttgttaaacctttgaactcttttgtggatcagaaaatccctctggtgatcgcgggacgtcgaccgggagatgctgaagttgtatacgcctcgacggaaagagcagaaagtgaattgaattggaagtaagttcatacatacataaagctataactttgaagatattacttgcacaaaattgtatgttagacactaaaaagttgggaatatgtaaatgagataagtctaaatttgggttggtaacaaatgcagggccaaatatgggattgaggagatgtgtagagatttgtggaactgggctagtaataatccttatggatatgattcctcttctgaagacaactctcattaacttttcttaatcgttttcttcttttgctaaaacatatttctccacactaaattattatagtatccgcaagaaaaaacaacaacaataaagagtcagattttagggaaatatagggacattatgtattattattacaatcaatacttagtctgtaattgatttggatatgttcttgtataatcaaaaaagatttgttatgaatagctacaacgcaaatgtttagctctatacggcaaaaagtaccttgaggttgacacgacgtcgttttcagctcggtgatagttgaaatgtatctttctgaagcttttaagttcaagagcccacacacttcttctcattctttataaacataacactggacagtaaccaaacttcagatctgaatcaacctcttaaggttcgtttatactcattctgtttttcactgatagtttatgcacaatccgaatctttcttctatgtgattgttttggatttgattataaatttgacattatcattaatttagaatgattttgtgtgtgttgggttgtttacaaaatcatttctttgaatgagtttgttttaattttgtgttagggttataacgcgattgggaatttagttgaatttagaactaaatttgtgctagcttgtgatttattgtctctaattttgaactactaatatttgattaccatatgtttagtggtacagaagaagagaaaggaatgatgattagtgaaagagatgattttagtctcactggaccattacacttaacatctatagattggtatgcatctactacttctactctccttttgcatttttcgagattttgtttcgtcgaaaactgaatctttatgtttatgaaatgttgttgagttagctaatgtcttggcaccattagtttagagctaacccttgtgttaaaagacctgaaaaattgttcctttatgtgaaaaatgcttcatttacttccattttcgagattttgttatgtcgaaaactgaaactttgtgttcatagaatgttgttgagttagctaatgttttggcaccaattggtatagactttagagtttagagttaacccttgtgtttaaaaacctgaaatattgttcctttgtgtttaaaatg

SEQ ID NO: 18526 - DNA, 3000 bp, Unknown; identical to SEQ ID NO: 7545
  misc_feature (1)..( 3000): 2750-1469P.txt file - cDNA_ID_1818137; gDNA_ID_1621151; Annot_ID_56878

SEQ ID NO: 18527 - DNA, 3003 bp, Unknown
  misc_feature (1)..( 3003): 2750-1469P.txt file - cDNA_ID_1818153; gDNA_ID_1621152; Annot_ID_56913
aaaagaatggtttaagattgaagaagagttaaatatttttatttattctttcaaaaatattaaataatcaataaaaatcatatttagaagatattttatggacatgtgattttggcaatttccccataggaaaaagcgaaactctctataattgattgttactggctttgatactttgaagactgaacacaaacaaaaaaatctcttatcacaccacctccaatggagagcattggcagccattgttgcagctctcctttcaccttcatcactagaaactcatcatcatcacttcctagactcgttaacatcactcacagagttaatctcagccaccaatctcaccgactcagaaactccaattctcgtctcacttgcactgctacttcttcttccaccatgtaaatgactccttcatcttcttaaatttggtctcttttgatcatgttattgaaattgtatgagtaagtttataaaaatcgaattttgatttgaccctagtgaggaacaacggaagaagaaagatgggtcaggaacgaaagtgaggttgaatgtgaggttagatcatcaagttaattttggtgaccatgtggctatgtttggatcagctaaagagattggttcatggaaaaagaaatcgcctttgaattggagtgagaatggatgggtttgtgagttggaacttgacggtggtcaggttttggagtataagtttgtcattgttaagaatgatggttcactttcatgggaatctggtgataatcgtgtccttaaggttccaaattctgggaatttttctgttgtttgtcattgggatgctactagagaaacccttgatttgcctcaggaggttggtaatgatgatgatgttggtgatggtgggcatgagagggataatcatgatgttggtgatgatagagtagtgggaagtgaaaatggtgcgcagcttcagaagagtacattgggtgggcaatggcaaggtaaagatgcgtcctttatgcgttctaatgatcatggtaacagagaagttggtagaaattgggatactagtggtcttgaaggcacagctcttaagatggttgagggtgatcgcaactctaagaactggtggagaaaggtatcacttttggactgttattttagtttcctcttacttgttttcctttgaagctggggaataatgaaacattacctcaattttgaaatgtgtttatgtgttcaagcttgaaatggtacgcgaggttatagttgggagtgttgagagggaggaacgattgaaggcgctcatatactctgcaatttatttgaaggtttctcttgtctttctatagcctaacctaagttatcttttctcatatatctgggattcaccttgcttactctttttgtttgtttgtctggcttcttatgcagtggataaacacaggtcagattccttgttttgaagatggagggcatcaccgtccaaacaggcatgccgagatttccagacttatattccgtgagttggagcacatttgcagtaagaaagatgctactccagaggtgacacattttttcgctttcaagatctcgactttcaagtctctcttctcaaatatttgtagttggtgtgttcatagtatcatcttctttaagttggatatgattttatttcgtaggaagtgcttgttgctcggaaaatccatccgtgtttaccttctttcaaagcagagtttactgcagctgtccctctaactcggattagggacatagcccatcgcaatgatattcctcatgatctcaaggtaataactcttttctcctgttttgtcattagatcagtttttttaatggtatccatataacatatctatgttccagcaagaaatcaagcatacgatacaaaataagcttcaccggaatgctggtccagaagatctaattgcaacagaagcaatgcttcaacgaattaccgagaccccaggaaaatatagtggagactttgtggagcagtttaaaatattccataatgagcttaaagatttctttaatgctggaaggtatttctgaaaccacctatcatttcgtctgattaacttgctaaatgatggtcccatggactgtagaattcaatagctcttgtatcttgttgcagtctcactgaacagcttgattctatgaaaatttctatggatgatagaggtctttctgcgctcaatttgttttttgaatgtaaaaaggtaagctctcacttttcttttacatgtgattcagtgcttttctgttggaagtatgcaatatttattgggttttcttgcatgatcttctgaagtggtatttccctagacacagcaatgctagggtagccaccgtaaagatgcagattaaattaataacaacccatccttggttgcattctctattccaataaaaggaaagaaaatcaaaaccaaagggggatgtactcttagaaacgccacaaaaggagaaatgttgatatgtgtccatataatcacatcatttgataaattgtgcatgttatacacaatcaatgagaattttgttattgtagtctcttcataagactgactgcgaaattcatatttccagcgccttgacacatcaggagaatcaagcaatgttttggagttgattaaaaccatgcattctctagcttctttaagagaaacaattataaaggaacttaatagcggcttgcgaaatgatgctcctgatactgccattgcaatgcgccagaaggtgagctattttaaacaatccagcattatcatgtaccaatttatttactaatatagtttcctcgtttcattagtggcgcctttgtgagatcggcctcgaggactacttttttgttctactaagcaggtgtgcataagattttgattgcttttaagagctaaatttcttttggaagttattaaaactcctgctacctttctccgtctcgtcttatgtctcgtcaatgatttgtgtagattcctcaatgctcttgaaactatg

SEQ ID NO: 18528 - DNA, 3003 bp, Unknown
  misc_feature (1)..( 3003): 2750-1469P.txt file - cDNA_ID_1818157; gDNA_ID_1621152; Annot_ID_56912
aacgaggacccaatgttgtacgaatgatatcagcaacagcctgtaccacaaaaacaacgatgatctgaaaccagaggagagaagcaacaagcatcacagagaaaaagagccatagaaaaggattaatttaccttggaagcttggatattaccatgatgaaccttacttccagattcacgcttcaacgaatcgcctaaaccattttcacaaaaggagttaatctcgttaccaaaaaactaatatcgatttagaggaaatgagatctggaggaagatggagatactcactcagaacgagtaccggtgcgtgcatatttgcgatctgaggttttcacagtgaagaagaagcttagagagacacggcgagtgattttcaaagagcggcaagtggaagatcctactgccttctccgatttctttcatcctctctcgtgcttttcattttaggttgagaagcccatccctaaggcccattaactaatatttcacacattgggcctttttgtaagatcaaaacaaagtaatagtatttttatatccggaagattaggtaaagatgcgtgagaacgggagaattgttaacctaatttgttaagagggaaaaaatacaaaaaatacttcatttatttttaatttgtccgtttaatacatgcgttatttaatttacctgtttaatatttaagttaatttttatgtttattgaaaaccttttttttttttttaattttagcaaaatcagacatccgagttaacgggcgttaacagtggtaacgaaatcgctaactgtagttaaaacttaaccatataatgtttactatttatatacaatttgttttctaataattatgaacatattattttagtcgagtggttatgagagagattaccatcatcatcgattcaaaatcgattatcatctccaaaattttttttgattttttttcttttttttttaacaaaaaggcaaaatcgaagtcagccatctctttcacttcaacaggctttgcacttgtgtgttgcttcacttctttctccaaaggatattgcaccaaaatcaatcaccaaccaaaagtcccaaatgttagaccaattaatacaacatagatttgtgataatcgatcttatttgttatcaacagatgcaattaatggtaacataatctttctataagctatcaacgttactaacaatgaaaaacaaagtctggatttttcaacgcaaaatatcagcaaaaactgggaatatgcaatctttgctgacttattcatatcaatcgatctagaaattgaaaaccttaatatgaattgaagagatgaaggaatctaatttagctcgttctcaaaatcgaattgaagcagatctaacaaacgtggtgctaaacaaaagaaagtctcagaatcaaattcaaaatcgtaactcggattactgagattttgccttttgttaaaaaaaaaaatcaaaaaatttgttggagatgagaatcgatctcgaactgatgaggatgataatctctctcaaaaccactgggactaagataatatgatcataactattagaaaacaaattgtatataaatagtaaacattatatggttaagttttaactgcggttagcgattccgttaccattgttaacgcccgttaactcgcatgtctgattttgccaaaatttaaaaaaatgaaggtttttaatgaacataaaaattaacttaggtattaaacggccaaattaaataacgcaggtatgaacaaattaaaaataaatggagttttttttggtttttttcctctgttaatagtataatctccctcgacctaatccatctcccgtcagaaagttgttccaaactcttcagtgttatcatcttttccttttaagattatttttgtcaagtctacttcttataacaagagtaagtgctttccctcctgttttaggtttttgtaatttggttcgctaatttatttgatttctcatttgtgtttgtttcgtttccctgaatttttcttcctttgatttttcagattacagactttgagactcttagtttttactaagacacagtgtgatcaaagaaataggcccatctttgttttatagaattctttgtaatcaggttgtgttgaaccttgttatgtaggctatagtttttgctttgaaagccatgtatgactctgaactattactcaattttttaaagtaatgtgggattttttctacttattttttttcttcatcgattgagtagtatatgtgtgtttttaaaattttgaattacctcatatgcagaaaaaactaatatatttttaactatatgtattatatatatcaaataaaaataaattagatataagaacaaataaaaatgaaagaaaaatcatatatttattattaatgtagatatatagattttaggaaattagcaattaattgaatgtaatttaataaatataaaaattaattaaagatttaaatttaaaataaaatatttttagataaattttgtagggactaaaaaagaaataaagaaaatagttaattcaagtatttaatgcaaattaacgatttgtaaatttttaagaatataacattttggttgagatagaatttataaaaactcatatgttattagtaaatattagagagatttttgatcaaaaagtgcatcaaaaatatatatataaatacttttattttaatttcaaaagaaaaacattacctaatacgtatcttattcctaggacatttatgattgatctatctttacgtattttttacgaaaagaatggtttaagattgaagaagagttaaatatttttatttattctttcaaaaatattaaataatcaataaaaatcatatttagaagatattttatggacatgtgattttggcaatttccccataggaaaaagcgaaactctctataattgattgttactggctttgatactttgaagactgaacacaaacaaaaaaatctcttatcacaccacctccaatg

SEQ ID NO: 18529 - DNA, 3000 bp, Unknown; identical to SEQ ID NO: 7572
  misc_feature (1)..( 3000): 2750-1469P.txt file - cDNA_ID_1818161; gDNA_ID_1621152; Annot_ID_56911

SEQ ID NO: 18530 - DNA, 3000 bp, Unknown; identical to SEQ ID NO: 7562
  misc_feature (1)..( 3000): 2750-1469P.txt file - cDNA_ID_1818169; gDNA_ID_1621152; Annot_ID_56909

SEQ ID NO: 18531 - DNA, 3003 bp, Unknown
  misc_feature (1)..( 3003): 2750-1469P.txt file - cDNA_ID_1818173; gDNA_ID_1621152; Annot_ID_56907
tggttcgtcactgtctggcctacccaaaagcggatggaatcttggtgaatacatgggaagagatggagcccaaatcattaaagtcccttcaagacccgaaacttttgggccgggtcgctcgtgtaccggtttatccggttggtccgttatgcagaccgatacaatcatccacgaccgatcacccggtttttgattggttaaacaaacaaccaaacgagtcggttctctacatttccttcgggagtggtggttctctaacggctcaacagttaaccgaattggcgtgggggctcgaggagagccagcaacggtttatatgggtggttcgaccgcccgttgacggctcgtcttgcagtgattatttctcggctaaaggcggtgtaaccaaagacaacacgccagagtatctaccagaagggttcgtgactcgtacttgcgatagaggtttcatgatcccatcatgggcaccgcaagctgaaatcctagcccatcaggccgttggtgggtttttaacacattgtggttggagctcgacgttggaaagcgtcctttgcggcgttccaatgatagcgtggccgcttttcgccgagcagaatatgaacgcggcgttgcttagcgatgaactgggaatctctgttagagtggatgatccaaaggaggcgatttctaggtcgaagattgaggcgatggtgaggaaggttatggctgaggacgaaggtgaagagatgagaaggaaagtgaagaagttgagagacacggcggagatgtcacttagtattcacggtggtggttcggcgcatgagtcgctttgcagagtcacgaaggagtgtcaacggtttttggaatgtgtcggggacttgggacgtggtgcttagtaatggttactgttttctagctctttagtggttgaatttacttgtcgtttcttaatgtgtatttttcattgtaatagaataatcgatgttttgtaatatattaatgtatttgatatttctcaactaatttccattgtaatattgaataatcggtgtgttgtagagagacaaattattctcctggttatattaaataataagaataaaacgacgtttagatgattcattacttttaatataatcttcacaatttaacactcaagtcgacaacgatattatcatcagactaatcatatgtttaagtcacatctacctgaacctgaccttctagatgaaatcataaaccagtaataaaattaccaaaaaaaacggtgctttgtcactaattgctttttattgaagcacaaaaccatgaagaaacagaaaaaagtacatcgtctcgatgtgacatttcctctacctcgctgatttttctgttacactgaaagcatattttaggaatcaaatcaattaaatagataatttaatacgatgacaggttccaaacatttcataaataaaaaggaacatataccaaattcacttgaattattatgcactgtccacgatatatatagacaaatttaggagttttatatcagatgccaattgcataatttgcagcatatatattttttaactaaattaaagatttaatccgtattgaaacgatatcgtatccctttaaagatcctttcttatttattatagatccaacaactttatgaataaaaaaatacgtgttttatgagtgtttaatgtttgtgatatatcgttatttatgttcttctgcatttatgatccaacaactttatgaataaaactttgcatttttattatttattatttttgaaaaatgttaggaaattagagtgttaaatttctatggactaagtcgacattgttagagacatgttaggaaattagagtgttaattttcttatggattaagtcagcatagttagaaacatagagtcagaaataaacatataatttcatttacaaaatttcggctacaaaatttcagttttgtagcagacttgacatgttgtaataaaaaagagtcatatttttcacaataatgtttttctaataatgcttcacgtctctttatcacaatttttatttttataaattttgatatgttgttaaaaaaatatttttggaaagttgtctttatttatttttattttttgtttgatatttatttttttaaagattttataaatatttttcccagcgattttgcggatgatcagaagcgtaatatatgaaaattagaatgaataacaaatttatttgatatatatttttgaaatcttcttcaatgtaggtagagtttttaatgttatgtgaatataatctacaaaagattaattaaataaataatgatatatatatatatatacaacgtatatatatatttaagttgttgaaattgaccaagcgttgatcatgtggtcatgaatgatggttaatgaagataaatgatggtttatgagagatggtcaatgagagataatcggaaggtactccctatcttggaatacaatgttaattagtttagtatgtggatatgatcattaatttgactaaacgatcatgatccaaaattatcaattggtacgttcatgttatagaggcaaggatggtgtggtgtgagtcctcccatcatccttaatcaactagctactcaacgaactgcttaatagcatcccttgagcttctttcgaagcttcgcgtcgttagttgatgcgggacaagaggcacaatatagtccttcagattgtcgactttacgtgtattgtaaccacacctgataccaccctttacataatgtaagaggtttgacttaaacattttaacaatattttgaacattatgctgctcacgtctaatctgatacttgacacattccaagtcgaccaaaagtaataataatgaatgtgtagaaatatacatatttttccaccatatggatccactttcagtattatatagtagtaacgaaactcattaaataagtaactctgtttctatatatatgtaatgcatttcccaaaaaattgaaaaaccatatgagaaaatg

SEQ ID NO: 18532 - DNA, 3003 bp, Unknown
  misc_feature (1)..( 3003): 2750-1469P.txt file - cDNA_ID_1818181; gDNA_ID_1621152; Annot_ID_56905
tcacgaatggtacgtacacttattttctttctttagattttattggttaaaacttaaaactgtgataaccattttcttgaactctttttattgataggagtgacaagagtgtggagggatgaccgaccatcggataagattctttcgataaccagcttctcaataattaggacgagacctgaaccctatgaatcctctgtttttgaggctgttggttacaaatggtaaagatcttagtatatcttacactctatcccattttttttttgttaattatatcttttgagctaattatgatgcaaataaataaatcaggagattggttttgtacgtgaatggtaatgaaaaggacggtggaaaagatcatgtttcactttacgcgaagatcgtagagacagaatctcttccagtaggatgggaagtgaatgttgatctcaaactctttgtctacaatggaaagctaaacaaatatttgattgttacaggtactttaaactgtgaatggatttttattagatccatatatatattctagcggaaaacggtctatttctccacgataagtatgacatcataacagatagagcccaggctttaacctcgtgctagatatgatgtcatattctagctctatatgttatgatgtcatattctagccattgctattttaagaaagtagacttcaaatactagtctcattagtaaatgaaccgatagttgattgtgatttgccttttttttttttgcataattgtggattgtagatggtacagtgaaacgatacaacaatgcgacaaaagagttgggttacggacaacttattcctcaatcaacattctacgacgggaacgatgggtaccgtgagcaggacactggtacatttggtgctgagatctacatcgttaaaccagcccaacaaaaagagaaagtcacattcatatcaaaccctccagacaatgttttcacttggaagatacttcatttctctaccttggaagataaagtctatcagtctaacgagtttcttgttggagaccgatactggttagtcattttcgtaaccggatattttagaccaaagtccaaattaatcttaaaagcttgttactgttatgtgactttcacagtattattgtataatcaggaaattaggattaaacccgaaaggaggcttagtcccaatcttcctatatgctcaaggctttaaggcaaacgcagttgttacaaccacttatgcagcgactaatctgcggttaaagaatcaacgaagcagcaaccacgtaacaacatatagtaagaaaactaacctaagaataaaagtttatctccaggagaaaaaaacaacaatgaatgaaactaggaatagctaaagtaaatttgtttatgctgctctgttttttctttgcagctgcatattggtacctgattccaagcggattaggtttgggagtgaacactataccgttatcagatgtaaaagatgcatcgaaaggatatgtggtgaatgattccattatcattgaagttgaaatgcttacggtctcggtgacgaacattgtatccgcttaaagatctctacttctttaccatagttcaaacaaccttatgaagaaagagatgtttgtaataagacaacgttaatgtttgtgatgtagtcgttacttcggtttttccgagttttctcttttctgttttgttatcaatgaaaataaaactctccgggttttaaattttataaaaaatgttgaggacgtgaagtgttaaaaatcgacttatctggagtcagaaataaacttataatttactttacataatttgttttgtagccaaattcaaacataacccaaaagaaaaaagtattgaatgtttttttttgtagccacattctatttatgcgaccgttgcccgttggagtaagggtcatgccctgatctacaattttcaatgtacaacgttttgaacgctttaatttgaccactataattcattactctcattaagttaaccatatttatctcgaaagttcatcaaccaatatatgtttcattccacttctaacatttcttatttctaccacttttaccacctctattttaagcatttcgcattagtaccggttgatattatatatgtatcaagtttaacaagattctaactcaaaaataagtggcaacaaacaagtgaggaaatgcatatttactatatatttgtgttgaattacctttacttttaagattggttatatacccatttgtgtttattagattttaaaatcaattaccaaataagttattatgagttcatttgaaaagttatgagctgccaactcaagactatgtgaatggattgtcatataagtatgttatgggcttgattggtataactaattaattatagtagagttgtagcaattacgagcaaagcaagtaagttgatgaagttgtaatctgttatatattaggttgatgatatatatataaataagttgttgctgaaattgaccaagttttgatcaggtggtcatgaacgatggtgaatgaagatgaatgatggtcaatgagagataattgagtgatgatagctcaaacctctggatattggaatgcaaggtttatccgtctacgtacgtggatatgaacattgattttgactactcggtcatgatccacagttatcgattggtagattcggccttccgcgatgatcggtatgtctatggtcattaattagaggtaagggtggtgtgatgtgagtccttacttcatagcttcatatgattggattgttaagcttaacaatccaatcatatttaatattttgaacattatgctacccacatcgaatctgatacttgacacattccaagtcaaatacaaaaataataataagtgaatgtgcatatatatatattctaccatgaatccactttcagtattatatagtagtaacttaacttgttcaataagtaactttgtctatatatatgtaaaagtcttaccaatg

SEQ ID NO: 18533 - DNA, 3003 bp, Unknown
  misc_feature (1)..( 3003): 2750-1469P.txt file - cDNA_ID_1818185; gDNA_ID_1621152; Annot_ID_56904
tcttaaaaattcaaaaccaaaaccaactatcatctctcccaattatcatctttttaatatatcaaaaatatctttgaaaactttcctttacccatgttttaaacctttctcatctatatatatacatttttacaaataaatcctcaagttgaaacttatttacaagaaataccatttggcattaattattattaataaattaatattcctaactactagcattttcttatctgatatatatctccatcaattcttaatacgtcaaaaaaaatcttaggacactattaatattatactttattaaaagataaataatgtagttatttaaagtttattaaaaaaaattagaatatttcacagaaaaaacgttatagtatatttataatatgtaaatctataaaaattaaataaccattgaaagaaaacttttaaattaatttaaattataaatcttttaataaaagtattattaaaacaaaaattaaaaataatatttaattttatgaaatgggattagatggtaggacggatttagaatatcataatatatgaactttataacaattaaataaccatttgaaagaaaacttttaaattgtgttgaattatatatcttttaaattaaaatattatttaaacaaaaataacaaaaataatgtttaatttcactaaacggagttagatgatataaggggtttgggtcgatagtattatgagatggtataccacaagtgaaatacattagatatgtttaatttcactaaacaggattagatggtaggacagatttggatcaatagtaatacgagacggtatacgacggatgaaatcctagatatatcattaaaaataaaattatattatctaaatactaaaacaaacaaacaatattaacaaaacaaatataattagaacttaaatatttagttataatttagattttaacttattgttcctatatttttaaacagtaaaaattaaacatagtaattatacactaaaaaatatatagatataagagttgtacgtttagaaaatacaaaacattaaatcatatttatttttaatctacaaaacaaattaatttttatttttaaaaaatataattatgcggtacaccgcgggttaaaatctagtatatattcaaaagccttcaaattgaacacgagctttgttcttgtatctagggctggaaaaatagtctgactcgaagatccaaactaaacccggctcaaaatattcgatattaattcgatttcgtatattaaaactatctgaatgggatctagaaacttgaaattctgagtgtccaatataattctgattcgaatttacccaaaaaaatcctaacatgttcaatctttagtattttaaattgttttgatagttttattaccgatatttttggttaattatgatacttttaaacaaattttaaatatttttaccggatttttcgagtaatcggataaatagtttcaattatttaggtagttttaaccaaactcaaaacatgattataaatctaaaatattaaaatctttaaaatatctaaaataactaaaatatctgaactatttagttatattttatcaatccactactgcgataatatctcgtgtacttcgagaactctcactaatccacagaaatattgttttatataacagtagtcattagtcaatagctagacatgcatggtttggtacacgtacttggaaaaagcataaaataaacaattataaccaaatcgaaatctgatatacattcaattttaaacaaaaaaaaaaatggaaatctgatactgtaaaattgaatatgtgtgtattattattggttccacgacgagtctactttcagtattttattaccaaagcaaaccaaaacggatctcaaaaaatggatactgaaaaatggagtcaaggtattaagtgatcctttgtccaaaaaaaaaaaaaaaaaaaaggtattaagtgatccacttttgttcttagtggttctgtccctgccttttgctcttgtatctagagctgaaataaaattcggacctgaacatcctaaccgaattcagattaatttttttgattagaattctaatccgaattttaaaagtattcgaacggattttagaaccggaacttcgaatatccaaaaagcccggatttaaaacagattccgaatatatactcgaaaaaatctgaatattcctaagatattaactctttttacctggttttatggatactattgattaattaaaatacttttaatagtataacttttaaccgggattttcgagtaattcgaattattttacatagtttaaataattatacgtagttttaaccgaatcttaactataattataaatctatatcaattattttttaatcaaaataattaaaataccaatcaatataactaaaacacttaaaataaacaattttaaaaaacaatttttattatatctatcaaattatattaaaaaattcaagcaaataatttttttagattatccaaacttcgaatacaaaaatctgaatagaaccagaatttgatctgatatattttgagttatggtagaaatcttaatcagaaaactaaaaaatccttacaatacctaaacgctcagacctataaattttgatttatctacatttcggtgttggtgatatactgacaccgagtcgttaacagcaataatattttgtgtactttgagatcgctcacaaatccacagaaatattgttttataatagacgtacttggaagatgcataaaatagacaatacaaccaaatcaaatttgatactttacacattcaaagtcaaacaaaaacagtgaaattgaatgtgtacatgtattattattgcttccacgaggagtccacgttcggtattttatatttgttactaaactcgatcaataagtaatcaaaagtgtctctgtttatataaatggaaagcgttaccaaaacaaaacaaaaccagatctcaaaaaatg

SEQ ID NO: 18534 - DNA, 3003 bp, Unknown
  misc_feature (1)..( 3003): 2750-1469P.txt file - cDNA_ID_1818193; gDNA_ID_1621152; Annot_ID_56902
catcgaaatattgttaaataatagactcattctaagtcgaaacaaaaataatatcgtttcccccacctttttaatatattgtaatatctcgtgtacaacgttttgcctaataatataatcatatttcgaaaacttgccacccactacctcgaggtctctcccacaaatctataaaaatattgtttaataatagaaatgggaacttgcaaaaagcattaaaataacaataacatccaaagtcaaacaaaaacaagaaaaaatgatttgtgtaaaaacatatacatatacatatacatatacatatctctcgcttttctgttcatcacttcagctgagtttctcattcaacatgtaacttttttttgaaatatgttgcaaaaacaaattccaacatatttataaaactagtaacattattatttataatttgcaaaataggtcatgaatcccttttttaatcttttttttttttcatttcccctcatgtttaattattaaactacttaatagtataatatttttcaaattttctatttatatacaaaagcctatgtttttttttctataatttgatatgtagtgtctaataaattcaaaaacatttttattcatacatctcattaattgttaagatgtatacaaattgatacatttttattcgtacaacttatttagtatacattagctatgaatatatgaataaaatatgtatattatgtacatttgtatactaaatgtgttgtatgactcttagtatacaaaacaacacaaaaaactttatcaaaaaaaaaaaaaaagctcccagacccgactcccgaggaaacctaagcttcttcttgctatggccttcgtggccgccggcgaggaccctcccttgccagaaccccctgacccgcctgatcctccctccatcttcgcccaaaccttcatacccgatccaccttctacttcttctctctttccaccttcatcgagtctagatctagatctatgttctaccgtttcttcctatggtgttactcctttcgtttttttgcgattctttactgctgtgtgcagtcccttctatcagatctgtacccgttccgtgtctttgcggttctttactgctctatgcagtccatggaaactagcctattcccagatcttgggatatcctctcgtttcaagtggatatgtttcacaggccataacctttgatgtccacgctgcccctcctacctcaactcagagagcctctcctactcgttccatggcccagacacgacaacggtttgttacttctgtaagatggtgtatgtctttgtttctggttttacccctcattcaaaatttcgtagtggtgcgatttaatgctgcagtatgcagtctctttgaactcaatctggccttttgtgctgtttgttttgtttctctttcttggtggcagtttgaaaagaaactaattaatacacctcgcctgatgaatctggttttatcgggtatttggtaccctagtagcttcttatcggagctagttatcttcccaaagttccctcctcagtggagtggtttggatgtccaagagtcgtcggtattgcaaggatcttcctcccgattgatgttcttctctgcatttgatgcagttcttgtaacctcttgtgttacgttggatacagtcttccaagaatctagccagatcgttcttattgttcgttttgccttatgttattcttatgacttctgttgcatatctatctatcctttaaccattgttatatggtctgttttggcttctgttgttgtgttttatgtagttttcttcatgttggttgtaattcctctttctgaggctcctaaaatttagtgaaaacaactattggtttgaaaaaaaaaaaaaaaaaagaatcttagtatacaaaacaaagagtaaaattgtctattttgcaaattgtaaatagtagtgttactagttacataattatgtttccaaaagtaactatatttccaacaaacccttttttaatgtatttttttgatagatatattagtagattttttttaacaatggaaaacgaacaaggttataagggcagatgagcagagtacaactgttcttaaagtctcatggcaaatcttggcacacttgtgttatctgaaatagccagtctttagattttcttgtactttttattttgttgattggagtttgaagagtgttgagagaggagcgacgaggacaataacaaatttctcagtgattaaaggtagcagagaaccctatacaattatgggttccgcattatcctttcgtaacctagattttttttttatatatagttaaactcctagcctaaaactaaaacacagttgatgactaattggtggagaaccattaaaaaaaaaaaaaaaagacagagtagactaacgaaaccacacctttacatttttctatttatctcaccttcctaaataaaaaatatttattttaaacaaaaacacattttctgtacagacgtgggtttcgtaatgtccataagtccatccatagtctaccatataatttaacatctacttctctccagtggacgcaaaagcttcgaattgaatgtgggcgttgcttctctcgtgtctaatataaaatttggataatcatgaattcttcgatgatagtgatataccgttgacactgagtagttcattgcaataagtaagatcttgtttttgctaaaaagattcaatcatattttgaacacttgccacccaccacttccaaaacttccacaaattcatagatatagtaatacacaggttacttgacaaaaggaataaaagtacaatatgatgctttacacattctcagtcaaacaaaaacgataaaatgaatgtgtaagataatattgtttaaaaaagaaaaaaagaacaaaaaaaagataatattgttttcccgacgactaatccactttcagtattttataaaataactgaactcaagttgctcgatcaaacaagtacccttaaatg

SEQ ID NO: 18535 - DNA, 3003 bp, Unknown
  misc_feature (1)..( 3003): 2750-1469P.txt file - cDNA_ID_1818200; gDNA_ID_1621152; Annot_ID_56899
agccttttaggcagagatgggtactaaggtgcagatgagcacggcttatcatccacagagagatgggcaatctgagaggactattcagacgcttgaggatatgttgcggatgtgtgtcttggattggggaggtcgttgggcggatcactttagtctggtagagtttgcttataacaatagctatcagatgagtattgggatgactccttttgagacgttgtacgggaggccatgcaggacaccgttatgctggacccaagtgggggagaggagcatatatggtgcagattatgttcaagagaccttagagaggatccgggttcttaagctgaacatgaaggaagctcaggatcgaaagcggagttatgctgacaagaggaggagagagcttgagtttgaggttggggacagagtgtatcttaagatggccatgttgcgaggtccgaacagatctatctcagagactaagttgagtcctaggtacatgggtccgttcaggattgttgagagggtgggaccagtggcatacaggttagagttgcttgatgttatgcgtgcgtttcacaaggtctttcatttgtcgatgctgaggaagtgtcttcacaaggatgatgaggtgttggctaagattccagaggatcttcagcccaacatgactttggagacgagaccagtgagggttctcgagaggaggatcaaggaacttcggcggaagaagattcctttgatcaaagtcctgtgggactgcgatggtgtgacagaggagacttgggagccagaggcgaggatgaaggcaaggttcaagacgtggttcgagaagcaggttgctgcatgagtttgcctttccttggtttccagtttcagtgttgttgagtttttgagcttttgagttgttgttcttatttctcttttatttgtattttcgtttggagttgtaacgatcataacagttgatgattaataagatgagtattttttcttggatttgacttgagttgtcttatttaagattgtgttgtgcggtttccaaaaatgaaaagtttcctagaaaggacttgtctatttttggaaagtttgagtaaacaacctaagagatccgtgtgtttacgagatggccgggagttggtcataaggatattctcgagggatatgatggatggtgagacatagaggtgtcttacgcgaatccatgagagagtctggagatatgctcggaagcgtttaatattgttgctcgagggacatgaaggtcccaacgactcgtgaggagcggggtatgctcctgaggtaccggtaactcgagggacatggtgtatttagagaacgaggggtacggtggcttcgggtgacgatccgagagcacgctttagggtgacgacccgagagcgagttttgtggtattattttcgccaagtgtcgtaactcgatgactttgtggctgagagtgagccgacacaactcagggtttgactttgagtggggaagataatatgtgtgatacccgagataccgtaggccgaggcctgagagtgacggtttatgctcgaagattgcagtctgagagtggagagtgagttgtgagcaacaatgactagtaaatcgtgagtatattgactggatagagagacctagagggggtctggttgaagggagtgcagactgtagtgatggttgcacggagttcctcggagtggaagggtgaagctagattcgaggacgaatctatgttagtgggggagaattgtaacgcccgtgaactggaaaatcggttagggtttgtttttaaatcatccggtttaattggttatgttaattggaaaccctagagtgtgcctataaaagaaggaaactcgaaattagggctttagttagccacttttcgttttataaaggagaaaaagagagttatttccaagtcctttatagttattctccagtttacagaattggatttggattaaaattggttgagttattcgcagtttcgtgagacacgttttctcagacgcgaattaggaccagcggagattgaaactgagatcgtggtctcgtcttttttccgatcggcacgagattttgtgggcatctttgtgacgtctgcagataggattttaccggagcgattgaatagttaacggttagcttatattttagggtttcgtttttgagactgcttgtttctggtttttcctgtccagtttgcttcaaggttgcttttggttgtggacttgttgtaggacgtttctgaactgtttcagacgcaaggagagtctctcctgggtttaattggtattagaatcaatttgttaaggtgagtgcgtgaccatgaatttatctgagcgattgagttgtgtgatgatatataggtgtggtgaatatgttttgggtgaattgttcaatgactggtttgtttgtattgtattcgtgattatatttttttatttgcttttgtgtatagctcgtagatgggagaatcgcctcactaagtatttatgataatacttaagcatcttattgtgttgttgatgcagtaaaaataaagtgtgattgtggaatcatggcaaggaagagaggatgatgtaggaactcgtttgttttatgttttgtgtttttggttattggaacccggttaggattgtctgttatttttggttttgttgatcgaattatttatttatttataaaatagtatttctgatttgcggtttaattattatgttattggttgatttaattaaatatttaattatatatatatatatatatttttttttttaaatgggtctggttgtttcacaaagatatctgagtcatatttggggaatgctgacattaatactttcgataacaaaaagaaaatacactcattaaacagaacaaacctcagaaacagaatttaattaaaaacccacaaaatgaatctaagatagtttgctttacaattcaaaaacccgtctctgtgattcaaaatccctaaatccagagatcgaactctcgatcatg

SEQ ID NO: 18536 - DNA, 3000 bp, Unknown; identical to SEQ ID NO: 7553
  misc_feature (1)..( 3000): 2750-1469P.txt file - cDNA_ID_1818208; gDNA_ID_1621152; Annot_ID_56897

SEQ ID NO: 18537 - DNA, 3000 bp, Unknown; identical to SEQ ID NO: 7587
  misc_feature (1)..( 3000): 2750-1469P.txt file - cDNA_ID_1818215; gDNA_ID_1621153; Annot_ID_56940

SEQ ID NO: 18538 - DNA, 3000 bp, Unknown; identical to SEQ ID NO: 7586
  misc_feature (1)..( 3000): 2750-1469P.txt file - cDNA_ID_1818219; gDNA_ID_1621153; Annot_ID_56939

SEQ ID NO: 18539 - DNA, 3003 bp, Unknown
  misc_feature (1)..( 3003): 2750-1469P.txt file - cDNA_ID_1818231; gDNA_ID_1621153; Annot_ID_56936
attggataagcgatttgccagaagcattgctatgtatagagctgtcaaatggtccgtccaaagaccattgggcgtgtacgtacggacagttttttttatgggccaagttggacggtccataatggacaatggtccgaaaatgtccatgcccaataaagaccatgtccatatgggcaagtccatggtcagcccattttattattgttattattgataaatcaaaaatcatgattttaaagaaaaatttaaaaattttatttttccaaaaaaattgtaaaaatcggagacttgcatttttccgacaaaacagtaaaattgtgtttttcttaccaatacaataaaatcacgattttggcggaaaaattatggaattgcgttttcccgccaaaaccgtaaaattagagaattgcgtttttccgtgaaaaccgtaaaattagagaattgcgtttttccgtcaaaattataaaatcggagaattgtatttttcccgtcaaaaccgtaaaatcgaaaatttgcgtattccaaaaaattgtggaatactattttctttcaaaaccgtaaataatttaataagaaataatttattaaaatttaaaattttcataaaaatagaaacttataatgtaaaatatataatttgaaaattatttagttgtaattgtaattaaaattataaaaatatgattaaaatgaagacatatctattgactcaattcatgtccatgagcaacccattgtccatacggtcaagcccatattgtctatggacaaaactgataatatgcccaattagaccatttttttttgtctggaatatagttcgcccatatgcatttggactgggcaagcccatgggcgtcctgcccaattgacagctctagctatgtaaggtacttctgaatcttcccactaaggatgtggttaggactagtgttttttctaagagatggaaaaatctctggaaacggtacctggattagacttaagtggcgaggatatcgaaatgtactaccaatacgtgagatttgtggatagatttctgagatttaataggaactatcagatagaatattttaagttaagctaccctggtgatgggagttctgagcgtgaagttgatctgctcaagcggtggatcgatactgtcattcagctgaaggttaaagatttagatttttttgactattcatgggaatgggggtttgataactttcagctaccttcaaccatttacatttgtgagagcttggtatccttaaagctatctactgttaccctgcctagtgtcaagtctgtttctttaccttttctcagagttctcaagctaggtgcagttaagttcgccgaccatttggatttagaaacactcatctcaggctgcactgctctcgaaaccttagctataagattctttgatcgcgtccaagttttacaagtgtcttctcagtctctactgagcttcactcatgttgcgcccaagcttgtctttactcatgctgtgcgaaagcctttggctgaaaaagatctatcaattgtaattgatgctcccaggcttgagtatctgaaactcagtgatcatcagacttcaagtttcataataaaaaatcctggttcccttgttgcggtggatattgatattaacttgtcttccggcttcgattcgaggaatatgattcgtgattttcttgttgggatctctagcgtcaaaaatatgaccatctcttccattattcttaaggtaacctatgttgaattggatatttgaatgcttaactttatcttataagttttttcctcatatttctttttattcttgcagatcatctatgattacttaagatgtgaaccactacctccccattccgtaatctatatttcttgcatgttgagttctacgactacaggtttaaaatgttgccaacctttcttgagatctgcccaaatctaaaatcgcttatattggtaaggatttttcattgacccttgttataatgcaaatcgtgaaaatatcataaacgcaacttgttttggttcacttgattgtacttgcagaaatctactgaagaactggggatcaaagaaagtagtatgttttccggacctcaagatttcttaccatctctcgagtatgttgagatgaaaatgccattgaagaaagggttgctgctggagatcaggatgctagtgggttactttcttgagaaagcaacaatccttaagaaactaaccctatgcttggatgattacagaaagagaaaagaatctctcattcccagaatccttgccattccaagaatttctacctcttgcgaagttgtggttctctgatccttgtagtcgttgatgccgccgattaactaacacaaaagtttgatttttttgataactttatttatttgaactctgtttctttcttctttcattatcgttttcatgattatcgtagcttaattctttttagagaagtttatcaatgtaaacacgcgattctcttaggtggtactttgccaaatatatatgttattgctttcctcctcatttgtcgtgttgctttatttttataaatattgtacagtacagaggcttggaaaaataatagcaggttcagaggctaaagaaattgtaaatttggggatcataatgaaaaaatattatagttgacgaaacttgcacgaccaaaacccaacaggcccattgtgagcccaattatgtgaggcctataaaatattacatctataaggacgcctgctaatcaaccactacagtgacactgtcacggccacggccagacgagtagagactagagagacaattagacgaagcagatactttggccggaaaattagacggcgatttttctcacactgttctcattcttcaggtactcgctctctctttctttctatctatttgattcatcgttccaagttgattcttcatccgaaaatagttttacaggaatttttttccgatttgatgtttgtttactaggtagagtagatg

SEQ ID NO: 18540 - DNA, 3003 bp, Unknown
  misc_feature (1)..( 3003): 2750-1469P.txt file - cDNA_ID_1818275; gDNA_ID_1621153; Annot_ID_56920
ctacaaatcttgaagagcaagagcctgcaaagttttgaaatttgtttcattagaggtcaaagaaaatcttgaagtgtctatagccaaggcaaattttagatacttttagtccatattatcttatgctagctaaagaaggctttactgcccaacactctagcagagttttttcttaagttcatttgctcttcaaatttccctgctttcagctcgtgaaatcaatagaaagttatatacgactgttgcgaccatcttatagcttaccctgacgagttttggggtttattcctcgtcctcggagtgatatgcagtatttgaagtcatctccgtctcaactgattgaggctttacacctataatcaaaaacagaccaagtgttaagaaacgctcaaaagaccaaacgttaaagaaacactgtacctaacaaaaaaacatattttgacgctgcaacatttgccactgaagaatgcaaacaccacaatctattataaaacagagtgattattattcgacaagaagcaaaagcaacaagattaataaacactacaatcttttcaaccctataaaggaaagactctctatgttattactgatgatggtcacccatttccataactgacatctgaacctgtaaagaattttcaacaactatataacgataagccaagaattgcctaagtgcatctaagaatgtagcaatacctatgcagattatagatactgcaaatgtaaaaaccaaagctttttcaaaaccgaaacacatacgatcagacaattagagttaatcatataaaaaccacctttgatgaagtaatcagagcaaggccatcctcgaaccgatgagattgaaatagattcttcatcagagatcggattggccagcttctcaacgagcttagcgatcccatgagactgggatctaggaggtggaacccaaaaggaagcaccggggacaaaagggagccaatcaggtgcggatcggcgtaccataatccggtggacagcatcttccaacttattgacaagaggatccgcagcgatatcaatctcgtagattactccgagatggttagagttagaccgacgattggaggattgagatcggatgaaaatggtttgagatgaagggagaagaagagaagctgcggcgaaacggtatcgagagagagaaagtgaaggagataaagatcgagccattgtagagatttaggagaaagatggttccttttttttttggtttggtttggttgttccctttttctagtctttttaacggataaggagaaaaagagcattaatcttgtttatcggaatttccttttttaatcctttttctgccctatctgaaaatttactttctccgataagaactgtcttttttcaaaacaggtacatcatgcaaatattttctgagtataaaacaacatgagacacaatcatacaaagcatatactgatgtccaaaaatccaatctgtgtagtttttaagccatactggtgtttaaaagaaaaagaaaaaaattatacactactctagtgatgaagattgaagaatcaaagaactcaaaaacaagagcctattcgtctagtgggccaccagtccactcaaggccggccttttagtcacctgaagttggacccaacccataagtggggccggaaaacaccatataatccaataggcaataaccaatttcactagtttattaaataaaaatatattaatattattaggtgagatatcataattgataagaaaatgctccaacttagtaataattacaatatacacccttagtttaacacattgtaacaaaactctctcaaactttttaccaattaaatttggacagagacaaaaaaaagaaagtgtgttcttcactttttctttcctcagttggttgtccaaacaaaaaaaatctccaccgctctgagagaaaaaagttggaagaggagagagagagagagcgacaacgcaccaactgttgcggctcaaagagatctcgatcgggatccacaagacggagatagatagagagagagtgagagctaacggaaatgggatctcagctacttgagtgttgcttccgtttcgtcttctactgtcactcccacagctccaactgttttccttgattgtttttcttttatctcggcgttttactcggaagcttacaacacactctctcaggtgcgaatcgacgccgtcttctttttgttttctcagattgggtttttgtcttcctgtgatcatttttacttcattttgggggtttaggtattgttttagcttcgcgttttggtacttgcttcaagctctttttcttagtttctgtgatttggggattttgttagacatggcgatctgtgttcgatttctgctcaatcgcatttgaaattgaaattgcttctaaatcccagagatctcactgggtttcaagagatcagacatagaaattgtgattagggttttgtttttttcatgggttctctgatattatttggtttttctgtagcttttttgggggaagtagttgcaagaaactatgtagatctcaagtgatattagtatattacaagttccctgaattagatgtttacgaatagtcttaagtctcagtggtgctggctctgtcagagaaatggtaaaggcttttggcaaggggaagtgacttaatctcaaatgataactagtcccatcaaaacagctctgctagtgtttggtttctgagtctcattttcttagcatttagggatctatcttgcagcatactgtcctggtcgttcttggtactattttcttttgtgggcataggatgttgaaagctttttattccgtgttggtgtttgccaatgtttcgcttgtcacagttctctatatgcccatttctcatgggttattgttttgttctttcagggatttgaaatcctcacgtttcagcacattctttgtggttcccatctattctctagccagttcggagttgcctgaagaaatcaaatg

SEQ ID NO: 18541 - DNA, 3003 bp, Unknown; identical to SEQ ID NO: 18540
  misc_feature (1)..( 3003): 2750-1469P.txt file - cDNA_ID_1818275; gDNA_ID_1621153; Annot_ID_173327

SEQ ID NO: 18542 - DNA, 3000 bp, Unknown; identical to SEQ ID NO: 7613
  misc_feature (1)..( 3000): 2750-1469P.txt file - cDNA_ID_1818288; gDNA_ID_1621154; Annot_ID_56987

SEQ ID NO: 18543 - DNA, 3000 bp, Unknown; identical to SEQ ID NO: 9539
  misc_feature (1)..( 3000): 2750-1469P.txt file - cDNA_ID_1818288; gDNA_ID_1972143; Annot_ID_179294

SEQ ID NO: 18544 - DNA, 3000 bp, Unknown; identical to SEQ ID NO: 7613
  misc_feature (1)..( 3000): 2750-1469P.txt file - cDNA_ID_1818288; gDNA_ID_1621154; Annot_ID_173419

SEQ ID NO: 18545 - DNA, 3003 bp, Unknown
  misc_feature (1)..( 3003): 2750-1469P.txt file - cDNA_ID_1818292; gDNA_ID_1621154; Annot_ID_56986
caaactacatgtatatatttagtcaatcttgaaatttaaaaaaatgcctttgctaagaataaaaattatggttaggtgaagttctcacgtaaaactattcaatcctcacgcgattgaggagtgactgaccaaagtttatttctataggggcaatttaataactattgtaaactttcaacgtaaaaattaattactttgaagttatggggcaatatcatcaatagtaataaatataagcccttactcgtaaaatacaaaaggtttatttgttttctgaattgagagcgtgtaactactaccatcgtcgtctccgcgagttcttctctgcgtttaagccatagataacaaaccaaactaaaaaaaaaaagtttctccttttatcattccttctcttcccttgtataggtgtgatcctcttcaaggggatttctctggcgggtcatacattcgcaccgatcaaagtcggattggtctttcttaacgcaatcttgacccgattcaaaaaatttctggtatcctttttaagaaatgaaattaattgattccttgtcttccaaacgagtaaatcgactaattgattagattttgttcattagggtttgttagtgaatagataagaagataaatgggagctccgttagtgtgccacgggcattctcgtcccgtcgtcgatgtggcttatagtccggtgactccagatgggttctttctcattagcgccagcaaaggtatgatcttcgatcgatttgtatttgactatctatgatctttacttggaactgtgcctattttggattatgatttgcatagcgaatgtgctttgacgaatttgattttgctgccttttattatatatcgtctgaagtttgatttgtggctgatctaatggagaaattaggatgataagttgcatacattgttgaactctagctgaggtttctttgacttttgatatttcagattcgaatccgatgttgaggaatggagagactggtgactggattgggacttttgaaggacataagggagcagtttggagttgcagccttgataaaaatgctattcgtgctgcctcagcttctgctgatttcactgcgtatgttcttcttctttcttgttgcgttttcaagtcttttactttaccatttagtcttgcaatttcagtatcctccggtgatgggttgtttgcttaaagttataagttatggggaaactatgttcctagagaaaaatggttaagtgagaatagattaatgggatttaacactatttctttgttttcatgacacatttcaggaaaatatggaatgcattgacaggagatgaattgcactcctttgaacacaagcacattgttcgtgcatgtgccttttctgaggtaaactgtagtttcttcccaagcaaagagtgatttgatcctgttgccaagttttctggtttaaggatataatggtgggattcactaagattacttgtagcatttgagggtctataatcgttggtgtcatttgtgttactattgtggtcttaatgcataactatttatattctaggacactcaccgtttactcactggtggaatggagaaaatacttcggatattcgatttgaatcggccagacgcacctccaaaagaagtcgggaattcccctggttcaattagaactgtcgaatggcttcatagtgataatacaatcttaagctcttgcacagataccggtgacattaggtatgccaccacgtcgttccttgggtttagactcagtcctttagtattcctggtttcattgttcttttgtgtatgtcctctgtaggttatgggacataagaagtgacaagattgttcatacattagaaacaaagtccccagttactagtgctgaagtaagtcaggatgggcgatacatcactactgctgatggatctagtgttaagttttgggacgctaaaaagtaagttaaaaatatagaaatgcatcctcagttacagttttatcgtttttctttgatggttgagctttttctcctgctctcctagttttggattgctgaagagctatgacatgccttgcaatgttgaatcggcatcgttggaaccgaaacacggtaacactttcattgctggaggagaagatatgtgggtgcacaggtttgatttccagactggagaagagattggtaagtttcttttaaaaaagaatgaagttttcattttaggaacctgtgtgtatcctttaaagccaatgtggtgaatgtagggtgtaacaagggtcatcacgggccagtgcactgcgtgaggtatgcgccaggaggggagtcatacacctcaggctcagaagacggaacggtcagaatatgggtggtgggttcggtaaaccatcctgaggagagcaatctaagcggccacgtgaagcttgtggcagaggaggttgtgcgtaaagctgaaagtctccgtatcagtgagaaagccgcagaagctaaatgaaacaccatcgttagcttatgatatcacatagattcatagttgtttttgcatcattataagatgtgacaaaggggttttgccttttaaaagtctctcagaccgaataaaacgaaataatcttcaactatacttgagtgaatagtgaatctaatccaaattttgacaagaaactttacaacggtatcaaaaatatctttaaacaactgtatgtcataaatagttgcaagttttgaaagcccagttgaaactagaggggcccagaaattaagcaaacatcaaatagtcaaatacaaagaaagtgtgaaagttaaaaccctaaacccttaatttgagctctctgctctcctggttttagttttcctctatttcgtgctcaattcgcttgttctccagttccactctgtaaggatctgttacttttctgtaatcctctcaaaattcaatgcttttgcttactgggtctgatctttgcaagtgaaatgcatgacatttcgtccaaaatcagaccttgcaaaaatg

SEQ ID NO: 18546 - DNA, 3003 bp, Unknown; identical to SEQ ID NO: 18545
  misc_feature (1)..( 3003): 2750-1469P.txt file - cDNA_ID_1818292; gDNA_ID_1621154; Annot_ID_173418

SEQ ID NO: 18547 - DNA, 3000 bp, Unknown; identical to SEQ ID NO: 7635
  misc_feature (1)..( 3000): 2750-1469P.txt file - cDNA_ID_1818296; gDNA_ID_1621154; Annot_ID_56984

SEQ ID NO: 18548 - DNA, 3000 bp, Unknown; identical to SEQ ID NO: 7616
  misc_feature (1)..( 3000): 2750-1469P.txt file - cDNA_ID_1818304; gDNA_ID_1621154; Annot_ID_56981

SEQ ID NO: 18549 - DNA, 3000 bp, Unknown; identical to SEQ ID NO: 7616
  misc_feature (1)..( 3000): 2750-1469P.txt file - cDNA_ID_1818304; gDNA_ID_1621154; Annot_ID_173412

SEQ ID NO: 18550 - DNA, 3003 bp, Unknown
  misc_feature (1)..( 3003): 2750-1469P.txt file - cDNA_ID_1818309; gDNA_ID_1621154; Annot_ID_56979
cgactcctctctattcctcctggtgctcctccaccggttttaatcggtctaagcttgtctttctcatcgattggtttgacctgttcagagctttccgacataggcttaggttgttcgtcgcgttgactttcgtctttctgctcgttgtttcccgatttgttgagttcggcgatgagacgatcgtcaaacactataccggaagatccctgacggcggaaagagattgttgatctttgaagaccctccatggatctatctctctctctgttgatgagctaaaagaagggcaaaactaggaaaagtgagtttaggccttataagtgattaatcaatcattgtgtttcagacttggtttccttttatttctgtcctcattattttttcatggggtcggtccactatttattgtttatttttatgatgatgcttccagtttctatttatttctttgtaacaacaatcatcggaaattaatgtaagcggattaacgatatcattcaaccggattattcaaacattaattgtaataaaaaaaaaaaagtaaaaaccattactgttattgatgattaaggcagagaattacatgttaattttttgtttgttttcacatctttaatcggattctcaacaccacataggcacataagtcctcttatatccatatttgttattttattccaaacttttggtttctttaaactcaaaaggggtaagactttttgtaattactattgttttatcagcaaattgcaaggattagataatagattagaaatgaacaggagaattgacttataggacacactaatttaatatttccttcttccccatttcggtaaaccaaatagactatttccttcttccccatttcggtaaaccaaatctattaggtgaggatgttattaaaatgccaaatctctctttataaaaacttgaaaggaaaaacaatacaaagtggtgaaagtgagtcaaagtaattcggttaccaatttgtattcaaagtcaacatcattgtactataatatggtataacttttgttcaataattcaccttcttatatcgtctgtttcttctcaggatcaccactaactaaaacatacgcatgtggtgggtttagcaaaactgtattctttggattaaagtaatgtgcataacacaaattaataaccccgtctgagttggcacaactcaccaatgttgaagattgagataaagaatttgggcccaatcgccgaatagaagtctatattcattactctcaggcccatccataaatacaattgtcaaaaagaaaataaaaaattggtggtccagctgggaacgagccagcaggccatggtgaatctgagtggcgtcgagctgtgatccgtccactgctgagagcgggaggtgatcgctgctctgtgaaaccagcctcacgcattgccctccactgcaagaaccgcctgagccaagccttcgcttaacacacacggatcactctcagcttggactgggcagcccggaacaatgccacaacagatccgacccgtgggccgagccagtgttccaccaacttattgtccccacacgggtcacaagcccacgttactgagctcgacgtacaagtattgatttaatttcatatataaagtaaaacattttgaggtatgtaaccgatgtgggacaaaatacaagtttgggcttcccagatcccacatttggtggaacacatatataaagagtctcttcgttgattagcttcccagatcccacatttcaggtaaaaacatcgtctgggctctttgccattttagcgaatgtggaaaggtgtggtttttttttgctctgctatggattttttttttcaaatcagggtttctctgttgaagtcatatcaggagcttgacatttgtttgtttgggaattagaagctagatacgtatattatatagcatcgtacatatcaaattttggtgtgtgttctaattgaatctgtacttgtttgtgtgttagtgggaggagctcttctcagaccttaagactattgctttagtggaatgcttctcgtaaatgtataagtgaggaaagaaactccattcgtatctatctactaccctaagccgtttatgcattttctgtccatcagaagatcaacacctgtttctggaggattccattgatttaagggattagatggatgatggaccatgtgggattcagtagatgacaagaacacaaaggaatccacctaacagagacaacccacatgttgcaggaaatacatataataatatcacaagaaacggaaaaagaagcagacagagacacctcttcttgaatttaacgccttacattgtggtatcttccatcttctttactgcctcatggtgaaatccagtgcatatatgattatttatctgaggcgaagattccttacttcatcttgatgcgactactactggtccaactttcattggatcggttgatttgaggccgttgttcttacattttggtgtcccacctgttcttttagtactgttttcctttttgtttctggcaatcagaaaacataaaggcaatcagtcatccttctcaataacatacaaagatttggttttcaagagaatcttctatagaaagctagacgtttacttctgtcttattaaggagaagtactggttctttcatttatatcttggctggtttgggaattgcatccaaatttcttgcagtgggtgtcagcctggagctgcagaaaagtgagttgatgttagagattgtaggatcttactccaaaaagccagaaaaggtccttgcgactctctaacttgaaagttgtttcctttttttgaatctgagctggttttggaattttggtgtcaagatttggaatttgaatctgtagtaagattcaggtttagtgggggagggaacaagttggaagcttttgctagttttgtcaaaggtgtcactaaagtactaactatcagaaaacattttcagccagaagcttggtgatg

SEQ ID NO: 18551 - DNA, 3000 bp, Unknown; identical to SEQ ID NO: 7612
  misc_feature (1)..( 3000): 2750-1469P.txt file - cDNA_ID_1818320; gDNA_ID_1621154; Annot_ID_56966

SEQ ID NO: 18552 - DNA, 3003 bp, Unknown
  misc_feature (1)..( 3003): 2750-1469P.txt file - cDNA_ID_1818324; gDNA_ID_1621154; Annot_ID_56965
ctggttctgatattacctcgagtcaactggcatacagtatatataatatgagtagtgagtggtggtggcaatgataagtaggggaccaattttgaacactgcttatcaatgtgatgacgattgcttacctataaaagtggacaacacaatcaacaagatgacaccttcttaaagtctgacactatcagcttgcttcttcaactactacatgccactaaatcaatgttaggtttccttttgagatccctagtgacataaatatggttatcttctcaaaaaaatgagcagcaagaaagatgatgaaacctacatcaaaatcaattcagagagttggtcgtttcttaaagaagactcttgggagcatcaagtccactatctgctctagtgattacaaaaacttacctaacgacactcctctcttgagcccttactcctgcagccgccgctgtccagaagattcccaaacccaaaccaaagaaagctacaccgttatctgttgtgacacggctgtggcagatacaacacaccagaagagtctcaacaaccaacataaaaagaaaccgaagaaagtcgctgagccattcgaggatgcaaagaaaagaggtgacgcgttggcgcaaaagatgaaagatctcaatatggtggatctgagagacgtggatcacgcattggatgtaagggaagcgcttcgatgctattcaagcatcagaagtcctgtgtatcttgacattgttgacaatttcttcacagacatgtattacgagttctctgatcctcgtacctctgctaagatcaacggttcaaggagaaaggcaggctccttcaggctttaaagttcctctggatcagctttgctttcacgggctatctgtagttctttcatctatagagtatgcacttcttaagaacagtgttaaccattacacacaccgctttggtaaaatcacctgtcaccaccctcagtttctacctcatcttgtagagtcaagttacgctcctattctcaactactatcaatgcaacatattttccacttcaagttatgacaacttacagtttataatactatatctgaagatagagatgtgacaccctactactcgattcttgacaaaatgattttagggtagataccacttttctttttcatgaaaaaatggagaaagcaaacatatgtatggagaagcgaagttactcttctcgaattatgataaaaagttacatcaacacaggattatctgtttttttcacttgataaatttgcattttaaaacacacttcatggataaaacggatcatttcttgccactcttcttaagtccagaacctccaaaggatcccttctgcgatgccttggctctaagctctttaagggcctgttttatcattttcattcaaaacaaaacaggtcaggctttcggtaacaaatgatcactgtacttctcatgcgaaagaaaggctaatgagtctttcacacaattgggtggaaaaaaagtagactaaacatcctaacatgggcaaatggtcactatttcatcaaagtaagaagaaactagtccatatcatctcaaaagaatctgtaatgaatacccctaaactaacaaataattaatagaaatgacccatctagttgtagtcaccagctataaagtcataattagagtcagcttgattagtagaccaaactgacaaagtggaacatattaatgcacaacctttacaaaacctttacaaacctatgtatctaaacagaagctctcttgtgaagatacaatctttgattcgtattttatagctttccattgaaagaggagcccaaacatataagtttaactagatgcatttttccaatcacaaaacttcatatgaacaaaaagagaaaacaagtcagagcatcaaagtgggaactcaccttttcctcatctttcttcttctgaatgttagctaagtcagtctgcattgataccaaatcaacatttcagcaattagagaatgtctaagagtcattaatacacaaatagtatgcaaacaaaatcaagtgaagaagtcaagactgtgcccttaaaaacactggatcaaaattcgaacttgcgtataaatcattgaatccgagcaaaattaatgatttatgagtcactgaatgttaacaaattttaagaattcaagttagttggacaatcaaaaccagatccagagcaaaagcatcgtttgattcgaggtctaaagctaacaatataagccgatttagctgaaggcaaatcaacagaaaatccaactcttaaaagaaaaaagaaacagtagagtcacctcgtcgtattccttcttatcagctttaggctgcttcaaaggtttcgcctttcctcctgtttaaaaccaaaataagatgagcagatcgtaaacgatgtctctaatcactttattcggtgaacgaatcaccaactcaaatctctgtataacagcaacgtaccttgcttggaagacatgattggttcgttgagctagggttcgatgttgagctcaaaattggggaaaaagtagctgagagttgcagacggtatcgaatctctctgattggggctacggttcatatttataatgagttcgtagtaacaacgcaacctattaaatgggctctgaaagtgtatggcccattaaaaggcctacaaatttctttttgggcccgttaaatacctttatttgggtcaacctaggtcacagtcgttatatttaatgcgcgaaataacaaaataaaatcgattaattaacagttaacaaaaggtctggctccattcgatttcattggaaacccccaaaatcgctgaagaacgcctctcgagctcagatagggtttataggtatgcgcgagctttcttctacatagtcgattagtacggagcgcttgagcgactctttcgatttctcaattgaatttcttcttcatctaggttttggatttacgagtaccactctcctttttttcaggtttctagagagaatttcatg

SEQ ID NO: 18553 - DNA, 3003 bp, Unknown
  misc_feature (1)..( 3003): 2750-1469P.txt file - cDNA_ID_1818328; gDNA_ID_1621154; Annot_ID_56962
cataaagcactgtctccccaaattcatcctccagcttactgtagatctctttgtcagtttttccagctcctatctcattacggatcagctacaaaactcaggtgtattagaagagtagacagcaaaactatcttcaacttaatctttggaagaaaaaacggagtaaaggacacacctgtctaaggagaatagcgatatctgcctgcgagtcttcaatggactgacttccacactcagtgcagcgaacattgtggctaatgtttctggcccgagcgtccagcatctgagccttcttcctctcttcgtctgttttctccattgcgctgacaatttcatgatatgagtattgtgagttttcacacaggcatttcgtcgaacactttgtgggcaacagaggctcagagacccaaaacgtaaggaacgtaaattaagttatgaagggagaacctgggtggagaggaagcaagagaactccgagaaaccgcttagttcgttcaacgtggagctcaaaaatgaaacctttcgcttgggaaattactccgtttactagtaaaaagtaaacacccaatcgtcctccagcaataatagcgccgatccttctcgacagagccgtttagagaagatgccggtggatcttcggcgggtgaacaaatcggatccgaatgtgaaatcgaaaaggcgcgtgaaagagcgtgcgactgagagtgtgtccgaagacgtttcgcgcgtatacagtgctcgtgggcataataaacatgggcccttcaaatatataatttgtttgaaattgtaataaacatgggccttgtaactgatagaactatattctatcagtaactgcataaaactcactaagagaagaccaacactctttggagtccaaatgaccaaaacaaattgagaagagaaatatgagatgaaccaaaacaatgaaacatagaatagcgtcaggaaggaacaatgttacagaaacaattaaaagaaaaaaacacattctacaataggagaaagtgagggtgaaacaaaagcaccacactgaatactcatactattagctgaattagtgttggtgatgggtctgctcttcttcttcatcacccgtttattttacttggggtctggagtcatgggtgaataaaggctagagggggcagagccccatggtgccgatcattgatgactcactgtctttctaaatcattttgctatgaaggcagcctcaattctgatattatggaactaggcaagtgggcattatctgtgatgaccaataaagcatgacataataaagcatgacatgttagacaagaagaattgcagtgtaatatttagttatttacattcatccagacatatcataacttctaaattgcacaatctttgcctttctgctaaagagcaaactcaacaacagagagaagccaatctttctcttttcagtgttctgtatatgaattacacaaaagctactaacaccaaatgtttaatctgtatatgaattcgtttgacagaaggagagctgagcagtcactaacaagtaacaacaaactatacaattcaatttgggatttgattctgcaagacctaatagagacatggctactacttgccaacgatagcatttcgccctgctttcttcttgcatttgaaactgaatagcaaaaagagaatcaacggttcgtgaaataggcgcagaaaaagcaaatcgcaagagagaagctactttattggcccaaatcctatttcatccagttttgtgtcttacaggcgatacataagctttgccaccattgccaatggagacaaagttcagacatttaagcaccgcacaatcaacagaagcaacgcaaacggatttgtaagctgtaaaagtctaatactttttatttatatacacgagggaagaacacttctgacaatgtgaggactctcagacaaatccttcaaccaagatcggtttcatctcctcttcttcatcttcatcactctgatccttcttctcactgcttctctcaataccttcaacatctagatccttcaaaccatcaacgcagctcttcccttcttctccttcgccagccaccaccaaatctccggcctgtttcgattcagccaacttctcaatgccttttccagctaaacacggcccagtatccctttcattgtctcctccaacgataatcttgtctgcagtttccggaataggatccgctaaacaaccgtcttcctcctcgtggtcgaatatcgacgctgcgcgagacttcacggcgttagcggctttgcgaaatgcttcctgaatagattccggcggcagagcacaatcctcgagaccggcgtctgcaagtgccggcgggaggatcgtatcgagcaagccaactctttctttcgtagcctccatagatgcagagagattcagagctctcttccctgaaatgtgaatgaaccctaaattggataattaaatcctttttccgaggaaaaggcggtgataagggtattccagtcattatacttcattgttggatctaaattacaaaatagcccagtgttttagtgagcccaaggttcgacacctagcgagatcatatggacttgattgattgcccagtgttttgttaataaaaataaaccattaatgaaatgctaacaacaacgaagagagagaattaaaagatcctcctaccgtattcccgggaacattcgccggagaaacgtacggaatcaacaaccttccccgggaaagaatccattaccgccgattctatcaattcgtataccgtatttgactacccagccattgattctctctccctctcttcccttttcattgtttctaaaccagctcatctttcctgatccggacgtttttcgaagatcgggtcctaattccccgggaatgggtccttaagttctggaagaaatccgtccgctctgtctggtaatttcattgaaggacggattaagcaagcgtgtgtgagatcagaaaagacggattcaactatg

SEQ ID NO: 18554 - DNA, 3003 bp, Unknown
  misc_feature (1)..( 3003): 2750-1469P.txt file - cDNA_ID_1818332; gDNA_ID_1621154; Annot_ID_56959
aaagaactctagaatatggtctctaggtccctggtacacaatctgtccctccgacaataagattatatcatcgaatagatcaaacgtctcaggagcaggctggagaagagatataagaactgtggcttctgtgaggtgaacaatctgttgcaagcatttcacgatttggaaagtcgtggagctgtcaagtccggtggatatctcatccatgaacagagtcttagtaggtccaacgatcatctcaccagttgtcacacgcttcttctgacctcctgaaatacctctcatcatgtcatctccaactatagtgtccttgcaaatgtcaagccctagaatctgtttcatagaacaataacatctatctcaacatatgaacactatataatcgtttaatcaagacaattatgtatttaaggttgagagggactcactttgagagtataatcagtgataagactactcttgacgccttgagcagcagaggccttcatgaacaaatcaacatcagcttctggaaaaatcccagcgtccttttctcttcttgccaactcatttaaaagatctgcatcaataacaagtaagattactcaatcgaccaacaaaaacaaaatcgatagttagtttgacaaaaagtctaagattataccgtaacgggtaccaactccttgacacctagcagagaaatcaagagtctccttaacagtcatgataccaacatgaagatcgttctgactaatgtaagcagatgttttaatgggaacaaactcattgaggcgataaccattataggttacctccccagagacgtcaagagacttgtcgagtttaccggcaagagccaacaaaagcgtggtcttcccggaagacggaggacccaacaaaagtgtcatccttgaaggtttgacgataccagaaacatctttgagaatagtaagttgtgctttcttggcaagcctaattccgatcatgcctagagcagcttctcccatgtttctcaccgcgttaagaagcgaaggaagagatctatcaccggtgtaacagtcagctttcacagtcaagtggtcgtacctcacttctactgtcggaagttggatcccaactctgtcgattctgtttcttagctttgtcaagatccgttcgttgtcctgctctgcgactttgaagaccatgtcgatgaacttctgacgttcttcgccgtcaagcttcgtgacgtcaactgctttgttgaggatttggttaccgtagacgtcgtcttcgcctaattcaggcatgagacttgtgcggagacggttgtaggtagggagtttctcgatggaagcccatttgagagcttcttcgtcttcgttgacagatttggttcgtctagagcttgtattgaatatgtcttccatgtttctgcttgctttgcttacactacgacttatggtttgccgcatactcccacctctgctcatagcatgagctggatcgtaatccatctttagatcttatgaatcttgatcctgtttctattaagttaagtgcttcttcttctttcttttagactattagactgataggatccatatgtgagtagaagaaacggatgatatgtaaatttcgttgaagaaaacagagaaagagataagcaaagatggtgtgtttgtcagtgcctctgcagcattgagagagaaaagagtaagggacaatgacgagtgcaagctccccctctggtgctctctgttattttatcacaatctccaatgaaaactataaagaaaagcaccacttgattgtgccttttaaattcttgtgattattatagtaatccatgcaataatgaaacatcttttaacaggatggcccatgtggaaaatgaaggatgcctagtcaatcatacacgagttaaaaattcgatttatacgtttgtataaggttggtgcttaatgatgtagacaggttgtctttttttggcttgattggttttgtttttcctcaccttctattgtcaacaatagagcaggtggcctttttaaattaataaaagattgacggattcaagagatggcaatggaccaatggtgataagaatgagaggagtgattagtgcagaacaggtatagaaaatttgggacttatgtaagaaattgaattagtctactacgattagttatatttggttatgacttactagtagacctcgtaccaactacacacaatctacaaatgtcaaagtaactcgttatgagttcaaacatcttgaccccaatttatggatgctattagctttgttaatcaagtaaagttatagtatatctactgcgtgcgtgattagttaaataccgtaattaatacgtaacacagaatgacagctatgtaaccgagtacaaatccctgattaaattttctatgtttgcgtgtttgtgtctcggtcaaaatcaatcagggcctttgccatcattttcaaatttgtgcgtttaaaatgctttaaagcacgtgtaattaactaactaattacaataatgtatatttgatatgtttagtaacgaatcttgtattggagaaataagggcctgggttgtcgccaacaaaagaaggtagagccttagtgaggattagctgtgattaaattatatacttatacatgctatgatagtatttgattaataatgtcagtaatcatgaatattaataaacactccaccacgcaccaccagctcatatgacttggaagattccccgcggacgggttccctcatcctgtctcgattgtttcaaagtcatttataaatattaaataatagtacagttatatgagtgtggttaaaataaaataatagacggtccaaaaaacaagcatatgggtaataaattagtgagtttaagcccatttatattattattatccattttaggcccattaacccactaaagctcactgaactctgaaggcatcagtgtagtagcaaattagctcaagatccttttcacttcttcttcttcttccttgtgcgctcgataatg

SEQ ID NO: 18555 - DNA, 3003 bp, Unknown; identical to SEQ ID NO: 18554
  misc_feature (1)..( 3003): 2750-1469P.txt file - cDNA_ID_1818332; gDNA_ID_1621154; Annot_ID_173388

SEQ ID NO: 18556 - DNA, 3000 bp, Unknown; identical to SEQ ID NO: 7607
  misc_feature (1)..( 3000): 2750-1469P.txt file - cDNA_ID_1818335; gDNA_ID_1621154; Annot_ID_56958

SEQ ID NO: 18557 - DNA, 3000 bp, Unknown; identical to SEQ ID NO: 7603
  misc_feature (1)..( 3000): 2750-1469P.txt file - cDNA_ID_1818359; gDNA_ID_1621154; Annot_ID_56951

SEQ ID NO: 18558 - DNA, 3000 bp, Unknown; identical to SEQ ID NO: 7603
  misc_feature (1)..( 3000): 2750-1469P.txt file - cDNA_ID_1818359; gDNA_ID_1621154; Annot_ID_173377

SEQ ID NO: 18559 - DNA, 3000 bp, Unknown; identical to SEQ ID NO: 7602
  misc_feature (1)..( 3000): 2750-1469P.txt file - cDNA_ID_1818363; gDNA_ID_1621154; Annot_ID_56950

SEQ ID NO: 18560 - DNA, 3003 bp, Unknown
  misc_feature (1)..( 3003): 2750-1469P.txt file - cDNA_ID_1818367; gDNA_ID_1621154; Annot_ID_56949
ggctgtcactggggatatgcatagtagaacttctcatctgcatcaagtttggaagtggtaggtggttccttacacatgctctgccttagttatttatggttacagttacatagtgtggagagtgtaaacttggttgtatggttatgatacgaacaggattgtacccaacagaaatgccattgtgggtagtgacactatggggaagtgtgggacttggacttgtggccttcttgctgtcttggacatggaagatccagaagatcctcgcgcaaaagagacgttaagcgcatcattattgttgcagcagagacgagagagaaatagaggtgagacagtgaaatgccattgtggtttttttttgtaaatagggagaagaaggaacgatgtaaatgcaattttctttagggatagtgtgtgatattcaacatttacgaagattccatcaattctttcatgcatcaaaagttctttcatctttgttctgccccctcaatctgacaaaacatgttggtttgaatgtcaattttttgttaccattcacacattcaagttttcaacagttcaaaaaaagaagaagaagttattgagccattgtttcttctggtttttgagatgattgttttgtgctgccaactcttacatgacattaacaacattattgtgcttttactgccattaactccattaccaccattcaatttttctgtctttaattattggttccagttttgttattctggtctattattttgtattatcatcattctatcaaacagattatttgttttgttgaaggaaatgaaaaaaagaagaagaaagaatcaaatatgataaattgaggataatattaagattgtgtgacctgccgtgccgcccaacaacatgtcacatggtatcttaggtttgcaaattcgtaatttgacatcttcgacgacaattttgactatctatctaatcttaacatcactcttccatcatcacttcctattttattccaactttcttaaagaagccaaaaaaaggatgatgtcagaagttaaggaatattctgacaaggataggatgcccttaagggaatctagagtcttgaatgggcttttagaattccaagaagctagggaatctcgagtctttaatgggcttttaaagtttcaagaatcaaaggcccaaattgcatatttgtagcccgtcggaaacgcaatgaaaatgatgaatctgaagactgactcaaacaacatctctgtagggttcttcttccttgcttcttcgagtctcgatctcctctctcaatctcaggtaacgccaaaatcctctttttattcatgggatcttttataccaaattcgatttcttcattttgagatctgtgaatatcatcgtcccacgaaccaatcgaatctgttgttgtctgacattaattttcatttctatctcttgcagtcttcagcttccaattgactttcaacatgtaagcttattccttaaactcgataccttcttaccaatctccaatctccaatcatgttgtgtagatggatctctaacatatgtagaccctttagtattcgtgtctgaatctctagactggaatcattttttttttttattgtggctctatagttgtgtaggggtcggtctatgattagatccgattctattcatttttctggcttatgttttcgcatcatataatcagagctttatcttgtaaggaagagtgataaaactagataattatgttctttctagttttgctcgtaaagacgattcttgtatgtcatcattcacacgggagtagtttatatatctagccattgatgttgcatcctcgatgcctgtggtttttctgaatatttcagggcagatgatgaagttgttgatccaaagaagtaccttgaggaatcttgcaaaccaaaatgtgtgaagccacttctcgaatatcaggtgaaactggttgatgttgtgactaattatgaattgtgttataagttttgacacagtgccatgttttgtgaagatcattgtttgactgatacaaggcttgtttgtggttctcaggcatgtgtcaagagaatccaaggtgatgattctggccacaagcattgcactggccagtattttgactactggcaatgcattgacaaatgtgtaagttacttgaattatgttattttgctgtttcatcatatgatatcttctaaagtttgatactgagatgaaattggattttggatcttcaggttgcaccaaagctgtttgcgaaactaaaatgaaaagaggtgaagctggagactctattgtcttgagtttgctacatgtggtttaaaattgatgtataaaatgcagtggatgttgaacttttttttactgcaaaccagattgccaaatggctctgcttcttggttttgtttccatcgcaagtttgcgcttactacatttttttgctacttgagtaattgcatggcctaataacaagatatgttgtgcctttctttggtccaattgtcgtagacaatgcgtcaaacaaatcattaggcttgaagtttcaataaagagagattttcaagcctctgctattaggtggcctggtactatggccattgattaggatttcttagagcttgccaaagtttatgatcggactaactctgaagcttattggtcttaaaaagataactatctaatgatggcggctacaagaagatattttcttttaaaaaattttgaaggtgaaagaaggttgaatagtcttatggtgaaatcacatgtgactggaatgaagtgaagaactgtttagtggagtgtgtgatgcatgcagcagccacttttgaaggacagcttggactttagagtgagagtgagatgtatggcccgcggcggctgcattagactgaatcttatccttgacactctacagcaattatgtagattctcccatttgaccctctatttaagggttagcaagtgtaataccagtccatacaataccattacatagccatg

SEQ ID NO: 18561 - DNA, 3003 bp, Unknown; identical to SEQ ID NO: 18560
  misc_feature (1)..( 3003): 2750-1469P.txt file - cDNA_ID_1818367; gDNA_ID_1621154; Annot_ID_173375

SEQ ID NO: 18562 - DNA, 3003 bp, Unknown
  misc_feature (1)..( 3003): 2750-1469P.txt file - cDNA_ID_1818369; gDNA_ID_1621154; Annot_ID_56948
ttttacttagttgggctagtggagctcttgatcctgacagcactacatctgatgatcttgtcacttctgtcaaaaggttctctttttccttctgcccacatcatgtttttttttcttttttcatttgattccatcaattaacactagtctactatgtttatgttccttttctaggggagtgtgggctatgatcgctgtctttcttgcttactctttgctccaggccccttcaacgtttgtttaccatctcagctgttttattaatttgctttctcttttataatgtagattgtggttgttggtgatacttgtgatgtgtctttaatcaagtaatttgctttatgcagggttctaatcaggccccatcctgcaatctggcgcttagttcatggaatggccgtcatttacttagttgcacttacttttttgctctttcaggttcacttttttttcctccctagatccttcttacttgcctatgcctgtgatttatatatggattcttgttttaagtgagcaaactctaatagttacattattcatgctcccagagacgtgatgatgcacggcagttcatgaagtttctccaccctgaccttggaataggtaagagtttcggagaggaatgctgtttattcgaggagctaccacatcaatgattgaccatcttattgagtttgctcatgttgcagaacttcctgagaaatcatacggtgctgattgccgtatatatgtgcctgatcacccaacaaacaggtttaagaatctttatgtagggtatcttctcaacaactcccctttaccttaaccaaccttcatatcacctaaaggcttatgctttgattaaaatttatcaggacacagtatttgatgagtttttcttggctcacatctttggttggtgggggaaagcaattctgatccggaaccagccgcttctttgggtgctttcaattggttttgagttattggaggttggtctttgtcttcgttttcttatattacaggttccaatttgatatatacaaaaatatcgcttcgcctgtgtcaccgaaaagttatatttatgttctccaggttacttttcggcatatgttaccaaatttcaacgagtgctggtgggacagtattgttcttgatatcttgatatgcaactggtttggtatgattcttaagctaccttgctattctatatgtagtgcttttaaacatgttatggataacagcttttcttgttttaatcatggtaggtatctgggcaggaatgtatacagttcgatattttgatggaaaaacatatgagtgggttggcattagccgccagcctaacattattggcaaagtaggtttgttcaaccttgagagtgcatacacatggtcctagccgttgtacatccaatgagaattttgtatattttttcaggtgaaaaggacactggggcagttcacaccagctcactgggacaaagacgagtggcatccgctgcagggaccttggcgttttattcaagtactcactctttgcatcatattcttgacagtggagctgaacacattctttctcaagtttagcctgtggatcccccctcgaaacccagtgattctctataggctgatcttgtggtggctcatagcgataccaacaacacgggagtacaattcatatcttcaagacaggtaaagctatagccactgcgatattggttggagttagtttggaaagagttttgtatataacttgtgtagttttggttgttcacagaaaacctgtgaaaaaggtgggagcattctgttggctgtcactggggatatgcatagtagaacttctcatctgcatcaagtttggaagtggtaggtggttccttacacatgctctgccttagttatttatggttacagttacatagtgtggagagtgtaaacttggttgtatggttatgatacgaacaggattgtacccaacagaaatgccattgtgggtagtgacactatggggaagtgtgggacttggacttgtggccttcttgctgtcttggacatggaagatccagaagatcctcgcgcaaaagagacgttaagcgcatcattattgttgcagcagagacgagagagaaatagaggtgagacagtgaaatgccattgtggtttttttttgtaaatagggagaagaaggaacgatgtaaatgcaattttctttagggatagtgtgtgatattcaacatttacgaagattccatcaattctttcatgcatcaaaagttctttcatctttgttctgccccctcaatctgacaaaacatgttggtttgaatgtcaattttttgttaccattcacacattcaagttttcaacagttcaaaaaaagaagaagaagttattgagccattgtttcttctggtttttgagatgattgttttgtgctgccaactcttacatgacattaacaacattattgtgcttttactgccattaactccattaccaccattcaatttttctgtctttaattattggttccagttttgttattctggtctattattttgtattatcatcattctatcaaacagattatttgttttgttgaaggaaatgaaaaaaagaagaagaaagaatcaaatatgataaattgaggataatattaagattgtgtgacctgccgtgccgcccaacaacatgtcacatggtatcttaggtttgcaaattcgtaatttgacatcttcgacgacaattttgactatctatctaatcttaacatcactcttccatcatcacttcctattttattccaactttcttaaagaagccaaaaaaaggatgatgtcagaagttaaggaatattctgacaaggataggatgcccttaagggaatctagagtcttgaatgggcttttagaattccaagaagctagggaatctcgagtctttaatgggcttttaaagtttcaagaatcaaaggcccaaattgcatatttgtagcccgtcggaaacgcaatgaaaatg

SEQ ID NO: 18563 - DNA, 3003 bp, Unknown
  misc_feature (1)..( 3003): 2750-1469P.txt file - cDNA_ID_1818372; gDNA_ID_1621154; Annot_ID_56947
tagttggtggttaatgtagcattttgaaaatactgtttgcaagttatattccttggatttgcaagttaagaacatactgttttgactctttctttgagagagattgtaaaacatttgatatcaattctgatatttttgagctttgactaagaaaacataagtatctttaattatcttaataaagaacaaaaaatgtgtccaagctctaggggttggttgtattagcaacaaggagcatgtggtggatcagtcatatagaaaccataattaaagtcgtccggacggatcagaaacaagaatggaccactcttccttacttgtcttcatatgctaacacttatacttgagactgactattttgaggttgtcctcctcatattatttctagatgtagaccacacccctctctctcctcctcttaatttacctaagtttgcttgtggtgaaacagttaattgataggcttattggttacaatcgtcataagtatatgttgaaagtccttaggagttgtatgaactttactacgaaagcattatcacactattattggtgtcaactatcgatacgatattaatgtagtggtaatgctgtaatgctttttattctgccaatcattactacttgaatgatttcgaatatcatcgaatcgaaattcttaatcacgctctctatctcatcattatctttgaccctaatcattattagtagtatctctctatttatcacacacgcttattcttctgtttaatttacctgtgttttactctcacttttaatccaagaaaactatccacttttcactgttggtttcagaatcccattgcttattatttagttattattactaatgaaaaggttaaggaggaggggtaagtaatgttgtgacaagtgacaagtggtgtctccatctgcatggtcttcttgtaggaatgagctgtttatctttgtttgtattccagtttcaaactttataatactatttcgttagtgctttttaattgtattcgcagttatgtgaattttaatcaagagctagctgacctgaccgtatgcttattatagttagggtccattctctacaactacaactgtacatttataataagcatgctagtagatttattgtgacgatttcaagcacatagaagagtctatatcatcacttcacttgttaggcctctctttaatttcatattatatgacacttttttcattcaatgaaaagaataaaataaaattaattgtttgatactcctaattagggatgttattctctgcttctcctttgtacttttgggaatatctgtcaaatcaattacttaaatgagaatattaataaatttggcatttgatgtgctttatttggctgcaattaaacaacaatcatatgagttattgagtatcattccaaccccataaatgttagcctttttaaatggagtatatattactaccgtttttttgttcgtaacgcatattacaaccgctttaatcagagaaattatttaaagacgaatctggtgaaacatgaattaattttgtcaaatagaatatgtgaatagtatttctgtttatgttaaattaggcaataacattacatatatacttaatcctttatctgaaaacactagatttatgataaatacgaaaggtaacactggttagcgtatggaaccatcaaattttgactaaatgttttctaacactatgagtgaccaaaacatttccttttacaaattaaaatttgtattagtcatcctgcatacatttctttttccccaaacattttcaattttggaatttttttatatatatgtaaattacatttgaacaggtctaatttgaatggttaatacgcggttcaaataaagttggcaagtaattaacaaacgaatccacatcaaatttcaattactgtatgtaccaaaaccacatttataccaaaccgcatcataaaataaaataaaaattcttaaggcctgttttgtagattttgtaagagtttttggtttttgttttttaaaaacttattttcataccaatcaagattttaaaattttggtttccctacaatttagtaaaactattttattgtaattttccattcatgattttagttttttagtttttgtaaaatttaggaaatctagtttttgttcaatcaacgttatttttctcaaaaaccaaaaaccattttttggagattttttgaacaaaaaatataataacaaaaatctaaaactaaaatctaaaattcagaaactaaaatctaaactcaaaaactaaattaaaaatcagggcctaaattttgacataatatggatagatgatgatagtgagaccaaaccacataatattgcatattttgatgtcaccatttgatagcctataaaaaggagaagaagcaaagggtagttctggaaaaaaagggaatcgtgggggaaagaaagcagagtcgttttcagatcgtgaatagaagcagcagcagaagccgtatctatccctctctctctctctctctctctctctctctctctctctctactttgaccgttcctcttctttttattcatcaacatcatcgagctttctactacttggattcctacttcttcttcttcttcctctgattctctcccattccaatcaatctctagggttcttcttcaggtatctcaaatctcctctcttttctttttattgctaaccattttcatttactttggcttatttttaagtttaatcttcttctgatattgcgtctgcttttttacctctgcaaagacagaacctttctctgtctctctctgcttgtaccttgtaccttttctctctgtatacactccattgtctgccttttctcgtctctcttctcttacagtttttattcattaatttctctcgaggatgctcctcaggcccctctttatctcatctcccagctaaagtttctctttttgtttttaatcagcaatacttcagaagctggttttggccatg

SEQ ID NO: 18564 - DNA, 3000 bp, Unknown; identical to SEQ ID NO: 7598
  misc_feature (1)..( 3000): 2750-1469P.txt file - cDNA_ID_1818376; gDNA_ID_1621154; Annot_ID_56944

SEQ ID NO: 18565 - DNA, 3003 bp, Unknown
  misc_feature (1)..( 3003): 2750-1469P.txt file - cDNA_ID_1818380; gDNA_ID_1621155; Annot_ID_57017
gttcagaacctgagacagaacaaatggaacagccaatgcagcaactccaccggcaataaccaaaggattgtctgtgacaaaattggatatcccttcaatcagaccatccgaatcaaaagatgaagaagtggtcatagattgttgcagagcttcctcgtacgtcagggatttagcaggagctgttgcactgcttagaacagaagttagaagagccaatccaccattgaatctcttcaagaagctttcttgggagattggtctctgtgattttggtggaaagaggttagggagcgagaaaggctttcgtggttctgatcttttctcggataacaccgacatagggctaaaagttgcggttttcagagcttccatgactctctctctctcagattctccttctacaccaagaattgtccactccgtatcatcaaacttttcccaacgattaaagatgatgaagaagaagtggaagaaaagtgtcaaggacaagagcattgagccgtttctagagagctgacgtggactgtgtaatcaatcctagccaccgcttgcttgacacgtggaatattcggatgagatacctcttgatcatgttttggtgtagaggactaaagcatagtgacttacttagtccgaaattgcatgtcaaatgtgtggccagagaatattgaagatgcttcaagagaagcctctgcatatttaccaaaatgtcctttatctagaacacaaagaacagagactagactagatacaaaaggttcctcagcatttgatttaagtgaacaaagaggatcaagtataacattaagaaaacataacatgatgcaatgtatggaacttacaatagatcaaagaaataatctaaaccttgtccgatttcccagattgaaatgccgattccccagagacgagcattctcaagccgtagaaggattgacatcaatgtaggatagaaaacagcatgcttgatgttcttatcatctctatacatgaaaagatgttcgccgctctctttatcccaacggaaagttggcttgtgtttctggagtaatgcgaggtaatcccttccggtgattgctcctccacctcctgaatcttgcgcaaaagaaaacagtttatgtcagttggttttgaaagaaaggcgggaagagaacaagttgcttatataagcttggatgctttatatacctccagagattacaaaatcgttgccgtaaaagttgataccaagaagaaccttcctggctatgtttgagtctatgttgttggatgacccaagcaggagcttgagagttaaatctatccacttgacaggagcattggggccagggttctggggatttgagaaatcataggtcataagagagaacccatcaaccgaatctttcaagaattgaagatcttctggcccaaaatcgtacatttggagcttctctgaacgaggcggaccaacgacatacatgaactgcatatgttgctggttgtttcttggtgagctcgttgagtgaagagcgtctccaagttgttttacgaatttcagtgcctagaagatttataaaaaagcttgctgacatgatgcattatgtggaaaaaaaatcgcagcggcctggaagagattacagggcataccattttccgcaaatcagggtcatgcaaaacgccataagctgcccaccttgaccaagactctaacacgataccattgtattccatttccctagagttcaaggcaaacatgatgacaaggtaagtgttaaaattcacaagctctaatgtaaagaaattcatccttttcagagcatgaaatatacaggaattgtagagctttgggagacccttacttgcactctgtgacaataagactgatagctttctctcttagtttttttttgttaagcatctccccaggaattgcttctagaacaactcttggtaatatctacataaaaggggaaaaaagtccagacaatcaaagaaggaaaaacaagttaaacatcagcattttccgggtaccgatctctggccaattcagagaaggaagaaaaataggtgtgctggttaaactaccagtgcattgcctcttgaccgaagctcttgaatccatcccttatcagcattatgtctcccttccaaaaccaatccagacccttggctaccagaaacagaaaccaaaaatgtcactactattttgtggaaaccatgagataattgcaggaacttagaactcattaacaaatgtatacaatatacctcttcaggtcgtaccataccggcgataaatgtgtaaactttgagttgaatatctttgccatatcatagcctttagagttcctacacagcatttttagcatatgaatccaatccctactgccctcagtgacaacaatttgtatattttcaatatctcaaatctaaaaatgttccaaagaaaccaaccatggagtaatgtaagctaacactggataatcatagtgcctagttgaattctctgaagccttggaatgttcctgaaacaaattcaaaccaaatttaatgaaaattcatcctaaagttttcagcttttcttctttgaattgcaacattgacccaaaactatggaactcacagtgaggatttcttggaaattaatatcagttttaacgattcccttttgacgtattgatgattccgtttggatgactcgatcagcgaatttgactttgtacacagcaatcgaaacggcgggaatcacaatgaagaagattacgaaaatggtgatgagtctccgatctgaatcttgttgtacgacttgacacagtgactcgtatccgtcgttccgccgtttcaaactctccgccgccgatgaacgtcgcctcctcgccatcgagtttctcaccagtgaaacagagaacgaaacaacatcgttagaactaggagatttttggaatgatgttaattccatatttacccctgcttctggtcaaatattacgttaaagaccaataagaggatatcagagagatg

SEQ ID NO: 18566 - DNA, 3000 bp, Unknown; identical to SEQ ID NO: 7660
  misc_feature (1)..( 3000): 2750-1469P.txt file - cDNA_ID_1818384; gDNA_ID_1621155; Annot_ID_57016

SEQ ID NO: 18567 - DNA, 3003 bp, Unknown
  misc_feature (1)..( 3003): 2750-1469P.txt file - cDNA_ID_1818388; gDNA_ID_1621155; Annot_ID_57015
tgcaccactacgaggacatgaatctagtctaaattcaaccatatcgataacaagaagcaagcagtgactgtaatagtatgctgaataaactatgtcaagaataaaagcatgcgacaagagcagctacaaacatttggatcagccgatatgtacttggaaggtggacgacaaactaaaattatgttgatcattataaaaatagagataaatgcgcattttgaatgaaagaaaaacatttttttaaaacctatgaattaaaacctatggtttttgtgatcatcatcatgagagcgtttgttcttaggtcagttgtagttgagtttcgtcttgttaattgggatgtttacattgatcttttgtctttttattgatgactgtttgtttatgttcatatatattatatagtgttgtcggctttgcctcgtgttgcttagtgtttcatgtctttaatgttcatgtagtctctctgttttgattttttttgtaatactctcttttcttgtaatccaagtcaacgacatcaataatatttctaaagtggacgaagaactcatcttgcaacaagtgagcactgaacttgaaatcagaaaagatgtaagttagagatcaatttatatgcaaagtattcactagtagcccatcgaggataactaaaatctgagatccgtgaacatgaaagattaaacatacatgtgtaaaaaggcacctacaccataatttgattgtcctgatcccttcttaccagtgacattaataaaacatttgaggctaatgaataaattaaaaacaccgtgccattctactttaccagacatagtcgtcataccgttttttgtagcttgtgcggatcgtccaataatcattgacagtcgtcactggtgacatatgccatacgatgaacattcggtaacttcagcaaatttggcagatatcgaaaacaaataatttgatttcacaatattgtgtaatttgttttttagtattggttgtatatatttctttggacatttggtagctatagcaactatttactcgtggaaataatttatttatttctgtatgaaattatgataacatatctgtttaaaagttgtattgatgcgacagcttttctttgatttaatgctaccttatacttgttcaaactggctgaaaaatacatacaaaattattaaattccaaccacttatcacactatcctttatgtgataataagtttagctgggcaatgttattcattaaaaattggtgatgcaacacaagtcgaattgacaaagatataataatgagttaataggctttatgatttagcgggacatggacatatattcaattttgtaaatcataacaaaaatgatgggctatgagataaattccactttcacttttcttcactcaaacaaatgctaaaaactaatctatcgatgaatgattatatgcctttttatcgtcgccactatgacctaaaatatttcaagaagtcaattttttaatttgtatagagcaaaatgttttgcaaataaaagaaaaacattgttatgaaagaaaataatacagtagaaactctataaattaatattcgataaattaataaacacgataaattaataaattttgtcggtctcaagtcgggtcaatgtaaaaattaaccaaaatcgataagataataagataataatctttttgaaatccctatgtaaaaatatgatcctaataatatcataaattaataatcataaatcttaagcatacattctaatactaattttatctaaaacttttattcaagccacaattacaactctttttagagtacagttggtatgatctcttttgtactcacataactccttacgtatttgatccgtcatatttggttttgtaacattttttaatcattgctaagatttgtgttaaaaaaaattggattaagcctcacgttaacgtcgtaaatatacggacacaatattttgtaaaaaaataaattaaaaagtcaagagaaaaataatttttaacataattgaatatacgaacaacaaaatataagaaaaattaaattaaaaaacatatttaaaagaatttaatattgtattttacgtaaaaaaatttataaatatttattaatttataggataaactaatatcactataaattaataaaattttatggtaccaatattattaatttatagaattttttatgtaatagcaaattaccattccaaaatttaatgttaatggtaaaaaaaaaaaaaaagagcgaaagaattttattttattatagctaagaaaattggggagaaaaatcattgcggaagcattacgtttgcatttcatcacatattcacacgtgcgctcaagacatttcacacgcacaaatataattgacccacaatcacaaaaaagctggtcatcactaatttttttcaacaatttccctacccctctccaataattgaaaattttatatatattcttttggcaaccatatttaataaacatatatatatatatatattggtttcaattatggatattatataatagcattattatgtataattcccaattttatgtaagttatgaatatattttacacagcttgttaaatgctttactttaaatctacatgaaaatcaaaatgtattaatatgtccacaatttaaatggttgatttcatattaacatgagaaatcacaaaataataagtataaaaatgaattacgtaaatgatgattttttagtttaaataatcggtcaccaaaatattcatattcgaacatggtcgccacaagcgacattctacaaaaaaaacacatacaagtaaatagaaaatagaatttctcctctcaatgattcacacaaactctctatataaagccattacttaataccacacaaattacaaaaaaaaaaagaaaaaaggagataataatcacaaactacaaaagtagaaagaagaaaaaagaacaaagtatcagttcttgaatatttgcatcaatg

SEQ ID NO: 18568 - DNA, 3003 bp, Unknown
  misc_feature (1)..( 3003): 2750-1469P.txt file - cDNA_ID_1818392; gDNA_ID_1621155; Annot_ID_57013
gctttgtataactttgaaagttaccaatcacaaaaactttatcaaaagtgttattaaaagttttatactcacctttttttaataatttctttgtatagttccttctaacagctttgcactattccgataaatctaacagctaaaaatcttgtataccttttggttaccaatcagacccatcatataatgtataagaaaattgcaactatgccatcaatcttgtttcttgtcttttcatgttttggagggtccatactcaaaacaacaaatcaatatcgagtttttatgtttagttatatacactatcattactttcaaaacaaagaaaaaagcctttaacaaaaaaacaagtgggtgtgtataaaagtagatgtcggaccacagttgataagaatcaaataccgaaagccttatggctattattctatgtgataattatgtagatcacacataaaaaaagttcaccagctcattactcatactcacttacatgatcaagttcaaattattaaaatgtaaaagtcttcatgtaaacaaatcgggccgttctaagcccatataatgaagcctgttatgcacctaaacaaatagggcccttttatcaattagggaaagaattacgggcctaaacagctcagaagttctgtcaattaaactctgtgtttccttagtctaataactaaccgataaaataggtagtaaaaaagtcaacgatagttatcccaaaaatgcaatgttaatatttttgtcaaatctgattggtgttggaaagtggactatctataaatccatctttaaatgatagacagagacacagagtagaagactttacagctgtacgtagctttttgtataaaccacaaaaatagtcagaaggcgacctacactatgtgatcatataacactccccatatatctttcaagtcttcgtttacgaggttaatatttttcaacgtttaggatccaggtttcttttagattcaagttgtgaattagaaaacaaacaaaagaagaagttttgagagcacgtcttctaacatggaagcattaaacttgacgtatttttatggactatattaatcgatatgctgggaggatgatgaaaaaataaagaatttatatataaatattagttatttaggtaagtatgaaagataaataatatataaaccaaaaaattttttttaaaaaaattaattacaaaaatgctattgaataaaaataattgtaatattcggatgataagtatataattatttgtttaatgttttaaaaactatgatatcgcgataagtttataaattatttgttaaaacatatttatcgatttaaaattgtaaatcagaattttttatttatgtatattcagcacaataaaaggaaattagacttttttatataattaacatgataataattataactacatgatatatagaatgataacatgctaatatattatataacagaataatatttatatgaaaacgttaagatattcgatacatgaataatgtttactgtaacggataatttatacataatatttactaataattgttaacgaggttaacctgatgataacaatgaaaatatttagtaacaaaacaatatatgagactttaattaaaaaaaagaaaaatacagaagaataataaagtaacttcattagttcttttactgttgaaatagtccacaattcctacacctaatttttcagtcttctgagcatataaagtgatattttcctatttttatttactttttaattgtattataataatatttgggtatttttggttattataataatatctgaaaatattattgatatttttggttatttttatatttttactaaaacaaccgaaccgatccgaatccgaaccaaaatcgaaccaagtttttagaatatctgaatggttctcaacctcttcatatccgaatagatttgatatccaaaaaagaaccaaacagatagggatacccgaatgaccagacctagtattattgatataaaaaaggttgctcaatgtataatttcatttgactagctggtctgttttcgtacaaacacactcacaaaagtacgaaaataggaagtcgtcttagttttagaaaataactattgctgcttattggcatatattgaaaaatcaaatactactagtaatcgtaagttctaaatttgaatgtttttttcccgagtaattgaattgttcttagtaattaagttcacaaatttggaaaattgcgatatctgagaacgtattaatttacctgtcggtaaacagtcacactcatgtttctagatttcgtatattttagtaataatttggttagtctccttatctgcgagtcaacgagacccggtccgctcaaccgtactacagtctaaattctagtttcacgcgcttacttacattacatacgcgctcatctcttctttactcaaaagttttaaaaaacgaatatcaaatcaacgctaacaaagtttgattttttgcttccatcttcttcccctccttaagttttcaaatctattcatcaaattttcttttgtctttcccttaagattcccgggaaagccaaggaaaaacgctagaagaaaattaacataataatgttaattgttgcttaaaccttccagctcaagtttggtagtaagtaagcagacatttaatcccccaagaagcaattgaagaagacttttaattcttctgaattttctttccaaaaacccctttttagaaaattggttgcatcatagagattggttcatttattcccaccggagaagatcatcaaattcgtcttctcacctatatcgccgacgacattcttcacggttcgtttgatttctacctgttggttcttcgttttatctgaattcaatcggagatatatgtttttgagttcgaatttgataaaaaatcgaaacttttttgatttgaatcgcagttggaaaaaaacaaagcaaaaccctagaaatagtggctgatg

SEQ ID NO: 18569 - DNA, 3003 bp, Unknown
  misc_feature (1)..( 3003): 2750-1469P.txt file - cDNA_ID_1818396; gDNA_ID_1621155; Annot_ID_57011
tacatgcatcggttagagactatagatatatatacctggtcggtccaaagaatgtgactcgtcgacattaaccttgaattgtttcatctgattcagctgaatagcgagtgagaaagggctgattccggagacaaataaagacgtgtttggcaagagaaccgtggacgctaacgtcgcaaagtttgcgccatgtcgaaaatccgatccaatagattgcaaatatgggcttaggaaaggcattccaagagatttggctaaaataatttaacactacgtttagcactatagtgataatttttgggtaataacagtaagtattatagattttgtttaaaatttcaatctaaaatcctaattattagacctggaaaaataaattgaaccgaacgtacagaaccaaatccgaagaaatgaaaaccgagtcggtaccgaaccaaaatattttgagtaaccgaaaatatccgaaatataattatcttttcaaaaatattagttattttttgactaaatagtaaaaatacttgaaaatatccaaaaaaaatcaaaaagaaccgaaatatccgaaaatattcaaagcaaaataaccgaatggatactaaatatttaaaccgaaagaaccggaaccaaacccaaatttcaaaataagcgaatagatattaaacattagacccaaacagatacgaactgaaactgaatggataactgaacgctcgaactactaagtatatcttaaatatttttaaaaaatattttaatactaaaggatacaaaaaattatactttgtagaggggatttgatactgctgtcatattatacgttttttgaaaattttgagagtatttgttagtcatttgttacctagaaaatcaatgataagacgaccgtctgaagcacgaccggctggtttcttgaaataagtcattccccatggaccagattgggcaggaaaagcagcccaaaatccgccagtgtccgaattcgagtctccgaagttgaaaattgcttcgaaatcacattttgaatcacctttatgcccataaagcatcacaataatcaagactagaagagagaacgatcttcttctgtttatatcggaagccatgtctatctctgtgtgaacaaaatgtgtgtttgtatgtgagagtgaggatgagatatttggtgctatatgattcttgtaatcatcccgtccgtgactctcactctcattgtacgtgtaattagtgtgttatagccttaatggtttttttagtccaacaattccctttaagcccaataaaagataaataaagcccaatctattatattgattccaagggttcaatatatatgagatatgtctaacaatacatcaaaagaccagtttgaataacaacacatcaatttatggattggatatgaataagatgtcatgtatgcaacaaccaaatttgacatttctcttgtaatgccttgcaataaaagttattttgttaactttttgcaaagtatgtgccaatcaagaacaggataaaaaggttgggtctaataattcaactacggcccaataataacccaataaaggagggtattaacgtaaatttatgtcttggaccgggagtctaactgcacgcgtcaagtggctcccactagaattggcatcaagaacacgtcaccttgaccttgtcggatttgtctgaaattgaattcattctttttttagtgactctcttaaattggaattagatcttcagtctaaatcttaatgattataagaaacaagattatatgcatcatttcggatttaaacaacatggattaatctcaactaatttagcattaaagataagattttgttaacccttttttattgggtggatcctacgtggcgaagattgagtcatcgtctaaaattttaaaaaagatttcaagaaaaaattaaaaaatgagctggcgtcgaatcccacgttgtccgtagggaccacaacggtattccttattcagtgggacacgtcagctttataaaaccactaacggccgacacaagtcagtagatcctacagtggggaccactctaacctttttctggttaaaaaaagatatattttaccgtagatgaaatcaatattagccgtcgattaaatggtaaaaacaaatatgcttgatttggtagtccacgtttcgtcatctgtggatctcaaatgaattatacattatagtttaattctgtattttcattatttaaaaggaataaaatcagcagcacgtcaagtctacgtagagatctcaagatgaacggtggcgattatgactacgtgtaccaatcattatttaagtcagatatttaaaatgtccagcgcagatctagggttgccagctcagcatatgcgttccctttgcaaacccttcaagatcatgacacgtgtacggtgacgtgttcatcagcctcttggcgctccgttgtgtctctcttctttttcttctcttctccttcctctctcttcttttaccgaactctggttctagagagagaaaccattctctccgactaagagagagaagcgaatttgtttttttttcttttgtgggttcaattcgaattgttttccctgagactcaaggtacgtttttggattttggttttcgttattttcttcaatgaatatctgagtgattatatatgaacgctctgttttctcgagaaagtgtgtattgagtgaagaaaattactaggaaagttaaaggtagattgaattgtgtaactctactagttggtgatagttttgaacttttgacagaggaaaaaactcgactttgaatcttttactggtagattcagtggtgctatactttatagttactcggatctctgttatatttatagtttgatgtccacaattgcgagatctaggtgtaattgaatactgttcttttagatttatgctttacagaggaactgctaaaagatctgatcatttttttgtttataaagttactgtgtcattactctgcattgagcaatg

SEQ ID NO: 18570 - DNA, 3000 bp, Unknown; identical to SEQ ID NO: 7663
  misc_feature (1)..( 3000): 2750-1469P.txt file - cDNA_ID_1818400; gDNA_ID_1621155; Annot_ID_57010

SEQ ID NO: 18571 - DNA, 3003 bp, Unknown
  misc_feature (1)..( 3003): 2750-1469P.txt file - cDNA_ID_1818416; gDNA_ID_1621155; Annot_ID_57005
tgatcgtatgcgccgttagctatccttacttgccgtttctcaacaattggttgattagtgtttctagacagaagcatcaggatcaagttctcgtcatcgctgaggattacgctactctctacaaagttaacgagaaatggcctggtcacgccgttctcattcctccggcgctcgattctcagaccgctcacaaattcggttctcaggtataatacatctacacagagttttcatcttctcgatccaattttatctctagcttccagttcatgaaatctagctgaaaaatggctttgaaatctgagaatccatacttagttttgatcagtgattcacttatcttgaatgttcgttgattagcttgtttagtccctgaggtttcggttttaagctgtgttttggctgatcacatgaataacaaaagatagtgaacttgtggttaatatatatgcttaagagcttctattgcaatggaatcgattgtttaaactaacttctcgtatgcatatcttgaatgttcgttgattagcttgtttagtccctgaggtttcggttttgagctgtgtttttgtacatccatggctgatcttatgaataacaaaagatagtgaacttgtggatctagtagcagcagccatttttcccctgtttctgtatgtgatactatatatgctaagagcttgtattacaatggaatcgattgtttaaactaatttcttgtatagggattcttcaatttcacagcacggaggccgcaacatctcttggaaattttggagttaggttacaatgttatgtacaacgatgttgatatggtttggttgcaagatccgtttcagtatttagagggaaagcacgatgcttacttcatggatgatatgactgcagtatgtatatttttttctcagacatcttcttcattgatggtatttggattagtgtacttattattgtcttgattatgttgtcagattaagcctttggatcactctcatgatttaccacctccgggtaaaaaaggaaggacttatatttgtagctgtatgattttcttgcgtcccactaatggcgcaaaacttctcatgaagaaatggatcgaggagcttgaaacgcaaccttggtccagagctaagaaagcaaatgatcagcctggttttaactgggcacttaacaaaacagctaatcaggtatgttctttcttcctagttccacagtaaaacagtaacttctcttctctgtaaattggtctcaataagtagttactacacaattggtgaattcaatgaaattctagcgtaaaatctcaaaagactgaagcttttgctacgccgagagaggttccgctttatctaaccgtagctactcaagcttttaatcaactctgtaatctacttatgaatgtttagttacgataagcttttttggcacacacatggctgatcttatgaataacaaaagatagtgaacttgtggatgtagtagtagcagccatttttaccctgtttctgtatgtaataatatatatgttaagagcttgtattgcaatggaatcgattgtttaaactattttcagaggaattttatgacatcaaagtttaaaatctcaaaagactgaaccttttagtactcactcctacgaatgttgtttcaattcgagaggtaatttgatttggtttgaattcattcttcaactctttttgtattatctctgttctacaggtggatatgtacttgctttcgcaggcagctttcccaacaggaggattgtatttcaagaacaaaacatgggttaaagaaacaaagggaaaacatgcgataatccacaataactacatagtcggttttgagaagaagatcaaacgtttccgtgactttaatctatggctagtcgatgatcatgcttccgagtctcctttagggaaattagagtaaattccaatggcagaaaaagattttttgtcgctccatctttcttcttgttattggaatattcaggctgcagaaaggaagaaagatccatcgagtaaattcttttacattttttgggggtctttaaagtcatgtgaagaggtgttgttattggctaattcaatacgagttgagttgaatttggtaatgtagactactagaattggtattgggtctgaaatttcttaaataatcgaaacaaatactgacagctagcatatgaatacgagggtccacaagagtattaaacatatttattttgaattatagttgggtgttatttccacactttataacatgtgactaattttacaatctaatagaccttttggaggatgctgcttatgtaagatttaccgtaaatgataaacataaattaaatacgctctttgacgtcccattgtttggtcacacacactctagacttttcattcattcgtgtgttactcaaatctatttattcccagatctgatatatatatttattgcaattactaaatcccaatttccataaataatgatttctatgtaactcgttccataaattaaattatgcgtctaagttgtaacatataataaaaggataatatatttttcagtcacaccaaaaaaaaaattgataagaaagaaaaaaaaagagtgaaaattagaaagacagagaagcaaagattcttgctccctgcgaatccgcagctgcttcgaaacgcaaatccgatttgtagtctcctttgattcttccattgacgatacagcttctctttctctcttctctctgcttactttgctttttactaagctcacaagaatctacgcatctgtactgttattatgctgatgctctctacttaatcatcaccaccgcacgcagttcgagatttctggaattttctgtgtcggatgcgtttgagattcatcgaatctacttggttatagattggaaatttaggtggggatttgagttgcttagcttgtggtaggttacattttcttgtttgagattcagtgaatctctccagagttgcatgtatagaaatg

SEQ ID NO: 18572 - DNA, 3003 bp, Unknown
  misc_feature (1)..( 3003): 2750-1469P.txt file - cDNA_ID_1818420; gDNA_ID_1621155; Annot_ID_57004
ataccactcaagacgtgtaagatgcaaaaacttcttttcagattgcactgcagtctactcttttttattctcaggcccaaggacaggttttggttgggaaaagtacagttgttgacgaggatgcaatatcgagtggcgtggctgaaaatgagttagcagtagatgaaatctacacttgtgaggcaagcttttctatgaaaaagaaaaaacctataattgttgttataatcttgtttatgatgtttgtctctgacttgtttagatttgcaccggttgagtctctcgagctcgccaaaccctgtttcccatctccaagttactttatgttgtgtgttctacaaaatcgttgagaataattcattggattctatagtttgagactgaactctgatcttttgaatctcctggaacttaatggtttcgatgcaaaagattgaggcctctattcttcaaagcctaatccttgagtcccctatggcagcgcttatattattttgtgtatttccatgctactctgtagattccactttcttgtttgatgatcaagatttctgctttgatttcaggaattacttaacagatctggtgcaagaactttggaaccaaggacgatgacgaaagagagcactaaagttgatctatagttttcactttcctagtacagtactgtgtgagtgtgagtggattgatgatgtacagcagctgacattttccctctgtaatttctctaatatacagcagctgatatttccactataaattatgggatgtgtatcaatatggaaatatattaagataaatactttattaaaaggttttgatttataagctttctcattacttgctgctaaatttattagtttcctccttgaattcagcaacttttcttgggtttagccttgtaccatcgtggcatttcctataaacttcagaaatctccatgtgcattctactacgcttgtgctttaagtatgttgaatactattagataatttcccaaggattatattaattccactaatccctaggttagctgcaagatgaagttaaagttcacaactttatctctgcaactagattttgagtattttgcttctcatttcagatcttctctaagaaaagacaaaagaagatggtgttagcttgtgttcttgttgattttgtctgagcttgagggatggggaagacgaatgtattatcgaagatcagagctttcaatggcgtcaatagacccatctatgtgttggcaggtttggcttttcttatctcagtagctacattagctaagttcaactacatcactccactacgcttctctgatcggttctgtaactatcatggaagctttgacggcgacaactacaacatcggaagccaaatgagaaagacaatcgaaaccgccatttttaaaatccaccaagaaatggatgatctcaaggctttagaagctaattcttctactcctccatcctctgtttcatcagcttcaggatccatgtttaggcatgtagcttttcttgcggatgttctttcgctagttcagtcggttcatatggaattgccttcgttcgaagagagatccgtagcagatcatccgttgaagcagcagaaaggtgaccctggtgagcattttatgagagaagagataaagaagtacataaagatcaaacctaaccggctcgggaagcagaatttcatgggagctaacggaacattcacctcgatcgggcacgcttgttttgcgatgaagaaagatctagaagagtatatggactatgatgttggagaaatctgcaatgatgattggagattagctcagaagcttatggttcatggatgcgatccgttgcctagaagacggtgcttctcccgtggcccgcagttataccacaaaccgtttccaatcaacgagtctttatggaagcttccggataatcggaatgtgagatggggacagtataagtgcaagaactttgcttgcctagcaagcaacacaacagcacgaaaagggttctttaaatgcactgattgcttcaacctcacgcaccacgaatctccgagatggcttaaccgaggcgaaatcgatcctgagacgaaccaaactgcggatttctcgatagctgaagtactcgagattaaaccgggagagattagaatcggactggatttcagcattggcactggaactttcgcagcaagaatgagagaacagaacgtcacgattgtatcagcaacaatcaaccttggcgctccattcaacgagatgatcgctctgcgcggtttagtcccgttgtacttaaccgtgaaccaacggttaccgttcttcgacagcacgcttgatatgattcacacgacgaggtttctcgatggatggattgatctaatacttcttgatttcgtgctgtttgattgggacagggttttaaggccaggtggattgttgtggatcgatggtttcttttgtctgaaagaagatgtgagtgattacatggaagcgtttaaagcgttgaggtataggaaacataagtgggttgtggtacctaagaaagataaagatgataaagaagttttcttctctgctgtgttagagaaacctccaagaccctttagatgattgatcattgcatagtctctgtctttactattatctttgtaatcatattcttaaaacaaaacagaatgtcaaaataaactgagttatattttagttatatgttccaatttgcttgtataaattcagactaagaatttcaccaaaagtgttatatgtttgacatttatgtttgtaatccattgtgatcaatatgatacgacgtagtaatgtaactctctgagcgagaaagagggttctccattttgttgttaacaacaaaagcaatctccactaggttcgggatgaacgaaccaacaggctcggaccgtggaacgcgcggtatataaacaactttgcctctttgttcatcgattccgttacatcggctcattggaggaaatcggagaatg

SEQ ID NO: 18573 - DNA, 3003 bp, Unknown
  misc_feature (1)..( 3003): 2750-1469P.txt file - cDNA_ID_1818432; gDNA_ID_1621155; Annot_ID_57000
caagaatcaacggctataaagatgtccgcgtggagacgatctcgaggacggagaagctctcacgttttggctagtaactactaatttttgtttatcactaatccactatttaaatagtagtattaatcttcattctttaactacaagtgtttactagccccaacaaaaagttacattgtcgaaaatttagcgattagtttttccgaaatagtgttctatctgaagacaaccttgagaggacgagccacttgttttagttccaagcttgaatctcttaccacttcctgagcttgcattggttttctatgcacagatatcaacacattaggcaaggtagtggaaattaatgagaggagaaactgaagaagaatgtaaaactcacagaaatttggggtttagatctcagcactttgattctaccacctttaccatcaggtccaatagagatgagatcatcttttcttggaacagaacctcctagtgatggagttgcttcgtttctctctccatgtttgctccatctaccaaggtttctatttgttccacttgactgccaaatgtttccactacctgcattggacaatcttcaatctactactacactcaagaacttgaattcatgatgtacaacaaaagtaccattgctgtaaggtgacactgatgatgtcgggtcttttctgatgttgaactttatatccttcaccatggaattatcacctttctcttcaatattagtattccaatctctaatgccagaagtgttggtttcaggaacataatcatcatctacatctataaccgagtctgttctgctaacgaaggagtcttctcttccccttaagcatgatccttgaatggtaaagccatccttttcttctaatttaccaggtggtgtggagattttctccactttgttgtctgatgaaagcattctgaaagaagacatgctctcgattgcaggctcggaaacttctgtgtaactgcatttctttgaaacgtttatgtcccgtagagctctgttctctctctcttcagttatcaactcaagttccctcattcgtttctggtcatagaataaacataataagagccagatatagaagacacaaagaagatcgagataaacaccaaaacacacacctttagtttttctatcttttccaaagctttttcaagtttctcagaagatcgtgcttcgcctcttcccagctgattgcacttggctagcaattccttataactcctgtcagagtaagaaagattgttttttattagagacttcataaaagaaaattcaaagacctaagagaaaagaaacgcaatgttcaatcctcctttcctcaaattcttgaccatacctacttatgaaatttcgtaatttcagtttaacaagttgttgttacgaatgaactaaggtaaatcaccatttcataagtcactgaaggtcaaattaatcttttttaatcggattacactgctgtagacatgacaaatgggaaataatgaaccaagttcactaagtcaatgaccaaaatgagagcagggaaggagtgacaactaagtgctaagcacctacctatatcaaataaccaaaactaagtgaagccatgtgaactgagtggaactaatctatgtgacaaacctattccgaataaccaaggacttgactagtgtgtctattgtatctttcgtcttcgcgttattccccaacaaggccaacttcagtacatcatcttcctccaagcttaaatcagaaaccctggatgcaaaacaagatattagactcagaaaaggtttaaccatacgagtgaatgattaaattagaacctgaagacactaaaagagcaatatgaaagatgttatcttacaatttaagcgatgcgagctccttggcaagagccacagttctctcctgtagcttaacacactgtgagttaagctggatacattcctgtaacaaacaaacacactaagaaactcaacacaaaattctgcctgtgaagcaaaaaggatctaaaatctaaggatgttgtatagtttaaacaaacctcagattttaacttaagcaaatgctgagtcgttgatatttcttgaagagcctcccaccttttcactttatcctccttcaattgctcattgcattgatgcaactgagacacacacaaacaaaaacaaaaaaaaaaaaaatcacataaccttatcttatcttataaaccattctaatcaaacgaaatgaacaaaattaaccttatcagagacttcaacattctcctttttcttcgcctccagagccgaagtaagattctgtaccttcccttcaagccgcttcacttctcctctcaacaaaaccggatcttcttcgattccaacaaccttatccgaggcaatcgaatcggtttgattcccagaagactgaaagtaaagtcgacaaggatcctttagagagcacttctgcttacaaatcggacaatttcgcttgttcgtactcgggcaatactcaaaccattgctgcaaactagggtttccgaaagaaatcgattaaacacataaatctataaaatttcggagataataaacttcattagagaattgattttgccgtactaaccaaagttcgtgaaagacatggccacaagcggagattgattgcagattctcaaccaccggtttaagatcttcgtagcagattgaacaaattgcattccccgccgcgttttcttcggccatagctatctctccggcaatcaccgactagtcagtttccgacacagtcaccattttcttctcgagaaaatcaaaaggcaaatatcagagagcaaacacatggcgcggataaaaagttgaaatttcaatggtaagcgcgaaaatctggggaaggatagcacgtgtaagtcacgtgagataaaaacataaacaaccagtggcttgtattaggcccaacgtttttaccctataggtccattaaagcccaaatcagctattgatcagtggtcaaacacaatg

SEQ ID NO: 18574 - DNA, 3003 bp, Unknown
  misc_feature (1)..( 3003): 2750-1469P.txt file - cDNA_ID_1818442; gDNA_ID_1621155; Annot_ID_56997
ctagattttggttaacagagaagctccgtacattctaaaaccgaggaagagatgatgaaatcacataagctcaaatcaaatcaaacgcacgagtaagacaagaaactagtaggagtaataaaacctcagatcaaggtacgcactattagaaaagaacaaaatttagaaacgagaagcagagacgatggtatatgaaacaaacgagtcatggaatctcaacacacacaacacagaaagcaaaacccaaacaaaaacgaaatacgatgagtgaaacaggatagtaaaatgtctcagaaaaaggttttgaagcttacccacgacggtttccatgaaaggaatcgccatggctgagaaaagagtgacctgaaccgcgatgaaagcagaagcaaatcgaagaaagcagaagcaaatcgaagaaagcagaggaacgacaaaagagaggtttttcgtttttgactcttctcaggtcggtgtggatatgtaaaacaacaaaaacacgggtacgggttataccttagaagcccaaatagtaaacgggctgagatttaggcccatatgaaacaacccctatattttatctaaaatctctaagtataatagtatattatcaaatattggggccttagttgaaatattatgttttaaaggggctaaacggaaaactccttatcctcaaactgtcaacaaattacgaaggtgccattgggtttaatcaacaacgaacgccgagagctctcacttcacactttatccacttggagcttcgacaatggcgtctccttcgcttctgcagtcttccgcttcttcgtttcacggacgtttctcaccattagcggctccatcctccgcacgaatgctctctccgccgctcagaaacgtggtgaaagtctcggcgtctggaactgtactggtcgagaaatctgaagccgagaaaactcaacgcctcaaaaccgcttacctcgagaggattatccctgcgctcaaagaagagttcaagtacgttaatattcaccaggtaaccccaaatccttcccctctgagctcaaacctagtttttgttctgttgcgattgattgaagtctaattctcagtgaattcgaattttttgagcgaatgttaaacctaatttgcttttaatgataagtttgaattgatttcttctagaaaatgtagtgaagaagcctagatttaagattgttgtgttgataaaatcgtgctgttgggatgtgccatttacaaatgtgaatgtgaatttgtcaatctcatcattgttgtatatctgcttggacatcttctctaccaggttccaaaggtacagaagattgtagtgaattgtggtattggagatgcggcgcagaacgacaagggtttggaggctgcgatgaaggatatcgcgcttatcacagggcagaaacctattaagacacgagctagagcttccattgctactttcaagatcagggaagatcaacctcttgggattgctgtcactctcagaggagatgtgagctatatttctcttgactaatcaaactttccttttgagttatttatgtattaacattttgtgattttgactgttgtgacaggtaatgtactccttcttggatcgtcttatcaacttagcccttccgagaactcgagatttccaaggtgtgagtcccagtagctttgatgggaacggaaactacagtattggtgtgaaagaccaaggtgtattccctgaaatcaggttagttctattgtatctaccctcaaaatcaaaactactaacttgttatccgctggttcaacaagatcaagcatggtttctctttagtcccactctttgtttacaaccgagcaactaaactctatgttggttggttggtttattacactctaggtttgatgccgttggaaaaacgagaggaatggatgtatgcatcagcacaacggctaaaagcgatcaagaaggacagaaactattggctctaatgggaatgcctttcagggaaggaggtggtggcagcacaggcgcgatagtgcggaagaagaaactaaagtctcatcactttgatgctaaaggaaaaggaaagagatgatgaacatagctgcctattgtatgtatcgtcttctgtaaccaaccatttcatgtttcagaaaaaccatctccttttgtaatgctttatgagtcaatttgaaaataatatcagggatcttgttgttatggtaaaaatttatcaaggtttttctgtaatttattgaaagttttgtggattatacaaaatgtagcgcgtgagtgaacgtgaaaagctagcgcgtggatttgtcaattttaccttcccctttgagagaaatcgctcttctttgtaagacttggtttcgatcttctctttttcatcatcaatcgatcaaaacaaacagcaacagcaaaattatctttctgcagatcgaaaccctaattggtttctccgttctccttttgttcttctagaatcggcgactcttacttttttttctttctaattatccttttctgatggattctggaatccatgtaattccccattagcgctaaaaaccctagctgtcgaagaccttagattactgcagaaatgttataatctgttttcatcttttcccgatttgaggtttttatttattttggttgggtgagagaatccgatacgagagattaaagccttgtgagtttaggatgagctagttttctttggctttgagctgtaatttctcttctctgaaatctttcactgtacatatagctagatcctgatgaagttgcgtggtggtgaatcgtggtttaagttttgctagttgagatattattggtggttactgtaatatcgaagaatcatatttcacggtatttactatagacaactactgtagagttacttgattaaggcgttaagaagagatactggtgttttttggcctcaatcagctaagatttttgtgcattgtatgatgagtatagcaaatgaacaacaatttgccatg

SEQ ID NO: 18575 - DNA, 3000 bp, Unknown; identical to SEQ ID NO: 7640
  misc_feature (1)..( 3000): 2750-1469P.txt file - cDNA_ID_1818450; gDNA_ID_1621155; Annot_ID_56994

SEQ ID NO: 18576 - DNA, 3003 bp, Unknown
  misc_feature (1)..( 3003): 2750-1469P.txt file - cDNA_ID_1818450; gDNA_ID_2926150; Annot_ID_139285
actcctgtgtgtatttctgtcatggccattttacaattcactgcttgtttgcatatgttgttaccagacaatataatctcccgcttttttatggctatagcttccagatggagacctccgggagaagattgagaaacttgcttcttctctaaagtttcctttgaagaagctgtttgttgtcgatggatctacaaggtcaagccatagcaatgtgagaagcttgagatctcttcctacctactttactctagtttaccattagaagcttacgtatcttgttacatcatacaggcttacatgtatggtttctttaagaacaaaaggattgttctttatgatacgttgattcagcaggtactgtgactcttgatgcttcaaacgagctatactcacatttctgtttctggttctgaaacataacataatcttctattgtgcagtgcaagaatgaggatgaaattgtggcggttattgcacacgagcttggacattggaaactgaatcacactacatactcgttcattgcagttcaagtgaggctcaaccgacagttcaaaaacttactcacatctacatttcacttaagaaatcatgtcttatgaccctctctcaatgttttgcttgcagatccttgccttcttacaatttggaggatacactcttgtcagaaactccactgatctcttcaggagtttcggatttgatacacagcctgttctcattggtttgatcatatttcaggtttgttatttttgccttttgacactaatctaatgaatcaaggatggattaagaaaaaaaaactctaaacctttggttatatctcctgtctgattatcacagcacactgtaataccactgcaacatctagtaagctttggcctgaacctcgttagtcgagcgtttgagtttcaggtaccatcttacaatccctcaagatccaaccatagtttctttattgcaatggcagcctcatctactaatctgagttaacgttccttttgcaggctgatgcttttgctgtgaagcttggctatgcaaaagatcttcgtcctgctctagtgaaactacaggtcagagaagataacaacagaacacaaactgttacctcaatttgtgtcacacacttaaatggattttttgttgggattttgcaggaagagaacttatcagcaatgaacactgatccattgtactcagcttatcactactcacatcctcctcttgttgaaaggcttcgagccattgatggagaagacaagaagacagattaagtccgcttaactcgtctcttgtacgggttgatgtcttttaggtgacaggtcgaaacaaaacaaaaaaaagtgtaaaaccatataggcagaggcctcttttgtttgttttttacttttacagtgggttttgcctagttactactagtttttgagtttcttaaaagtggaatcactcgcacggttcgatatgatcatttctgattcgtcttcttttattaaaatgaggagaatctaacgtatatgaatcattcttgttttgaaagtgatataggttatgattggtgttactaccacatgttagaaaatcgtgtaaaagtagtactaaattgaacatgggattcagcgatacagaattattgaacaaggcagaattgtttttatgagaatgatacatttcttgctatgatggtgcaataatgggtttctcttttcgcccaaaccttatccttttttctttatcatattctcataattacattaccctttaaagcatcccttctaaattctggattagtctgtataatatcattcattagttcaccggtttataaaaatcagaaagtttataagtttcaaaattttgctttggtgaaaagatcattcatatggttccaatttccaaaccattaatttaaattttagctcatagttgtatctcttcgtctcgatatggacaagggatcccaaagtacattataaatataaaaactatgggcatgggtcttttgacgcatacaaatttaaaacaacttaagctttagcctttgttctacctaatttagtaaattattagtataaactataaaggatctattatattatttaatacaagaatgaagaaaactatattatctactatattcgctctttcttttttttgtcaaaatggaatgctgatctggccactctacataactttcatctagcctctcatccttatctagataaacaaaatatgtggccctttgataggaaaaaatttcattcaaaaaatgcaaaggcagaataatttaattttacaaacgaatgttattaatgcagtctatagtctcttcggtataataaaagtgattccttttctccaaaaactattttgaatgatattaaagctcttaaatagcaatacactaaaaacgtagcttcattaatcaaaactcggatctaaatgtgtacttagtgaatgatattagtagagaatcatatccccaacaccgttatctctccgtcatctcatcgtttgtttttattacaaacaaaccccctcgggatcacgtaggtcccactatttttcctcttaactaaaagggtaataccgtcatttaccacacctctcgccgtcactaacacggagagagaaagaatcagacagctcatcccaagcacacacactcatatcagaaaatacacagacacaacacaacactgagagagagcttttcttttaaattccttcaatttttttttgttgttgtaaagaataataatttattcgattgaatttgtttattcgtgtctttgtttttactcaatcccctgtttccggttctgttcgattcttctctgtctctgttttgtttttcgtcattttgcctaaagccacatgcaacagtgattaactgaatttttattatccatatccattttgattcgccggaaagtttattcttttccggcgacaaatgcgaaagattcgaaaacccattttaaccaaatcaattctatgacgatg

SEQ ID NO: 18577 - DNA, 3000 bp, Unknown; identical to SEQ ID NO: 7639
  misc_feature (1)..( 3000): 2750-1469P.txt file - cDNA_ID_1818455; gDNA_ID_1621155; Annot_ID_56992

SEQ ID NO: 18578 - DNA, 2388 bp, Unknown; identical to SEQ ID NO: 7638
  misc_feature (1)..( 2388): 2750-1469P.txt file - cDNA_ID_1818467; gDNA_ID_1621155; Annot_ID_56989

SEQ ID NO: 18579 - DNA, 3000 bp, Unknown; identical to SEQ ID NO: 7674
  misc_feature (1)..( 3000): 2750-1469P.txt file - cDNA_ID_1818489; gDNA_ID_1621156; Annot_ID_57035

SEQ ID NO: 18580 - DNA, 3000 bp, Unknown; identical to SEQ ID NO: 7683
  misc_feature (1)..( 3000): 2750-1469P.txt file - cDNA_ID_1818493; gDNA_ID_1621156; Annot_ID_57034

SEQ ID NO: 18581 - DNA, 3000 bp, Unknown; identical to SEQ ID NO: 7675
  misc_feature (1)..( 3000): 2750-1469P.txt file - cDNA_ID_1818501; gDNA_ID_1621156; Annot_ID_57031

SEQ ID NO: 18582 - DNA, 3000 bp, Unknown; identical to SEQ ID NO: 7675
  misc_feature (1)..( 3000): 2750-1469P.txt file - cDNA_ID_1818501; gDNA_ID_1621156; Annot_ID_173526

SEQ ID NO: 18583 - DNA, 3003 bp, Unknown
  misc_feature (1)..( 3003): 2750-1469P.txt file - cDNA_ID_1818511; gDNA_ID_1621156; Annot_ID_57027
tgaactaaagtttgtttggtctcttctgagtgtttagcattatctataaagtttatttaattcttcttaattttcgtacaggtcttccctgacacacttcttgatgcacttctaaaagcaatgctgcatccaaatgtggaaacccgtgtaggagcgcatgaaatattctctgtaattctcttgcaaagttctggtcaatctcaggctggacttgcatcagtgagagcttctggctatcttaatgaatcaagaaactggaggagtgatacaacctctgcgttcacatctgtcactgctcgtttagacaagctcaggaaggagaaggatggcgtcaagattgagaagaatggttacaataatactcacgaggatcttaagaactacaaatcgtccccaaagtttcacaagttgaattccataattgataggactgctgggtttatcaatctagctgatatggtaacatttttccttgcttacaattggatgttgtgtgctaaaggaccatcatatgtttatgcaattgtctgatactgtttggtgatgcagttaccatcgatgatgaagtttacggaagatcaaatcgggcaactgttatctgcattttggatacaatcagcacttcctgatatcttaccttcaaacattgaagctattgctcattcttttagcttggtgcttctgtccttgcgactaaaggtcaacataaaagtttctcctcttttctggctctcttaatatttctctttcatagaggaagttttcactttcatgacgctatacttaaagcttctcatgattattttaattacagaatcctgatgacgggcttgttgttcgagccttccagcttctcttctcattgaggactctttcgttggaccttaataacggtactgattgatgaaactctcttaaactgatcaaagtttaagaaatcgcttatgtgcagtcaaactttctctttttcaggcacattaccctcagtttgcaagcggttgatccttgctttatccacaagtatgctgatgttcgctgccaaaatatatcagattcctcatatttgtgaaatgttgaaggcccaacttcctggtgatgtgagttcccaatgtgttgtttcagttattacttttattttatccatggagattgtgtatcacttgattatatactcaaaattttcaggtggatccttatcttttcattggagatgacttacaacttcacgtaagaccacaggcaaatatgaaagattttgggtcctcaagcgatagccagatggctacttcaatgctgtttgagatgcgaagcaaagtagaactgtccaacactattataaccgatattgtcgcaaaaaatctacctaaactttcgaaggtaaatcttatattttctgtttcttagtgaacaataccttttaagccccaatgttcgattctcttgtactgatttgattttatgtactctcttgttaagctcgaggaagctgatgtgaagatgcaaatcttggagcaatttacacctgatgatgcttttatgtttggatcaaggccaaacattgaacctcaaccaaaccaaagtatctctaaggaatcgctgtccttcgatgaggtaaactattctctgaagttccatattccattgggattttgataatattcagaactgttaacacttatgtttctttattacaggacatacctgccggttcaatggttgaggacgaagtgacgagtgaactctctgtgcgtttccccccaagaggatctccctcaccatctattcctcaagttatcagcattggacagctcatggaatctgtaagcatagaccacattcgacataaagaagaaactggctgatatatatatttgtgtcttcttataattggtttgtgatatgttatctaggcgcttgaggtcgctggtcaagtggttgggtcatctgtctctacttctccgcttccttatgacacaatgactaaccgctgtgaaacctttgggactggtactagagagaagctctcaaggtggttggccactgagaaccgtcagatgaatgggctctatggaaattcacttgaggaatcatctgcacttgagaaggtacgtaacagctgagttggtaaacacattagaactacaaactgttaaaatctgctatggtccttagtaatagtgagaaagatcataactttgtgataccaaatgggctggttaagagaaaggtagaaactttatcatacgaggcttacacgttgagacacgttgttacaggtagtagaagatgggaacatctatgggagagaatctggaatgttgcaggattcatggtccatgatgagactacctccagctagtccctttgacaatttcctcaaagcagcaggagctggaagatgattcaactaacttgatcatatcaatctctgtagaaagtgtgtaatcttgttgttcttattggatttgtagagaactaacttatctagggccaatcacgatgcttctcgtagtaatctagaatcagtagtaagtaatgcttgtttcgttaggacaagaatctctgttagtgttgtcgttataatcagtagagaaccaatgctatctagatttgtatcaaattctcttcattacctttaaacgcatcatcaaaacaaaatcgaagataaagttcacaactttaaaggccacatcttttactaatggcggtgaagcaaacggctttagttggccggaccggtttggttttctgataaccggaaaattcaatgaaccgactccaaaacgacgtcgtgttattgtgaaggcaaaatggtgttgttctctctgctgcctttaaaattggggttttgcttcgtcggggtttatgaagggctttgatactaatcttcgtctacaggcttcttctccagaattctccaatggtttcttgcctaaaaggcaaaactttataaaactcaatcgcagaaattgttaccccagatcttctttctctcccaccatg

SEQ ID NO: 18584 - DNA, 3003 bp, Unknown
  misc_feature (1)..( 3003): 2750-1469P.txt file - cDNA_ID_1818515; gDNA_ID_1621156; Annot_ID_57026
gaagtttaaaataataatataatttatttaacattaatttaatgagagaacattgtatttagcatgtattaatttgttttttaaagtcatttactatgggtaataatactcattaaaaaggccattgaagtttaaaataacaatataatttatttaacattaatttaattgaataaaattgcatttatcgttgtaatatagtgttttcattcattcgttacatcaaattaaaaattttgggcttataagacttaatttttgaatacttatgttatattctaagaatcttaacgcacacgttgaatacttatgttatattctaagaattttaacgcacacgtgtcacgtttattgttcagttgttgacatgtatcagatattttgtaattttttccaaaatgaaataggaaactaaaaaataaaacatatttacatattcaaatttatatgtcaacatctacaatatttaacttataattttcttaactagaaaggaaactaataataatataaagtgtataaaattaaattgtatttgtattgcaaaatcaaattgtatttgtattgcaaaatcaaattgtatttgaattttatacgatcaaattaaattttatttgtattattataaagtatatatttaaattatactacaaaatcaaatttgtaagattgaaatttggtttaagaaaatattaaattaaatattaaaagtatatcagttactatttaaactttaaatatcgtcaataagatggagtgtatagaattaaaaggcattttattatggggaaatatatagttaaaatgggtagtaaaattgaatgtgtatgattaaattttatttaatacataaattactaagttaaatattagaaaaagtgtgtggatctctatttactatatcaaattaaaatattatttataaatattttaataattttttaatattttatatccagctatttaggtcggccttatctggtatgtatatattgtaaaaactataaatttatcatgtacgatctttttgaaaaataatattggattttagagacaaacgaattatattttcaacagaaatcctgatttagttaaaaaaaagagaccaaaaacccctaatgtcgattgggaaaaaactgacctacatgatacatgataatcaacactacatattttttctttcgtcttttgaaaattggtttttaaaagaaagatgcaaattcaataataatttgtttgtggttttaatagtattagaaaaagcatattcttttaagttttgcgtacactgttggttcaagtccattagttacatttttttatattacattttttttttagttaactttgttactagatcttatgatacaaagctgaattttaaaaattcaatgacttttctaatgaatttaaatatatttcaatgattttttttaattatataaaaaattacattatttaaatatgcattaggccaccaaaattaaaaaatcggtcatgcaagaaagtctacatcaatgagtacgtcttgcgtctgatccccaactttccttctatatatggtaacaacaaaaatcgatggaatctttagacctaatatccaccaccggcaaatggcaagtggtcaaattagcctcaaatctcaacccgatgaaacctaccgtcaatgtgccacaaggtcattatgggttccaacatatattttgtcaacaagaaaggcatgggctgcaaagtgttggacttggacacaacaacacttaaaatggagagaaattatgatgcagctatgaaaaacaatgattatgccacctccctgtgttataaacaagcgtttatatatatttatatatattgttatattcttaattttggtatgaaaatgtgttattttttcaaatcacccaaaaaaacattccatcagaaaaataaagaaggctaatggaaaaaacacaaacaattggaacaaatccaaaggatgtcatcaataagccatatccaccatgtaaaatgtatacaatggaataactaaaacacaaatccaaaaaattaaactttaaataaaaaaaaactgattagaatctaggttaaaatttagtttttgatcaaggtatgaagaatgtatctcttcttcacaactttatcatcttcgtatagatcacatttaaactttcaaagtaaaaacataaagaaatttacaagatttggataacttcgaagccaacttttaatgagttcagaacctaaaaattgtgggaaggacaacaaccaaattgttagcctttggacattaatcgatggagcatcgattagcctctggacattaatcgatggagcattctgacacaagacaggactatagcctagttctgctttttctagtgagaaaagaaaagaaaaaaacattaaaatctgtgacatctcacgtgctctctctctctcttctatctctaattgtagtttgtatccaaatccacgcgcctttttccactctctgtctccacttttctttctagattaatcaaattctttgaaaccagtttctcacttcgcctctctcttcagatccgtcctctgtagctctgtatgtctcttctaatctctcctctcttacggtttctcgagattcttgtgttctgtttactcaattaccttggaaattaagctaaattttttgttagggtttgttttagaaatcgggtaaggcacatttgtgtttgatcttgttcctctgtctccaaaagcattgattcatacccagtttcgttaggttttgatgtttgaaccttaacatttgaattttgaatttcaaaaagtatagatgaggtctggtttctaagttcccccactcagaaagtaatgatttttttggtacttttcctttgtttgtcttggtttagtaactttttgtcttttagggtttacaaaagattgaagctttatgttctcttcttttgattttccaacacttatctcttgttctgtgaagggttgcagagaacaatg

SEQ ID NO: 18585 - DNA, 3003 bp, Unknown
  misc_feature (1)..( 3003): 2750-1469P.txt file - cDNA_ID_1818519; gDNA_ID_1621156; Annot_ID_57025
ctttttggtcaagcattcaacattttctacattttttgtaaagcagatcaatcttgttcttggttttaggtattgtctgaggaagagcagactgtaattgcagccactcctgctcaccctgaaggattatatggttagagctctctcactagttcattatcatattagaggccatggttatatcacttatggcatttcccatcatgatgacattttacttgtttttgatcagtcttatatgcaagttgtttggttggaaatttggttgagcaactttggaattttgcttggccgtccgccattgcaatgctatatccgagcttactacctgtggcagtcatggggtttgtcactaaattggcgataattgctggaggccctgtggttggaaagtttatggattatagtccgagagttcctacatatatctcgttgaatgtcattcaggtaaacttttcaaaaaacactgaatgaaaacatcacacatgactttgtggttactttccttcaacttttgtcacctgacattggaattaagtgtccatgtcataaacttattttatgtctacatgtttaggcagccgctcaagtgctatctgcaggaatgataattcatgcatacacggttccttccacatcggcgtcatcaattcttctgcagccttggttttttgcattgttattcgcaggggccattgacagtctatgtggaatagcatctggagtcgccattgaacgtgattgggttgtattggtatgctttctttgtgatgccatagaatacctgtttttataagaagataaaccgactgaagtaattaatttatcatttggtagttggccggcataaacagaccaatcgctcttgctcaagcaaatgctgttctccacagaatagatctgctttgcgaggtatagtaattttctctatggaatctatgtactttatgccctttgaacttttgaactccagtaattcatcaattgacataattgtaaccttaaatagatagctgggacgatgttatttggcattctcctatccaaatatgaccctgtgacctgcttaaagtttgctgccacactaatggtgggttctttgccaaccatggtaagtagcacctataaacttgtggttattcttctttcgtccaagctaaataagggaaacacaaagctgctgtgttgtacgaggctgaactatgtgtaatagaatcattcctgtttcctatgtttcaagtttcgaattcttttttcttcaattaaaaaggcagtctttctcgtttaggttttggataattggagcttagcctagatggagtattattagttcttttaactagataaataagctgtcatcaacattggagtgatactgttctgcttcagatcctagaagcaattccacttgcgctttaccaatttatatgggacttcttaccatcttgcacttctaatagaagaaatctgttttcttcagacagctcttatatggctgaccaacaagttctcctctggagttctggaccgtcctaaatgctccttgaacagctgttctgctgaaggatctcgtactaataccgacagtatttgtaaggaaaccttttactttatactacttggatacgcataatttatgatttgagcatgtagtagacatcacaaaataccatttgctttgttcatcagttgatattggcatggaaactatcaagctcggatggaaagaatatattcaacagccagttcttcctgctagcctcgcatatgtccttctctactttaacatcgtcctcaccccaggcagcttgatgactgcatttctaacacaacgatgtatgctacttcgactcggtcccttacttttctttagtgcttggatgaaaatcgtaattaatcttgcgagagtctttgtgctattacctattactctttcaaattagtcaccaatctgtcttttttcaacaggtgtgaatccatcagttattggtggtttcagtggattatgcgctgttatgggcgtcgccgcaaccttcttatcagcaaacttggtcaaacgagttggcattttaaaggtgaaatgttttcccgccatttgttatcttgagcttgtattgcgttcaagctgattaatgttattgcgtttgcgttttaaaacgatgcaggcgggtgcagtaggattgtttttccaagcttcactccttgccgttgctgttgctgtgtattgtagctcttctctatcccataaaagcccactcttcttcttcttgtccatgatcgtaagttgtttcttcactctctctctcgaccagtaatatgcggttttggtgttgactaaaaggtaacaaacaaatgcaggtattatcaaggctaggtcacatgtcttacggcgttgtgggagctcaaatacttcaaaccggcattccatcatccaaggctaatctcatcggcgcaacggagatctcagtggcaagtctagctgaatcgcttatgctcggagtagccatagcggcgaatgacgcttcccatttcgggtttctcgcggttctgtctcttttatcagttgttgcggcctcattgatattctgcagattgctgagaaatcccactgatgaacaaagacgactcttctccttcgaccctctctcaaattgatttggagcttttacattgaaatatttgtatagtagtttcactttcagtgtataaattctttatataaagtaaagaaaaaaattgactttggtgtgaaaaattcaagaagtattccacttccaccattactactctaaacaaaaagtactaaactggctaaaccttagttatttttctaaaccgagaattaacgagataatttaacaatcgatttcaaaaaccagcaaaccgaaatcacccaatttttggtcggtttggttcgattttgttttctttcacccctgacgaagaaaaaaaaaaccctagtcacactcagataacataaacctttgacaacaaattttgatg

SEQ ID NO: 18586 - DNA, 3003 bp, Unknown
  misc_feature (1)..( 3003): 2750-1469P.txt file - cDNA_ID_1818523; gDNA_ID_1621156; Annot_ID_57024
tcaaaccctaatattttcatatttatcatacatgcccacacacatctaactttaaacttatgtaattagatttccatttttcaaataatatttatatttattttagcctaaatttagattttatgtacataaggcacaagcaaatttatcttgttaacttattaaaataaaacaatagagtagccgttcgattaggcctaaattcaatatatcaaaacattcaatcaattgaataacattttggtttggtataattaagaagcaagtttagatccaaaaatacagtctctattaaataggaaaactaccataatctttttaaggaaactaataattcatccctcaccataattatactaattaacttgccattctccttcgcctcctcttctagtcttcttatgattatttttcttcctcatcttgttttttttttttcagacaaaaacctagatagctaaacatgccttgtttgttcatcttcatagctttgcttctaagttcttgtattggaacgttgaaagcccttgatcagacttgtggcaacaaagtcgtgaacacaatcgtcgtcgaccaagccggttcaggtaagttccgtactgttcaagctgccattgattcggttggtgaattgaattctctatggatcaaaatcaaagtaaaacgaggtgtttacgtgtaagtaaataccaactctctactgtttttctttttccaattttagaactcagcgttcttgaccacaattttctagcatttgatttgtttcgaatgtaaaatattactgtcgttggtgtagaaataatgacctagtagcacttgacttcatcttaggcctctccacaattctacatttatactcaaataatttttctagtttcttcgttgttttggagagaattaaagcatagttgatatcattaaatcttgaattcgtgatgttctggttcatagaattctagaaccgtaattaatctaatttacaacgatttcgatggatttgcaattgttaattttcttaatagtaagattaacattaatagtaacatattgttttgtatgataatgaatgtataaaacagagagaaggtgataataccatataataaaccgtgcataatagtagaaggagagggacaaagagtcaccaccatcacgtataatggtcatgcagccactgacgtcagctcaactttcacttcatatccatcccatattgtcgtccgaaacttatcaatcatggtacgtaacggaacggaccaacatatcttttgacttatatactatattttgttacgtaacaatataattttgataatgataacattttatatgtttttgtggcagaacacttataatcgtttgactagtctaactaaagcaaacggtatgagttgggatataaagccagcggttgcgatttcggtttatggcgataaatcagcgttttacaactgtgatttcttggggttgcaagatacagtgtgggataatcttggcagacatcacttcaaaaattgttacatcgaaggtgctatcgatttcatttttggaagtggccaatctgtttacgaggtatgtatacttaatatctctctctattacgtacacttcgattttcaatggcaaaacacgaaaactgtacttgatcactatttacacaaagactgttacattcacagtacaaacacacttttataaaatctttgtttcaaaacgccctagaaaggagctaggcacagccacaccctgtactaaaatcagctttttgttctagaaaaagtaacatttcagtcattcaaataatagaaacaaacttggttaaaaccttgtttgtagcatgttttttcctagaacaaaactaaacatgtgacttgactagctaggaggactgattttttgtaagtcaacaagttgattttgagacaccaacgattaagatctatgtgaaacatgcatgaatcgtataaaatgtttgacaggactgtcatataaacgcaacggcaggagcattggcatcaaaagtgtcgtttgggtacataacggctcaaggaagaagtagcgattcggacccaagtgggttcgtgttcctacgaggtagtgtttcagggagcaccagtgtctatcttggacgagcctatggtccattcagtcgagtgatattcatccaaaccgatctctcttccgtcgtgcaccctgagggttggtactcttggcactatggtggatacgagtaagcacatctctaactataatatatcatatataccattatcaaactatatgtgataatgatgtttttttttgtgtgttaggatgagtttcacgtatgcagaagttgagtgtaaaggagcaggatcggatatgtcacgaagagttccttggattgataaacttcattctttttacactaaacaacaattctctatctctaatttcattgaccaagatcaatggatctctaatattcctcgtttttaaataaatcactttctcttttgttagattctagttgttttatgtaatttgtatttttcctttcttgttgaatattattgtctctttgaagtttgaactatgaagactttttattttcttaccttgtattcaaaccaaactgaaccgactatatatgtatgttttctcgtttcgattctggtacatttcgatcgctctttttatatgacttcggttttcatttcaattcggttcatctattacccgagtaaaccaaattgttattattattggttcattcattcattgtatttcaaattttgattctttatatttagtactctgccaattttcatcaaaattgcactaaaacaaaaacaaaaaaattagccaaattgtaaacgaatttgaaccaatatttggtaaaactgaaccgcaattccattcccagaattataccgaaccgttataaatacggttcaaagttcaatctcttcaactaaaaccgaacttttatctattcgaaccgaaccaacagacccaatg

SEQ ID NO: 18587 - DNA, 3003 bp, Unknown
  misc_feature (1)..( 3003): 2750-1469P.txt file - cDNA_ID_1818530; gDNA_ID_1621156; Annot_ID_57022
aaaactgtccaaagttcaataaaacaaattagaggtttttgttgtcgttttttgaaaagattgaggtttgttttacagtttttcgaggttaaactcgcatttgtattgttctcattaaaaaacgactattaatattattttattttaaaaaaaatttaacttgctttaaaatacttcaacaaaaaaaaaacatatgttttttttagagctaaccaacctcaagtttgattttttcattctgttgcgaatagagacatacagttcaactgtgaatagagtacggtgcggttcaaataagaacaaaaatatatacatacacatatatgtagagattttagttactattgaaaccgcaacgcattgtttggttcaccgcaccggactgcggaatttgtgatttgttcggaaaaaattacggcttgtcgttttttcaaatgattgaggtttggtgtacaatatttttattcaaggttaatcttgcttttctttttgtaatttggtgatttctttgcattttttgtcaataattttttttattttaactcaacttggtttaaattttttaaaaatatttcaacctgccacattgaccacaatgatggaggaggaaacaactattcattctccttctcttttcaaaaaacaaatactactataaaagttgaaaaagaaccaaaaacagatcccaatatatccaatcacagctgcacatctcgaaaatgtaacatgactaaattaaaccatcaccgttaattttaaaaacatccaacacatcaaaaacacatctgtaaactcgcatggaccacatcaatcctctcatgcccatcatttccgccataaaagctttaccttttttccacaattagccaggtacacactaattcgacactagtagaatcttacacacacacactagaatccacttcaatgccgtcatctatccgctggtggtggccgatccatttcacttcatctggatctgtaccaaggtggctgagttggcgtcgaccggagctgagtttattgtctgtggtggtcgacgacgttgtgtggaaagttgttacggcgttcgagtcggtggccttggtctccatgctctgtttcttcttcctcttttgtggctgcaccgtctagttttgattttacttaatctcgttaagattttttgtatttttttgtgaacggtgttttatcaccggaaagttttgaattgtttttttttctttttaatttttagctgcgtcaccgtgtggtagtggcggagaaatttatgttagtgattcaaaaggaggcgcgtgatgctcactcgagagttatgatcatttgtgtttagttttggtttcttttgaaggatgattatgttatgttaggttcgaatcttgtgaaccagaaaaaacaaaaacctatggtttctatattaagaaagctgtaaaatcgaaatcgtaatgggattttgaaaacggatattacatagttaaattgaaaatgcttttggaaattttaatcttcatattctgatttttcaacgatttttgaatatgtttttacttagcaacctaaagttatagaaccaagctagaaaatacatgacttattcaggcgattgattttggatttttcaaaatgtagaattttttatttgggcctgctaatgggctggttcgtttacatgaacaatcaatgagcttataggttactctcacttttactaagggacttatgggagggagtcaataaactcaaaagcaccaaaaagtttcgctgaggttaattctaacaaggaagatttgtgaagaagaagctctgataatggtgtggacacgactgaagcagaacgcgaaatcagttctaaagatagcaccactatctttaactctaaaccttactagagattactctaaaccaactttttattccggtagattgttttcacttgtctttttcacggacctaggtacagaatctcttagtctttaaaaaaaaaacaaatgttttcacttgtaattactttgttagattttgcttcggagacatgtcatggattaggaccgatttagccatagtgacatgcctagatagaatacgtatatctggtcttgtaggtttggaacataactaaaagttattaaattatagatgaatagtttcattgtattattaaaaggcaaaaacaaataaagataatgttgataatctttaacaacacaaaaaagaagaaaaaaaagtaatggcattcaagtttccaagtgcatgatgcttacactatccatcagagtgaaataagccgcgatgactagtggtaggattatagatgcacgcttttccgtatagattgtataaaatcaagccgcgatgacaaactatgtcgtttcctcctccaatccttgggataaccaaaccgtggtccttactagacgataatgataatgatagcattacagaactacccaggtactcgtttacgaaacgtatgtctacacgatgaggttgttgtggtggagatgcgaccgtaagataaaggttggttaaatatcgagaatggataagagaaactcagagcttagagacacacttgaacttcatcagtgatttagcaggcaatctaattggaatctcgatcatgagatccaaaggaatctttgccgaaaccaaatcgtctatttcttcctcttctcgtcgtatttgacgactttttcttccattggaaaaaaaatagtctgagctttagacatacacatacggcatacccatagctcaactacagtgtcaaggacaaaaccctaaacccacaaatctttgttacatttttttttgcaagggaacgtgataaaaaaaggtttaggctaatgggccaaagatgtaatgggcttagccgtttaataaacaatcgatgagcttatttcagaaaacgacgtcgtagtaaggaactcccatcagagaaacccaaaaacccaaaatctctctctctatctctatctcgcccgaggaaaagctccgataatg

SEQ ID NO: 18588 - DNA, 3003 bp, Unknown
  misc_feature (1)..( 3003): 2750-1469P.txt file - cDNA_ID_1818533; gDNA_ID_1621156; Annot_ID_57021
tgtgacgacatcaacagactacttgcacaatactggtggagtaatggtccggataagcgctcaatgcactggttgtcatggaagagaatggcattgccaaaacaggaagggggcctaggttttcgagacatagaaagcttcaatatggctatgttaggtaaacaagcctggcgaatccttcaatcaccaaatagtcttctctcacgactacttagaggaaggtactttgcatcaacttctctcttaaatgcagaaacaggcacaaaaccatcctttatctagagatcaattttggaaggacgagatttgcttaaaaagggactgagggttctaataggtgaaggaaaggaaacaaacatctggatagataattggttaccaacgcatccccaaagagccccacgatgtcttgaaggaatcactccaaacgtatcgcatgtgaatcagttaattgagtcacgaccaaagagatggaacagatcacttgtcgaaaacctgtttcatgaggaggatgctaggctaatacttcaactccgtctaactagtcagccatcaccagatttgcttggttggaattatatggatgatggtgtctatacagttaaatcgggttactggctagctactcatctgcctaataacaatccggaatttgacccccctccaggagaaacaaaacagaaggaagcgatatggaagatgaagacaacaccaaaatcaaacatttcctgtggagagctctcacaaaaactttggcgacaggctctattcttacttcacgaagaataacaaatgaccctcaatgcaagcgatgttgtgcagcggaagaaactagagaacatctcttctttggatgtatttatgcccaagccgtgtggagagccacgcatgttagcagaccggaatttttcaacccaaatctttcctttgaagcgaagctcaagatacttatccaaattcataacgataagatgaatgatcctttaagaagacaactaccattgttgacactatggagaatatggaagagccgcaaccttttagtttatcaacgacgaagtagtacgtgggaacaagatgcacacaaggcaaccactgatgcttttgattggattccaagacaaaattctcggcgagatactcgaacacaattgaatcatggctgtcctgaggatggatagcgcaaaccagaatggggttacaagaaatgtaattatgatgcaagctacaaacaaaatggggtagaggtgaatgtaggctggatattgcgagatgaagaaggttactacaatgaagcttcccacaacaaagctcagacgtgcagtacaattctagaagctgaattacaagcattactcatggcgatgcaacacatgtggataaaagggcaccggaaaataatatttgaaagcgataacagtcaaatcccaaaacttctcaaaagtgaaataaacaacttcggtcttcataatcttatacaggaaataagagtatggcaacagaagtacacgagcgtgaagatacaatggactgcgagatcaagcaataaggcaacggattgtctagcgagaactcggagacccaatgatctttcatttgtcaattacttccatgtaccaaactttcttgtagacatccttcacgaggattacacttcatctatctaataaaagaagttgctgttaaaaaaaaaaagttagagataggtaaagtgaatttcatattttttggatagtatttttgaattgcttcattttcgagattaacaagcttcttctttttttaacaaccccagagtttcatcaactttcaagcaacagaaacacatgattaaaaaattaataacatcaaataaagcatattttaaaaattaaacttttcatcatatagattcttagaatgtgattgtggagccacgttggatctccagggttagatataaatgaaactgtctatgccgtgtgacagcccttgcaactattcaattcaaagttgaccatacatgaaactatttcaagcaaacgacgcccaacatcaagtattcaagttgttgatattgtctaaaagattcaccatatataaaagccaacttcatggaatcgaaattgtagcggtacaacagttactagatcaccactttatgacaagcacactcttgacatattaatcaaacttggccaagatgatcccgagctaaccacacaccacccacacatctaatatttgactgttcatgccacacttatattgaccttgagaaaaatgaagagtatatcgactcggttaacaaaacttcaacaagacaatttcttataaaaaaataatcatagactgataaatttctcaaaacacttttcaatttaaacaatttcataatatgtgtatgttgacatttctaatacatgaatagattgatgctcattgaactttattgaaatgtaaagaagagataaatgtgaaagattttatgttgtcttcaagaacaaaataagtttcaattatgttttataaaatgttgaatgtggctgttcaaaaaagtagccttgattacattaatcaaagtcttacacaatataacataagcttacacggacttctctaatgaataatgattataacttgggtttaggatcctcttttccacctagaggcttttatattgttctacaatttaattttttttaaaaaaaaaaaaaacaggagcaaaataagatagtgtgtatgtaacataatttattgttgttgtaagacattacaaataaaaaaaatatgattgcattgaagaaaacaatatcaaatgacaaatacatagaaacaaaataataattaagtaaggcaccgagagtagaaattaaaaaaagcttataaaacaaaggaatctcggtcacctctcaccaactccaatgctcacttatacagaagctgagaagcagaaccgcttttatataatcgcactcactcagagaaacagagaagacgatagatagagaaaaaaaaaaaatg

SEQ ID NO: 18589 - DNA, 3000 bp, Unknown; identical to SEQ ID NO: 7667
  misc_feature (1)..( 3000): 2750-1469P.txt file - cDNA_ID_1818541; gDNA_ID_1621156; Annot_ID_57018

SEQ ID NO: 18590 - DNA, 3000 bp, Unknown; identical to SEQ ID NO: 9186
  misc_feature (1)..( 3000): 2750-1469P.txt file - cDNA_ID_1818549; gDNA_ID_2926128; Annot_ID_138673

SEQ ID NO: 18591 - DNA, 3003 bp, Unknown
  misc_feature (1)..( 3003): 2750-1469P.txt file - cDNA_ID_1818549; gDNA_ID_1621157; Annot_ID_57063
tcattcgtcttaaccaggcggaagaagaaagaaggtgctgctgaatcaccggcggtgaagtcagggaagaagcgagctggtgaaggaagcacctcaagggacatgcatgtcaaaagagttaagaaagaggacgataacaaaaaggcgaatcctcagagagtatggagtgaagaagatgagatctctcttctacaggcagtgattgatttcaaagctgagacaggtacaagtccttgggatcataagaatgcgttttttgatatcgccaagaaatctataagctttgatgttagtcatgtccagttctttgacaagattagaagattaaagaataagtattttgttaaccggaagaacaaaagtggtgaatcgaatcatgataagaaatgtttgggtttggctgttttgatttggggatctgatggtatgaacgttgaatctcctgtgaagaaagatgaatctattcttgttaagggtaaggctaatagcaaggagaagaaggtggagaaacctttggttatagaagatgagcaagtgattcttggagcagattcggagtggtttgaggagtcttttcttgttccggttatcgcgaatctcggtttggatgagtattctgtgaagaagaagtggagcaaggtgtctctggagactaagaagaagattcaagagaagatgaaggttgtggacgctaagaaatgtgagttgttgttggcggagatggatgttttgaaggatgtgacttcggtgcttgctcaaaccaactaagaagaagaagaagaagaagctatcttagggattgtatagggttaatctaaggatgtaatgccctcttttgttatctatcttagggtttatctttctatctacgtttatggatttttagtcttttggattctcgtgtgagaattagctataacaagattaagataagttgtctaacaaaccttttggtcgatggttgtaatgaacttttaggattttgtaaatgtgcttctttttttaatgtctctctactcaaaactcatgaccagagttattacaaaacaaagaaacacacaatagaatggattcacaaacatattcaacaagagttctaaatagcttatatggtgataggttcaacctcattaaacaaaatggattctgaaatgatgtttgtaaattgtatatttattgtttatgataattacgtgcagtttgagttattctggtgacactagttcctctttctcaagtaccaaatgcaaccaaaataaaacatatacatttagttacaatctttcacagaagttattatgtctataataaaaaaattaagagattctgcatcttgaaactgcaaagtaggtgaggaaataaaaagaaacataaattgtgtttatgagcatgcttgttgttagagtcccaatatgtagtagagtagcttgcaagaaatcagagttaattatgcgtttaagagcatgcttgtgtgtgtaagtgtttcaagtaaaactataataagtatgtgtgtttgtatcttgtaagagaatcacccaagttttattatcaagacatcatgctcttaaacgtgttcttgtttctctctaaagaaaacaaaagcaaaacagagtgacaagagagtgagagtgctgacctcaaaagaatgttggaagaggtagtttgagagtgaaagtgtgattttcaacagatatcttcctcacgtagaagaagttgaatggttaatatcaatattgttatgtataaccaagaaagctatagaattgcactatgatattgtgaagctgcagaaaaataaacaacagtaaagtacatacttgaacaagaaaatgaactttgttagtccgcgtacttgtcttaactcttatgcaggggtagccaagcaatatgaaacatttagtgtggcccattttttttttttcaaattctttaacaaaaattatttacaaaatggccccaattttattgattttaacgataattggccctaaattttaaaacctttcaaaataatcttggattttttgtttttttgtatgttgcccataaaaccgtcaggtcttaggtaaaacatctataaattaatattcaataaattaataaactttataaattaataaattcattcaatcccgagttgaaaccagtgtaagaattgatacaaatcgataaattaataaaataataactttttgtgaaaatcatatgtaaatatttggtcccatcaatattataaattcactaatttatatatatatatatatagatatatactaaaatatgaatatagtattcaatttgtattaattctttgtagaatttaattctaatatttttactaaatcgaaaaatttagttttggtttttaaacttgataattgtttaataattgtaattggtttcaaaaatattattgattataagaaaagaaaaaaaataccttttttgattgaatattataagaaattacataatttgtaaaatttctttataaattaatatctcttcaaattaataaattttatcaatcttaaaattattaatttatagagattttacctaatatgcatttttaactaaaagtcataatgttatatattttatttatatttagagaataatatatatattaaaaaaaaaaaaaaaaaaggttgacaagtggaaatatgtgaccggcaatagtaagttaagttgaccaaaaccaaaaccaataaaatcaaaatcgagagactctttcttcccccaagcgaagaagcgatgatcaaaattttacaacggttcctccattttcagcgaaggtaagtctcacctaattccttggaactaagctccgctgtgatccgaatgtacttatatatctctctcttctgatcaattcgcaaaccgccattgttgcttttttgaaatttcgcttctgatgaagaaatgttgatcggagaaaacgttgaagacgtttgaatttctttatgaattagtcagttgtggtgttagttagttacgatg

SEQ ID NO: 18592 - DNA, 3003 bp, Unknown
  misc_feature (1)..( 3003): 2750-1469P.txt file - cDNA_ID_1818556; gDNA_ID_2926128; Annot_ID_138675
tgttttgcttttgttttctttagagagaaacaagaacacgtttaagagcatgatgtcttgataataaaacttgggtgattctcttacaagatacaaacacacatacttattatagttttacttgaaacacttacacacacaagcatgctcttaaacgcataattaactctgatttcttgcaagctactctactacatattgggactctaacaacaagcatgctcataaacacaatttatgtttctttttatttcctcacctactttgcagtttcaagatgcagaatctcttaatttttttattatagacataataacttctgtgaaagattgtaactaaatgtatatgttttattttggttgcatttggtacttgagaaagaggaactagtgtcaccagaataactcaaactgcacgtaattatcataaacaataaatatacaatttacaaacatcatttcagaatccattttgtttaatgaggttgaacctatcaccatataagctatttagaactcttgttgaatatgtttgtgaatccattctattgtgtgtttctttgttttgtaataactctggtcatgagttttgagtagagagacattaaaaaaagaagcacatttacaaaatcctaaaagttcattacaaccatcgaccaaaaggtttgttagacaacttatcttaatcttgttatagctaattctcacacgagaatccaaaagactaaaaatccataaacgtagatagaaagataaaccctaagatagataacaaaagagggcattacatccttagattaaccctatacaatccctaagatagcttcttcttcttcttcttcttagttggtttgagcaagcaccgaagtcacatccttcaaaacatccatctccgccaacaacaactcacatttcttagcgtccacaaccttcatcttctcttgaatcttcttcttagtctccagagacaccttgctccacttcttcttcacagaatactcatccaaaccgagattcgcgataaccggaacaagaaaagactcctcaaaccactccgaatctgctccaagaatcacttgctcatcttctataaccaaaggtttctccaccttcttctccttgctattagccttacccttaacaagaatagattcatctttcttcacaggagattcaacgttcataccatcagatccccaaatcaaaacagccaaacccaaacatttcttatcatgattcgattcaccacttttgttcttccggttaacaaaatacttattctttaatcttctaatcttgtcaaagaactggacatgactaacatcaaagcttatagatttcttggcgatatcaaaaaacgcattcttatgatcccaaggacttgtacctgtctcagctttgaaatcaatcactgcctgtagaagagagatctcatcttcttcactccatactctctgaggattcgcctttttgttatcgtcctctttcttaactcttttgacatgcatgtcccttgaggtgcttccttcaccagctcgcttcttccctgacttcaccgccggtgattcagcagcaccttctttcttcttccgcctggttaagacgaatgactgcttctctgagtcatcagaagaatctgtcttagaattcacagcggcggaaggagattttagggttttagaggaaggaactgtgacaggatctttgggtttgctttcttcagaagaagacttaaagatctcttcagaagaactctcaacttcgcttgaagaagcggttgctggactttccaaaggagccattggattttcttctttcagattctcgggtatgagtaccaagtgggaactgaagggacaattttagggtttgtgagttgcgagactttttatttttttacactgtaacatctcttatatttaagaaacaattaaagtaaataaagctcaacaacaaaaactaattaagcccaacaaaataaataaaccatcatccttatatgtaacactgtaacatgggaaaaaaaaacaattttttgcccaaatgtataagaaatttgtataacaaaattcatactagattttcttgttgtaattcttggtatacaaaatgaaaggtttctttgttgtaaaacaaaaatatatgtactaaaagtaattttacaaagtcgctttatatttttacatttagaaagatcatttgatcaagtgggaaacctttattgaaattaacaaagtggaaaagattgtaagtagtgaaatttagtgtcatctatagacaaaaaaaatgtaaattagaatttaggaatatgaattcggttaggattagtcgattaggtttattgagtaaactcaataaaaattactgtagtaatacttcagtactcggttcggtttatagttaccgaactgaaaccaaacgattattctaatttaattgaagttaccaatttttatcttaagtttaattaaaattattgaaaaatatgaactctctcttacagtaaaccgacctgaaattggtttttggttccaatttgacaccaatattttatcttgaaccaaatcgaaatttatgctattaaaattgaaccgagccgaactttactttcggtctacttcggttcaagaaatttcaatccaatacatatgaattctgaaagtcctgaaccgaaccagagtgtttaaccacaataaaagtctcttcaatggtctcttcttgagtatatcaatggtctctcatagtttcaacaacaccaataaactgtcatcttcaagttggagtttattacactcgttccttcaagaaactgtaccgtcgactttcagatttagccatttaggacttctcaagattttgaaaatggcgcatcaacatttcttcaagcctcttcttcctggcttccacgcctccttggtactctctttctcgctctttcccttcttctatctctgtctatgtctctctgagaagctaaagatgagtctggttttgtatttgcatg

SEQ ID NO: 18593 - DNA, 3000 bp, Unknown; identical to SEQ ID NO: 7701
  misc_feature (1)..( 3000): 2750-1469P.txt file - cDNA_ID_1818556; gDNA_ID_1621157; Annot_ID_57061

SEQ ID NO: 18594 - DNA, 3000 bp, Unknown; identical to SEQ ID NO: 9187
  misc_feature (1)..( 3000): 2750-1469P.txt file - cDNA_ID_1818567; gDNA_ID_2926128; Annot_ID_138678

SEQ ID NO: 18595 - DNA, 3003 bp, Unknown
  misc_feature (1)..( 3003): 2750-1469P.txt file - cDNA_ID_1818567; gDNA_ID_1621157; Annot_ID_57058
tttcaaaaagcaagtcctctttgtgaagttaacaagaagcaaactatttatcagaataagcaacaatttcgtcatttgcacaagctgccacattgatcaccattgtccccttggtcgttgttggcactaatttacaacaatctctccgtggagcctacaaaaacatttgacaatttctcgtgaacaataatagaagactaaagagttctgaatagtaaattaacagcaaaaattatgtaccttgctccacctatccggagtaggctttttgtagacaaatatctgattgatctcggaaggatccgcgattccccattcacatttaggataccattcgtcgtgcctcaagtattggctaatcgtcgttgtatcagaagaagaagagttactaaacgcatgagagaaataaaacacacgaggacgctgacaatccgtccatgttaccggacgtgtgttgaatgcaagattagtgaaatcgctacgtaagtgccaatcattaaaagtgcgagtaggcacttccatcatccttgctggcatatacgtacgcgtgatttgaactgtgtatccccacgagattgacattgtccactgatgactcttatcatagcataccgattgttggacaagactcgctgaatcgagtttcgctgggatcattagcttctttaatgcgttgactcggtttgtttttgggaatataggatccactacgtctaggtgatggattgatactattggtgcttgtggatggacagataatagccctaagagattcccgtatacatcaaactgttataaaccataccataaaattaataatcagtaagtgaagtaacaagagtcaatgacaaatgaatctaatcacggattttaagttttactatttcacatttactttgtgtttttccggctgatttttctcggtaataacaaaactaacctgatggaatccaacttctttagtgagaggaacaccaagctcagccatacaagcatgaatccgatcatcggatccgtacaaatcggagtatctctcgatacaccgatcttgcatcttctccaaaaccttggctaatggataacttatagcaaaccctcctccaccgtacgccattccataagaaaactgatgaagattctgcaaatgactctcggacggagctccgatgtaataaaactgtttatgatcgtactttctcaaaaccctaacaagattttccgtgaaaaacacggtatcgtcgtcacccatcacaacccacctcacgtttctctccgcttccgttccgtttaacatcctcaccgtctcggacacgattctcgtgatcctgatcgctgatctgtgaccgttacggtaacggtacttgaaactcgacgtgtcggaagagattctgatctgaggcaaagctgatgaagaagaaacggtgtcgttgatgggtttgtcgagccaaacggcgccgttcatgactccgttaggtttccaccatgttttcacgtattctctacgatgcttccatagatctgaagacgcggcgattccgaagactatgtgtttgagctccgtttgttcctcaggtgtttgacccgacccgagacggataacgggtacgaggagagaattgggggatttagaaggtgaatatgggtttagaaaagagatgaaactgaatgagtataagagatatgagacgaagatcaagaagacgacgatggctgtgaaggaacatggagatgaagaagaagaataaaagggtttattagatttgtcgtaagaaagtgttttttgatctcccatggctctgattgacatagaagaagactagttttttttttgctttgtgagttgtgacagtggtggtgttggtgagattgaaggctttttattaagaaatgaaaccaagtttatttttttttaattacaattataatctgtattatctaatgccaaaaaggcaaggtttgtctcgatgctgtcaattgttaatttacatatgaaaattattacactactccgagaaatttaattaagacaacttaactcaaatttaagacaagatatattttgatgatgtctaaaataatcttatttagttaaaaaaaattttggatttagaaagaaatctcctttttatatttcccaatttattagagtcaaagctgtttttggaacattaattctccacaagaataaaaccataagatggaaaacgacatttcaacattaatgattacagtaattaataactgaaaatagcgtttttcacacaaatctatcagttttttttattgtagccaagtatttgcaaaatactccatcttaggatgatactttgtctaaagtcaataccttttttattggagtacaattcatgataaatatctcttctatttttagtggttgtatatattttgtcatttataagcagatttaggcacatattattttgtccaaaacatattgaatttgtaaccatatatatttgacaaacaccgtgattaattaatgattatatatatgtacgtagttaagtaaattcacaaattcacaactttgtgtgtgtgtgtttcttaataaggttttgcaccaaattaatcaaacttgcattaagcccaacaaatttgaatcattaggcccaaaaggcccagaagttgaaggtgactaaaacgacgtcgatgttaccgaataagaagcagagttgacgaaataaacctgtctcttcttcttcttcatcttctttccctctttgccaagcaaaatttagaattctttctttatctctcagcgagaattttggctaagaatctagctaccttcaagtctctccaggtaatatacaagttctatgatctcttcacattccattgacttcaatttttgatctggtccgccattatcgaaactctagcaagctcttaattagtgaacactgtgttcttcttcaattggttaagaatgtgattaagacttctaaatcctgatttttgattttgatttgtagatcaatg

SEQ ID NO: 18596 - DNA, 3003 bp, Unknown
  misc_feature (1)..( 3003): 2750-1469P.txt file - cDNA_ID_1818571; gDNA_ID_2926128; Annot_ID_138679
atccaagtcatcgatctgcagtgggatcttggatgctattgctcgccactgagcacgtgacttattcacaatcacctatatatgttattatacttcagggtcagattcaaacaaatgagataattaaatcattgcgagtgttaactcagtgtggcattatgaaagctagagcattagcttctgcaatatgaagatgaatagtgagaaacagataaactaacctgactcgaaaacagtgaattgggtaccaaaaccggaaatttttctgcattcaacaaagatgttgtcgtaagtcccatttcaataacttgaccttctacggatccagcctgcaaagtggggacaaggaagacactatatcttgagaaaaatatgagtgagaactgccaatatatttgcttgctctatgaaactaaataaaagaagagagcagaaaagaaaaaaaggttcaactaactttgatagtatcacccatagagaaaggccgcgagaattgcattgacagaccactcagcacattaccaaggatatctctggcagcaaatgcggtggctacccctgaaaacgcaaatcaaaattggtatgttatgagcaaatactatagaatcagtaggatatctaaaaatgttagcaacccctgaaaaagataagactatatgcttgtgatggcctctagaggcctttattttctgttgaatcctagcaattagcattataggctgagcaaaacgactaatatgaaatggagaacattagacagacctccaactccaccaactgtcaagatagattgaacagctacaccacatgcttcagcagaagccatcaaaccgatagcgaaaagaccaacagatgatactttgtctaaagtcaataccttctccctatcaagcccaccaaaactcttagccgacaacattcgggtaatcacattggtcttccaccgatataggaaccacacaagtgagagaataaccgctcccttcacagtcggggaaaagtattgagctgctatagttgttggcgccaccattgcagcactgcagcatatcacattcatcaagtctatctattttctacaacatacatgtcaaaggaataaagctagagagactcacatttgtgcaaaagcaatgaaggtcaccaagtaacgagcaggatcctctaaagctccccaaaagcttttctcataaggaacatcttcgttagagaagccaacgggaagcagtttagcggaactttgcatagcataagtgtgaaaccttctaagaatcctaggcatcacaacccaagcaaataaagtaccagtcatagtgagactaacaggaactataacatctttaagataagggttagagtcaaggaactgctgaacatgagggatcatctcatcagagacatctttagtcttctttgcagtctcagtaacagcatcgacactagtctgcaacacatctttagctttctcaacccaatcattcccattcccattcccatcaccagagccagtaacaccagaggctacaatacttccgaaatcatcagatttggagctgaaagctcgtgcgtacgaagaatggcctaagtaattgaaaggcttagcatcattatgcaggcgtatgttcgatgaaaaggagatcatcgaaggagaagcttttggtccatcaagaaggtttccgcaagtaaaggccctggcatgagagtttaggagaccagaacacgattttgcagtggcatgaggttttattgatctttgaattgacttgagaagcgataacctaactccggccattgatctacaaatcaaaatcaaaaatcaggatttagaagtcttaatcacattcttaaccaattgaagaagaacacagtgttcactaattaagagcttgctagagtttcgataatggcggaccagatcaaaaattgaagtcaatggaatgtgaagagatcatagaacttgtatattacctggagagacttgaaggtagctagattcttagccaaaattctcgctgagagataaagaaagaattctaaattttgcttggcaaagagggaaagaagatgaagaagaagaagagacaggtttatttcgtcaactctgcttcttattcggtaacatcgacgtcgttttagtcaccttcaacttctgggccttttgggcctaatgattcaaatttgttgggcttaatgcaagtttgattaatttggtgcaaaaccttattaagaaacacacacacacaaagttgtgaatttgtgaatttacttaactacgtacatatatataatcattaattaatcacggtgtttgtcaaatatatatggttacaaattcaatatgttttggacaaaataatatgtgcctaaatctgcttataaatgacaaaatatatacaaccactaaaaatagaagagatatttatcatgaattgtactccaataaaaaaggtattgactttagacaaagtatcatcctaagatggagtattttgcaaatacttggctacaataaaaaaaactgatagatttgtgtgaaaaacgctattttcagttattaattactgtaatcattaatgttgaaatgtcgttttccatcttatggttttattcttgtggagaattaatgttccaaaaacagctttgactctaataaattgggaaatataaaaaggagatttctttctaaatccaaaattttttttaactaaataagattattttagacatcatcaaaatatatcttgtcttaaatttgagttaagttgtcttaattaaatttctcggagtagtgtaataattttcatatgtaaattaacaattgacagcatcgagacaaaccttgcctttttggcattagataatacagattataattgtaattaaaaaaaaataaacttggtttcatttcttaataaaaagccttcaatctcaccaacaccaccactgtcacaactcacaaagcaaaaaaaaaactagtcttcttctatgtcaatcagagccatg

SEQ ID NO: 18597 - DNA, 3000 bp, Unknown; identical to SEQ ID NO: 7698
  misc_feature (1)..( 3000): 2750-1469P.txt file - cDNA_ID_1818571; gDNA_ID_1621157; Annot_ID_57057

SEQ ID NO: 18598 - DNA, 3000 bp, Unknown; identical to SEQ ID NO: 15309
  misc_feature (1)..( 3000): 2750-1469P.txt file - cDNA_ID_1818579; gDNA_ID_2926128; Annot_ID_138682

SEQ ID NO: 18599 - DNA, 3003 bp, Unknown
  misc_feature (1)..( 3003): 2750-1469P.txt file - cDNA_ID_1818579; gDNA_ID_1621157; Annot_ID_57054
ataactgtagataattcagaagacatttttcaaacacagctcactcacgacctctagtagtctactatcgaccactcaagcgagattgttacaagaaattgttgagattctaaaatcatgctcttgtcccgatttgttttaactaaaatcataatctatagatagtcagtagtgcaaagcaacacaaatgcaagatggtgaaaaggattactgacataatagtaaacaggtgttccaacaagatgtgacttcctcgaagaactacagcaacctcccattttcaccagctatagtaataattaagcaagagtagcgaacaacagtccttgaagcattttacagatgcactgccactgcaggaaaagagtgaactgaacaacgattacttgaatgcaacaagattaatcaaaagtactcttaagaaaccccaataaaaaaaaagtgattattacagtgttagtaagcaaaatgacaaaagaaaagttggtctgatggcaaagtcatccataagaaacacaaaggtatgggaagagtgaatagtgagaagaacattacgaaacaagattaatcaaagcagacttgagaaatcccaataacaagtgattattacagtgttaataagcaaaatgacaaaagaaaaagttgatctgatgccaaagttatccataagaaacacaaaggtatgggaatgttccttatgctctgttgtaatgtcccatcaatagctgaaacttgaatctatattctaaaacaacctctaggattcagtcaagttgcaatgaaaacagtgacgcgagcaaaagcatttcacacttgagccaattttaatcaaacacaacacaataaccttcaaaattggtaacatcattgatatgtaactctaccataagatcttctcataagaatagacgacaacatgaacacagtaagcacatctaaatcagaaactaaacaacactaaacagtacgcgaaccctaaaattgaagaagccgaaaagaccaaaaacaaaaagtacacgaaagccgactccgggaaacaaaaaaagagatggaataattaaccgatgagagcagtaaacgaagataacctgagatgtcgccggagaatttgatgttgtcgtgattctccggtgaagaaaagtgagaagaataaatgctggcgacggagggtttcgacacacagagctccttttctctagtcgaataacctcatcatagtaagtaattatactgtaatcctactttactttatttagtttgcctaattattctcaaatctcattaaataccttttaaatagtacgacgtcggttaaggatacgggctaatcattgggcttttgttttctgaaacatgggctataaacattttagaccatggtccattctacagaaggtcaaaccctctgtcgctatcagaggctattgaatattttgctggtaaggtctcaattctcatcatccttcacctgcctatgaatcttccttgttaaccgtaacctaatattgattgacttctaatcaaagtaatttaatctaccattttattatttcctctaatctaagcctttttcatataaaatgtatctaatagtaactttataagaaaaatattatacctttttcttggtatctttgttgtaaaaaaaaatacaaattaaatgcgagttcgattattgcattaatagagatagacccatctggcatttaatatggtggcggcggaataatcgctaacaagatattagttgaaaattttcaaatcattcggatagattacgtctggcattgaactaattatcctctataaattcaataatgacagaatttagtagatgttctaaatactaaaattatttaataatcttacatatgcaattttccatgtacgtgctgttttggagcgtttaaaccgaattaaagtactactgtaaataaattgaatcgaatttaccgaaccaaaattgaagaaaaaaaaaattaaatcgaaccgaaccaaaaattggaaactagtcgaataaatattaaattctataaccgaaatatctgaaataaaaccgaataaatacaaaccaaaatattttgggtaaaatatctaaagtataaatatatttttaaaagtgttaattatttctagactaaataactaaaaatacttgaaaatataaataaaatagtaaaaatatttggaaatatctaaaaatatttaaaaatattcaaaataaccgaaatattttaaatgaaataaccgaatggatactaaattttaaaatcgaaaccgaacagaactttcaaataaccgaatggatactaaactttaaaaccgaaaaaatcgataacggaatggataactgaacgccgagaactactattatatacaaagtatttagttattcaataaaatttgaaaccaatcgttttttttcaaaattaataattatcgaatttaaatctaaggaataaaaaagcttattacaaatcattagacaaaatgtaataaaaaaaaaggaaattatacacattaattatcttagcttgtcgagtttaaattttgttaatcagagaacgtcaagttgtacagctggcgtcaataaatacccaaaacagtcgtctttttcaacggagaagaaaaagttgaaaaaattgtaaagtcagtctctccgactcttccttccttccgtgttcaccattgctacacgttctccacgaactttccgatgcccagtcgtcggagacatagctacaccgtcggatctcctgcaaccacatcttccaattacagtaacactactttcaccgatcgttccttcccgacaacccctgcccgtacatccaccgacacaaccacctccatcgctcgtcgcatctccggtatcttcatcaactgcttcactcctcccgattccgtttcctccaactacatcgacaattcaaagtcctcttccggtatagtttgatcagtaattcttagattttagacttttagtggaaacagttgatgatg

SEQ ID NO: 18600 - DNA, 3003 bp, Unknown
  misc_feature (1)..( 3003): 2750-1469P.txt file - cDNA_ID_1818583; gDNA_ID_2926128; Annot_ID_138683
gctctgtgtgtcgaaaccctccgtcgccagcatttattcttctcacttttcttcaccggagaatcacgacaacatcaaattctccggcgacatctcaggttatcttcgtttactgctctcatcggttaattattccatctctttttttgtttcccggagtcggctttcgtgtactttttgtttttggtcttttcggcttcttcaattttagggttcgcgtactgtttagtgttgtttagtttctgatttagatgtgcttactgtgttcatgttgtcgtctattcttatgagaagatcttatggtagagttacatatcaatgatgttaccaattttgaaggttattgtgttgtgtttgattaaaattggctcaagtgtgaaatgcttttgctcgcgtcactgttttcattgcaacttgactgaatcctagaggttgttttagaatatagattcaagtttcagctattgatgggacattacaacagagcataaggaacattcccatacctttgtgtttcttatggataactttggcatcagatcaactttttcttttgtcattttgcttattaacactgtaataatcacttgttattgggatttctcaagtctgctttgattaatcttgtttcgtaatgttcttctcactattcactcttcccatacctttgtgtttcttatggatgactttgccatcagaccaacttttcttttgtcattttgcttactaacactgtaataatcactttttttttattggggtttcttaagagtacttttgattaatcttgttgcattcaagtaatcgttgttcagttcactcttttcctgcagtggcagtgcatctgtaaaatgcttcaaggactgttgttcgctactcttgcttaattattactatagctggtgaaaatgggaggttgctgtagttcttcgaggaagtcacatcttgttggaacacctgtttactattatgtcagtaatccttttcaccatcttgcatttgtgttgctttgcactactgactatctatagattatgattttagttaaaacaaatcgggacaagagcatgattttagaatctcaacaatttcttgtaacaatctcgcttgagtggtcgatagtagactactagaggtcgtgagtgagctgtgtttgaaaaatgtcttctgaattatctacagttatttgattgtgacactctacaaagtttctatttattaaaagtttgttacgcagtgtccagaatcttttgaagagcttgtcccttcaggaacccgtgctggtgtgggatcagcattcaccacaggcctcttggttgatataggtttggagacatctatacctgacaccttttgtgctcctgctcctcttccatatgatttgcttttggggcgaccacaatgcacagattctgagtccatcaaaggaaggatgagtggaagcagttttgaaacgctagcgacgtgtgaagatcttggggaatcagactgtaaaactctagccagctcagtcattctttcaccgaggaaatcagatttctcgaaacatcaaggattgaagatattggttgatgaagaggaggactgttgtcctatttgctttgaaggtaagaaatcaagaccgttgaataaaaagaactctttaactcttgtttttatgagagagctaaacagagtcgtggattgcactatgcagattatgatgttgagaatccaagactaacgacaaagtgtgagcacgaatttcacctctcttgtcttctggagtggattgaaagaagcgatagatgcccaatatgtgataaggtgtgtttcccgcttgagctttctttggcagatcgattgtcttgatgatcaaagaattgcactttactgttgggaattcgtagttagatcaaccattgatggttgcgtaattagggtaaataagtgcacaatttggcaactaactaacattctgtcttctttaacacaggaagttgtgtttgatgatcgcttgaactagcatcattactatcccctggcttgaaagtttgaaggtgtggcgctttgtttggttagtctactacataattagcatacatctattttgtttcttcctcacacactttaagtgttgggtctccacatttccacttagttttgtcgtattggttatgttcgttttgcccttgtgcgatcatatagatatacataacaattgtaaatattacctagcttcttgttcgttcgtttgtgatctccggggtgtgatagagaagaaaggaccaccatttcagtattttgattgtttgcatcttcaaaatcatgtccactcttgtcttgatccatgattctatcttagcaatattggttaatgccctgatctgggaatcataataagcatgattttgtttgtttgtttggttaaagaaagagagagattctattagatatggatatagtataattccatagtctaaagagaaactgaatattccaaatagtaaattgatccacatgcgactagtcttgtcgtgtgtaagatattaaaaagaaaatgattctttgattaacaccttttgtctgctgcataaagtaattaattagaaataattaagaaaaaggttaggaatcatttaagaagaagagaaaaaagatgtcatggctttgacttctagccacttatgtctgccactgccacctccctcttctcaattcctattctgcccttctctttcttttagttcctatcctgccggtgttgatgaatgagggttaatatagtaactttggcgttaggaactatagttccaaaacctttttctgaatgaatttactttttggaggtatgaagtcacagcttttacagattttatcttgcaaaaattctctccacatttcaaacgtctaatagttaaagagagcttttgttttttctttcccatgtctatcagtatcaccaccgagaaaatatcatcaacaccaccaaccaaacattaacccacccgagagtacccaatg

SEQ ID NO: 18601 - DNA, 3000 bp, Unknown; identical to SEQ ID NO: 7694
  misc_feature (1)..( 3000): 2750-1469P.txt file - cDNA_ID_1818583; gDNA_ID_1621157; Annot_ID_57053

SEQ ID NO: 18602 - DNA, 3003 bp, Unknown
  misc_feature (1)..( 3003): 2750-1469P.txt file - cDNA_ID_1818587; gDNA_ID_2926128; Annot_ID_138684
tcctcttcttcttctcctcttccttcttccaccaccatctgtacaaagcaaagttatcatcaaaggaaaccaaaccattctgagtttcaaagctattttccggcttggtttcttcagcaccaccaatggttcctccaattggtacttgggtatctcttacgcttctatgccaactcccacccacgtttgggtcgccaatcgaatccgacccgtttcggatcctgactcttccactctcgagctcacctccaccggatacctaatcgtcagtaacctccgtgacggcgtcgtttggcagacggataacaaacaacccggaaccgatttccggttctctgaaaccgggaatctgattttgatcaacgacgacggttctccggtttggcagagctttgacaatccgactgacacgtggcttccggggatgaatgtcaccggtctaacagctatgacttcgtggcggagtctcttcgatccttcgccggggttttactctctgagactgagtccaagcttcaacgagttccagcttgtttacaaaggaaccacaccgtattggtccaccggaaattggaccggagaagccttcgtcggcgttccggaaatgaccattccttacatctacaggttccatttcgttaacccttacactcccacggcgtcgttttggtacatcgtcccaccgttggactccgtttccgagccacggctgacgcggttcatggtcggcgccaacggccagctgaagcagtacacttgggatccacagacgcagagctggaacatgttctggttgcagccggaggatccttgccgcgtttacaatctctgtggtcaattagggttttgtagcagcgaattgctcaagccctgtgcttgcatccgcggtttccggcctaggaacgacgccgcgtggagatctgatgattacagcgacggatgccgccgtgaaaacggtgattccggcgaaaagagtgatacttttgaagccgttggtgatctacgctacgatggtgatgtgaagatgtcacggttgcaggtaagcaagagctcttgcgccaaaacttgcttaggaaactcttcttgtgttggtttttatcataaggagaagtctaatctctgcaaaattttactcgagtcgccgaataatctgaagaattcgagctcgtggactggagttagtgaagatgtattgtatatcagagaaccaaagaaagggaattcaaagggaaacatctctaagtctataattatattgtgcagcgttgttgggtcaatctcagttcttgggtttacattgttagtgccattgattctgttgaagaggagtcgaaagaggaagaagactaggaaacaagacgaagatgggtttgctgtgttgaatcttaaggtattttctttcaaggagcttcaatcagctaccaatgggttctcggataaggtcggacacggcggttttggggcggtgtttaagggaacattaccgggttcttctacattcgtggctgtgaaacgcttagaaagacctggaagcggggagagtgagttccgggcagaggtatgcaccattgggaacattcaacatgtcaatctcgttaggcttagaggtttctgttcagagaatcttcataggcttcttgtctatgattacatgccacaaggatccttgagttcctatctgtctagaacaagccccaaattgctaagctgggagacccgtttcaggatcgcgttaggtactgccaaagggatcgcgtacttgcatgaaggatgcagggactgtattatacactgtgatatcaaaccggagaacattcttttggacagtgattacaacgccaaagtgtctgattttggcttggctaagctccttggacgtgacttcagcagagttctagccacgatgagagggacatggggctacgtggctcccgaatggatatctggtttgcccatcacgacaaaagctgatgtgtatagctttggaatgacattgctcgagctgatcggtggtagaagaaatgtcattgttaatagcgatacactgggagagaaagagacagaaccagagaaatggtatttagagaatgtcttttacttggaatcaattgtaagagagaaaaaaacatatacattgaatcaatgaatcccttttcaggttctttccgccatgggcagcgcgtgagatcatacaaggcaatgtggactctgtggttgactctagactcaacggagaatataacactgaagaggtgacgaggatggcaacggtggcgatatggtgcatacaagacaatgaagagataaggccagcaatgggaacggtagtgaagatgcttgaaggagttgtggaggtgacggttcctccaccgcctaaattaatacaagctcttgtctccggcgattcataccgaggagtgagcggcacaagctgtagtgaaggccatggctgttcggatctcaatacaggtttgtctagccctggctcacggtcgtcttttggtagaccttctccttgatcaattttgtaaggtgatttggtcaaaaccagccttaaatgttttaagtgttgctctctaagagggtttaattagtttaaactgtatttgttggttgtatgatatttgacttaatcgacattaacagttaaaaccatggattatgtctttcttcttagtttgaaagttcttgtcactttgataatcttctaatggcatatatgtaaattcttacagaatgtattgtatgagaatcattacgtgattgaatcaataaacccatgtcgatactttaaactatatgaacggtcacaataaacccatgttctctcttcttctactccacggctaaccttaatcttaggcaaaccagaaacacaaattacaagaacaaacataaaaaagaatctcttgtcttgtctgctttcaatcctcatgtctctaatcctccccaagtagagaaatataaaaacttagacaaatattgccacaaccggtgaaaatg

SEQ ID NO: 18603 - DNA, 3000 bp, Unknown; identical to SEQ ID NO: 7693
  misc_feature (1)..( 3000): 2750-1469P.txt file - cDNA_ID_1818587; gDNA_ID_1621157; Annot_ID_57052

SEQ ID NO: 18604 - DNA, 3003 bp, Unknown
  misc_feature (1)..( 3003): 2750-1469P.txt file - cDNA_ID_1818591; gDNA_ID_2926128; Annot_ID_196768
ataaagaaaaagaatcaaattcctccatatcgttctgtatcgcctccatgtacgtaaagaaagttggtcactcttacggaaagacaccatttttaccaggtctgagcaatttataaggaaagctatttttcacttgccttgtactctattaaatactagggatgattcagcatccgcaaacagtaaatgagaaaccgcatgacttgcatttaccacctttatactaattattaacttatctatttatgctttctgaatattagcaatcagcacttttgtgcatagtacatataaatatgaggagagaggatcttcttgtcgtaggccgcattggggagtaattaagcctcttgattgaccgttaagtagcgccatatgttagactgatgtgatacaccacatcatccattgtatttatgtctcccaacaatccatttttcataataaactctcgataaaatttgattcaatctgatcataagcctttcatgttagtttttataaccataaactttcttttgtatgacgaatttgttcagagaccataaaacatctcttgcgttataagaatattatctaaaatcaatggtctttcgataaagactaattgtgtttctaaaacaaaatttatttttctattttctatttatttaattttccttctcatttttagttgtttttataatatactaagcgaggtagtataaatctagaatcctgaaccagcagtcaaatatcactatttaaagctaactatttaggtttaataataccttaggatattattaccatttacgtaaaaaagtttgaacctggaaaacatatatatctacgtagagtaccgaatattctaaaccatttaaaatattttataatgatcaaccatgattgaaatcaagtagaaaaacttgaacaatgatcttctagttcattttagttgtttcacttaaaaaggatttaaaaagagagtcaacattgcgttttaaatgcattttgaggtttggcaaaccatctacaagctatctgacatctacagactacgtacagttgtgttccatttgttacaattacaacaatcagcttgtttgtttttggcaaattaagagtcatgagtgtgtatacgaaattactttttggtggtctgaatttatgaatgcagttacactaacccttcttcaaaaataaaaatgaatgcggttatactaaactatcaaatatatctactagcaaatatgaaactacattcagtaacagtgatctctctttttggatacaagatgaaacattgttctcttctcatgctctaaatagaaaatactctacgaaatgaaaatgtatgtcatcttataagaactatacatttttactccgatggttaattctttgaaggattctcgacagtttagaagtctgcaaaaaatataatctcataagaaaaaaattctaagtctcttgatacaatgcatatagaaactgacaaataatcgaagaaattgtacttgagcccattacgactattgaaaattctgattttggatgaattcagcggaaactacaaatttaagagtactttatgtgtataatatgaagcctatatatatagaattactaatgtaataaaataagaaccggtgaaaagggggacaagatcacaaggttttcgcattcagtgcctttacagagttatatatttgatgatgttattgcttacttgcctaatagtactatactactatatatatctaaggtaacacatgtatatatatgtcacatagacattactagtatatattatgtacttctatcatatatttatgatattgcagttgcagcgtacacaagtcagctccttttgacttttacatctcatgaatgcattgccatgacatctaatcttactcgagatttgtgcatgcacattattcacttttgtcttttgcaatttttgttattgtaaaaaaaggaaaaacaaatgtaaaagagagagagaccagaaaggtctaactaaacctaaagagtcaatgaaatgtgtttctttcttgtgggattaatcaattcactctttaacacttctttataccattgaagaaattagatgaaagagtcacgagttgcttaccaaatccctcacaagaattgagaactgataaaccaaattgagaagattaaatatcacgtctccttttgatctctattataattaatcgaaaataaaaataagagttttcaacaaaacgtgatcattggtttacgatcacttgcaaagtcaaacctaaaacgtagcattagtacactaaccttaaatactaattatatcatgcaaaccctaatgtcattacctaactatacatgtgtaatgtgttcaacagatcttcttaacccacattagatcaatattaaacaataaaaagattcttatatattctactacttacttcttcttattcccatccatatttttctgtgcctttaggttctcaactaatctcatttaatttagctagcacacagagaaacacacacgtatataaataatatgataacacacaaaaagactcatatatataaataattagagtcattaaatgtggattcatcattaaatgaaacaactcttcttctctgtacaatttctcttcacaccttcaccaaattctttgacttcaaaaatcttataaaatttatatatctccaaaaccataaaaccaaaacgagttttcacaaataaattacttagttgaaatttcaaatctcattcaattagggtacactctctcaacaatccacattaatgagggttgctgcttctgatggctagcagtaacagttttatcgcctccacttcttaatgccatctttttcctcttccctctccttctctatatatattttctgactctgcaaaaccttaattcatccatctctcaaacaccatttttggaaacaccatttcatattccttaaacttttccattttagtatcatttcatattcattgatatg

SEQ ID NO: 18605 - DNA, 3003 bp, Unknown; identical to SEQ ID NO: 18604
  misc_feature (1)..( 3003): 2750-1469P.txt file - cDNA_ID_1818591; gDNA_ID_2926128; Annot_ID_138685

SEQ ID NO: 18606 - DNA, 3000 bp, Unknown; identical to SEQ ID NO: 7692
  misc_feature (1)..( 3000): 2750-1469P.txt file - cDNA_ID_1818591; gDNA_ID_1621157; Annot_ID_57051

SEQ ID NO: 18607 - DNA, 3003 bp, Unknown; identical to SEQ ID NO: 18604
  misc_feature (1)..( 3003): 2750-1469P.txt file - cDNA_ID_1818591; gDNA_ID_1972020; Annot_ID_178039

SEQ ID NO: 18608 - DNA, 3000 bp, Unknown; identical to SEQ ID NO: 7692
  misc_feature (1)..( 3000): 2750-1469P.txt file - cDNA_ID_1818591; gDNA_ID_1621157; Annot_ID_173564

SEQ ID NO: 18609 - DNA, 3000 bp, Unknown; identical to SEQ ID NO: 15313
  misc_feature (1)..( 3000): 2750-1469P.txt file - cDNA_ID_1818595; gDNA_ID_2926128; Annot_ID_138686

SEQ ID NO: 18610 - DNA, 3003 bp, Unknown
  misc_feature (1)..( 3003): 2750-1469P.txt file - cDNA_ID_1818595; gDNA_ID_1621157; Annot_ID_57050
gagaggtactcacctattggaccttgagattgaaagtcgtctgcacgtgcacaccaaccataagcctttgactctgaatctccactcctctcagtccactcttttttgcaggacccttgggtctcaaattccttttcaagctctgtggcagcagcaaacccactccagtcactgtcaaacttagcaataaccccaacaatcgaatcttgttcgacccaaaaggcattcacttcaacaggcttgaatttggaaagggtctgcagccaatatactgaatcaagtagaagctccttgtcatccgtttctttcaaagggttaacaacaatccccatccatggccagacatagacgttatgaggatttggttcagtctcgtctaacagaggaggaacaaccggagggcgtggaagaggttctgcataaccagcaagatcattctctaaaaacttagctaaagcaagatgattagacttctgtaaagcacttctggtggcagaacctttggaaacaccagtagcatgtgcatgcaactccttgtacttgtaatcttgcttcttcttgcctacacaaaaggggcatctgagccgtccattcaccttcaccttgtagtaagtctcactgcgtaaaaggtggtagggtgttttagaatactcctcaatctctgactcgctgatctcagactcttcatcagaaatgtccatcgtacctgctttacctggagaaaaagaatgttacaaaaacagagaagaagaacaaaataaggcccaaaagagactcaatttctaggcaatcccacgagcaagagaaaccctaggcaacaacttaacaaacaaaacaaaattgacactggataaagcaaaagagacgaaagtgatacagcatttacaaaattgagctaagagagtgacgcatgcatgataaggaacctagcgaaatcaaaaatatatttttaagtaacaagtgagtaaaggcgttaaatcacgaaatgcataggggaatcgaaaaaattcattaaacgagagatttcactgtgaaaacagagaatagaagaaatctggagcttacgctagagagggaaggaaaaggaacaacacggcgatgactcaacgcttgatgaagagtggagtagagagagagtgagtgaggaagatgaagagttattttattttggaaaatatatcagaaaaattagagggtgatttgcaagaataacacatttttatacaagaattaagaatatagcactattaattaacaaagtaatttaaaaatagataaaagagaaattttcacaaatagcataattttaagtttttttgacaaaacctattttatactatagttttttgacaaaattttaagtttttttttggacaaaattgatgaataaaacctatgatccaaattgtgaatgatttatactataagcaatatagtggccacaaaattggtcaagaatttttagtggctttatcaaatagccactgactggagatttttttttaaaaaatatgtgtctggtcaaagtatgtaattatatatctatgtgtaaaattgtatcataaaacattaaggtttccaggattatttttcttctcaaaatttaatatagtgactttgttttactctaagagcttatagtcaccaaagttgttatatatattaatatatgtctcattttttttttttataaaaagaatcaattatgagaaagccacttttgaaagtgacatttgttgattttgcaattttccatatagtttgtgaatttgccatttttagttaataatagataccagttaatacgtggatatagtcggttagatttgtttttaaaatttagtatttggtttaaagtacatattttgcaaaaacattttatatatacatacagttttaagtgttcaaaatgacaaatcctcaagattttagtaaaaactaatgacattgttgtacaattttagtgcttaattttagtattttagttattttatgggctgcactttagcaataaatgtctctttgttttcacttttcagcagttggaactttgaacaaatggaaacaaaaaaatgtagaagacaattttatttttaagcccatcaaaaatacaaatgagattgtaagcccaatatattaaccaacctacctttttcttttgtcagctctctctatttctctaaaggtgacgtcatcttcggcggtaacggctcagatattttccacaataacttccaataatacccctgccattaaccaatagtacccatgtttcctctttgcaacgtgggggtagattcatgaaatgagaacagaacggaggttccaacgagtagaagatgatgtgccacgtgtcactatatcgacccccctttcctcttccttccttccccaatagagagggattttcccgcttcagcgtctctcagtctctctctcggctttatccaaaggttccttcgtttactccgcttctatggaagaagcttgaatccttctctcttcttcttctccttcttcccttgacatttttgttctgagaagcaacatggccctcggtggcttgatttcaaatcggaacttcggttccttcatcggctcaggtatatctatccccctcctctttttgaatctgttagggctttttagttgtttatcggattatgttagtgattaggcttgagcgtagcttgcttctgtgtagcgaacgatatcactaatgtgtgcattgcttccaaatttgctaagattgctttactttgtaggcaatggttgtcagagacttggaaaaagtggtgcagaggtttccaagctttttccaaatggtatatatcggtatcttttatacctctctacctagctatattatgcaatttgtgcttaagcattttcttaatctttgtagcattgttgtgccgtaatcatcaacctctgcaagctagtttacatcatgaatcgggacacatgagaagaagttttggatgtttccttcaaccaagaatg

SEQ ID NO: 18611 - DNA, 3003 bp, Unknown
  misc_feature (1)..( 3003): 2750-1469P.txt file - cDNA_ID_1818599; gDNA_ID_2926128; Annot_ID_138687
acagaagaggccaacctcgccaatgcccatgaacgcccgcactacaagcaaaaaaggaagaccaagtctagcagcaataggtgtcataatagtggcaaaggaccaccagacaacaccaaaacctaaaacaaccttcccgccaaacttatctgcccatatacctcccagaatctatgtccaagagaagatgagctaaagttagaataaatataccctctctttcgagttctataaaagatcagattctacagagagtgatagtattagacctgacctgagtaagtaaatagccccagaagaaagaggactgaattaagccaacagttgcactactccagttatattcttgtgacatgggaagaattgcaatgctcatgttcacctgccacaagcatctctcattaagtaatatatatcttacttcttcagataagtagagaaaataagcaagatatacaacttacacggtccatattgcaaagaagaaaagacgaaaagcataacaagacgatcacccagcgtctaggaaactgctgccaccatggagatgcgttctgtagatttccttcaactaaaatagcttcagctgagccatcagccgatggcacaactccttccgtgatatctgactcctctgatttgtagtaagcacgagatctgttgatcttgatactgttcctaaacctaattacactgtccattcttggttgaaggaaacatccaaaacttcttctcatgtgtcccgattcatgatgtaaactagcttgcagaggttgatgattacggcacaacaatgctacaaagattaagaaaatgcttaagcacaaattgcataatatagctaggtagagaggtataaaagataccgatatataccatttggaaaaagcttggaaacctctgcaccactttttccaagtctctgacaaccattgcctacaaagtaaagcaatcttagcaaatttggaagcaatgcacacattagtgatatcgttcgctacacagaagcaagctacgctcaagcctaatcactaacataatccgataaacaactaaaaagccctaacagattcaaaaagaggagggggatagatatacctgagccgatgaaggaaccgaagttccgatttgaaatcaagccaccgagggccatgttgcttctcagaacaaaaatgtcaagggaagaaggagaagaagaagagagaaggattcaagcttcttccatagaagcggagtaaacgaaggaacctttggataaagccgagagagagactgagagacgctgaagcgggaaaatccctctctattggggaaggaaggaagaggaaaggggggtcgatatagtgacacgtggcacatcatcttctactcgttggaacctccgttctgttctcatttcatgaatctacccccacgttgcaaagaggaaacatgggtactattggttaatggcaggggtattattggaagttattgtggaaaatatctgagccgttaccgccgaagatgacgtcacctttagagaaatagagagagctgacaaaagaaaaaggtaggttggttaatatattgggcttacaatctcatttgtatttttgatgggcttaaaaataaaattgtcttctacatttttttgtttccatttgttcaaagttccaactgctgaaaagtgaaaacaaagagacatttattgctaaagtgcagcccataaaataactaaaatactaaaattaagcactaaaattgtacaacaatgtcattagtttttactaaaatcttgaggatttgtcattttgaacacttaaaactgtatgtatatataaaatgtttttgcaaaatatgtactttaaaccaaatactaaattttaaaaacaaatctaaccgactatatccacgtattaactggtatctattattaactaaaaatggcaaattcacaaactatatggaaaattgcaaaatcaacaaatgtcactttcaaaagtggctttctcataattgattctttttataaaaaaaaaaaatgagacatatattaatatatataacaactttggtgactataagctcttagagtaaaacaaagtcactatattaaattttgagaagaaaaataatcctggaaaccttaatgttttatgatacaattttacacatagatatataattacatactttgaccagacacatattttttaaaaaaaaatctccagtcagtggctatttgataaagccactaaaaattcttgaccaattttgtggccactatattgcttatagtataaatcattcacaatttggatcataggttttattcatcaattttgtccaaaaaaaaacttaaaattttgtcaaaaaactatagtataaaataggttttgtcaaaaaaacttaaaattatgctatttgtgaaaatttctcttttatctatttttaaattactttgttaattaatagtgctatattcttaattcttgtataaaaatgtgttattcttgcaaatcaccctctaatttttctgatatattttccaaaataaaataactcttcatcttcctcactcactctctctctactccactcttcatcaagcgttgagtcatcgccgtgttgttccttttccttccctctctagcgtaagctccagatttcttctattctctgttttcacagtgaaatctctcgtttaatgaattttttcgattcccctatgcatttcgtgatttaacgcctttactcacttgttacttaaaaatatatttttgatttcgctaggttccttatcatgcatgcgtcactctcttagctcaattttgtaaatgctgtatcactttcgtctcttttgctttatccagtgtcaattttgttttgtttgttaagttgttgcctagggtttctcttgctcgtgggattgcctagaaattgagtctcttttgggccttattttgttcttcttctctgtttttgtaacattctttttctccaggtaaagcaggtacgatg

SEQ ID NO: 18612 - DNA, 3000 bp, Unknown; identical to SEQ ID NO: 7690
  misc_feature (1)..( 3000): 2750-1469P.txt file - cDNA_ID_1818599; gDNA_ID_1621157; Annot_ID_57049

SEQ ID NO: 18613 - DNA, 3003 bp, Unknown
  misc_feature (1)..( 3003): 2750-1469P.txt file - cDNA_ID_1818610; gDNA_ID_2926128; Annot_ID_138693
ggaccttgtgctcaaatttttgttttcagaaaatttaaagtgttagttacaaacttttaaaattttggacccttattgcaaaaatatcaaaaaatttagatcttaaaaccttgttaaaattagaaaaaaatggtggatccagtgctttagcactgcctctaagccgagcctgcttatacatatatgcagagaattttgcactatttgaaacgcaccgcattgtacagttcggtcaccattaaattgtaaatgatataaattgtgataataatacggtttagatgcttagaaactccacgttaagggaaaaattgcttacagtgtcactaacttcgtcagtggtttgtacccaaaaaaaaaaacaattcctcagtgggagagagtttatgtcgtcaatatctatttgtcggtcgataagtgccaacctcaaaaaacaatgacacgtttgtatcaatttctgaatcttaatttatactataaaatagtgtatacgtttgtacgcgtgctattgatagataagtggtaactatgtgtgttttgtgtatgtaaatgtataactatggtcccgtccctgactgaattaagttgcttaaagaaaactcaactcaagtaactgagcatggtcaagatctattcgattaaattttgatatatataccaaatggtttcgacttttgctaattgctatgccacatgaatcagacaatgctagctaattatttctgttgtaccataaagtgcttggctttatcagtaaaccccacataacaacattttgcttaacggaaactttaagtacgagttctaacattcaattatgctctgtttgattagattcaaacaaataaatagtttcttgatattgtaaagttctatttgtgtatttaatatcatatataagttttttttgcgattcaaactcgagttaagatagagacgattgacgtgacgttacaatatatgcacacgagtcacaacaaaatattatatctataatcgacggttgaaacaagaactctagctaatgttttggttacactcggttttcggacatggtttagaaaagcacaactcttccttaagagaatgacaaaacgtcgtcgttaactttagattaatgacttggtcaatgaaaacaatcgcatttggtgtaataatctcaaatactacgtgttctccatattccataaccagccaagcaaaagcaccaatgaccaattacgtctctcctctttggccgcgcccactcaattcttataatttatctatttgcaccctctttctctaaaaagttacaatttgacccctatagtttcactttcacttattcttataatttatctatttgcacctttttcctctaaacgttacaatttgacccctatattttcacttttattcatacaagcccattttgtttttctctctgctttcatgctcgcagacaacaatcctcgtcactgccatgtctcaaattcagagctttgagagatcaattatttaccggtgaggctaatgatgaaggctgttgaaaaaatctctgcaaaatacttttcttccatgtaaagcttctaactttttctctctctctctctctctctcctctgttgtttctgtagagaggaatagaagatgatgggcccattttccaactgtgattgttctctttatatttctttctcctgtggaggctagcaaaggccacgacgttgtggttgtcaaattggcataaagttttccacttttttactctgattttttctcccatttctctctcactttttctttgcctttgcccaattcagagaactaatggctttgtcggtcatcgatagataaacaaaatttaatctttatctctctctttctcttgtttgtcaaaagatgcccaccaacacagaaatgaggaaaaaaagatctcttttttatttgaatgttgaacagtaagaagaaggtttattctattctattgggttgggttgttcatcaactttggaaatttaaagatgcattttttatgatccttttttctccgcctttgttgttgatttgatcgtgtatgattacggaagcttgggggggtttttatcagacagaacctggaaaagttgtcagatgaaacaatgtggcttggagattggatcatcaacttttcctctgttttcaactttataagctatcattttgcttaatcttcttcattctcttctctcggccttggctttgaagaaatctcaattttcttcttcttcttcttctaccgttttgtccggcgatcagagctggttcaggagaaaccttaagtcttggtatcaaaagaaagaaagttttggaatttacctctgctgctgcaacttgcaacactttttttatatatattggatttttctatggctttgctcaaacgtaagcaaagcagatgaaatctagctacaatcgctgttgcccttgtatgaagtttggaatttaaggaattcaggagaatctaagaggtactttcttgtactttcctcttctgtctttttccaatagggaaaggtatcttatttgctccattagtctgtatctctcaggctttgtgttctcttagttctccttaatctttgccttattagttgaacaagtaagcaaattataaaaggagtttgctttagggaactggtagaggatcctttacttcttacttgttatcttaatttatttctcaagaattccattgcagtgtttaggaaggctaattctttcttctctttttaagtactcctaagcgtggaaattttttggtcttgttctcttgttgtttgttactcaaggatctgagattgttgtccataagtagaatttaccggagttgtaatttctatatctgaaactcattattgtaccgttgtgtgtggtgtgtcttatagtttgctgcttaatagttttcttgttcttcttcagcatttctaaaggggcaacgttatagaaggttaggaaggagcatttgtatagaaagtcatg

SEQ ID NO: 18614 - DNA, 3000 bp, Unknown; identical to SEQ ID NO: 7688
  misc_feature (1)..( 3000): 2750-1469P.txt file - cDNA_ID_1818610; gDNA_ID_1621157; Annot_ID_57043

SEQ ID NO: 18615 - DNA, 3000 bp, Unknown; identical to SEQ ID NO: 7687
  misc_feature (1)..( 3000): 2750-1469P.txt file - cDNA_ID_1818614; gDNA_ID_1621157; Annot_ID_57042

SEQ ID NO: 18616 - DNA, 3003 bp, Unknown
  misc_feature (1)..( 3003): 2750-1469P.txt file - cDNA_ID_1818614; gDNA_ID_2926139; Annot_ID_138932
tagaagacgacaattttttttatttgtttaacatgaatctaaattatacttgagactatagaaacaaatagaatttatacaagaaaaatgtacttaccaaaaaaaaaaatatatatccaagaaaaatgttgaaacaattactacatactttgaagattgatctaagcaaatattgatcggatcatagtaatgaattcgaaatctaagaccatacaaaacatgccataggaagagctttaaaaatccaaaaagaataaaaatctgaaaaatcccaaaaaaggaaataaaaatggattcacaagacgaaacccttgttgcatagcatagcatccaccatcatgtcaaaactagtctaataaataaaatactattttacccatttagcccctaggagcttaggcaagagaacgcaaggacagaatcggaaatataaaccagaaaaggttaagattttcttaccagaacagtgtgtgttagatcgaaattcgatcgatcaatcgcaaaaaaaagagagtttgttgttgttgttgcttctctgcttctattcgattattcttcttctatttagtctttgtttggtgtttgttctcttccttcttcttctttcctcagagcacacgataactattttcacatcccaaactacggaatcacaaaaatctgcagataaaggaattgtttttacacagcagagagagagagcattcgttgtcctcattacaccaaaaaagtgcacaagagaagagattgaaaaagaaaagagtcaaactttaacaaagcccaagactcttctttgcttcttcttcttctgggccttgttatttattgcttcttcttcctctctgaatctctctcgcgctctagatttcccctttattggaaaaccctcaatttctataaagttccaagctttggttctgttttcgtttaccaaatctctcccttgattcgtcgaatctcgtggttcttcgagtttctctcatcagggtcgaggtcgaattcgcggaatttcctgtcaaaaccctaactttgattcgactccggattgtggggtcatctcgagctcctattggttagttttcgatttgaaaccctagcttttatttattttatcgtacggattaatatttgtttgcgtagttcgatttggtatatttgatgatcatggtgattgttttctagctcagaaaaggatttagttttagcagatttttgtttgcttctatctggatttgttcttctctggtatgtatgtagcttgacgcagtgtgttttcaactgggaataaatacttccttcttcgataaagcatctaactttaattcagattctgttttgtgtatagaaatattgttcatgatgattatttgtatgtactagaattgtacttccacgctttcatgttttctagtttggttgcttgattagggttggcttatatttactcaagatacttatcatgcaaagctcagaatttcactttaagtgatgtatgttatagataaagtttcaggctaaatatttgaagagaatgtggaacgtattaggcgatttgaactatatgactgttagagtaagcgtaatgagctcttttgagcagctgatctgtgatatgattacagacaactaaatttcataggaatatatgagaattaaagccgagtttcaaaacttctattgcacacacaatattgagactatatgtaactttagtgttttcttcttcttattcagtgtaaattcaacaccaggggtacttttatgtttcagggtttacttccatcaatggggttgcgctgtcgccagtgctaagttttatgctgtaaggagatattgaaaataaaagtggaagtccatgaaaaagtttcttatggtgctagactgtggattggtgcttagagtttattgtggtatgttgatgtcagaaccagtatgctggatatagttgggagaaatgcaaaggtatcatgctgccaactgcactagtgcagtcaacaatagtgctataggtggtgcatccgcgagggactcaggacgagctgattcctcttcgattggaaactattcactaaactccaggcatgttgatagaaagaagtacttacatagttattttatatgttgatacatttgaagacgtttgaatactttctttactgcaggagaccaccaccgttgacaccctacaagttgaagtgtgaaaaggacggtctgaattcccggtaattcctctttcaccttatccctagtttaggtattcgataaacacaatatagatgattttaaattttgctgttttagatttgtagcttgggatttcattcttttatctccgataggctaagtccttggagtacttgttaatggatgaagttggcactcttttccatttttgatttacttccctagatgatttatactttttctctattgcagattagggccgcctgattttcatcctccaacatcaaattctcccgaagagaatctgaccaaagagtatgttcaatttggatacaaggaaactgttgatggacttaaggtgcgatcaactgaatttagcagctatgcttttaatttttttgtagtatcgtagttaattatcattgacatgtttgcaattaaaataaatatcttagatcttattttggaccatgcctatagtattttcctatagatgctcagcagtaaaataagaatagtttcttactgaggctgaatgttcattgtagcttgataggttgtaatgatgatttcttcaatgtagtcatataagatgcttacaactcagaaagtctacattattataagtttcatcttttccgatgttagagtttttaattccttattccactagttttcgcgcattatcttgtaattgaggttctgaacctttggcctttacaggaatccgaagaaattatattgtcccaggtccatactttctcaaagcctgttgtccataagtgcaaagaggtacggtactagaaattatagacaatg

SEQ ID NO: 18617 - DNA, 3003 bp, Unknown
  misc_feature (1)..( 3003): 2750-1469P.txt file - cDNA_ID_1818653; gDNA_ID_1621158; Annot_ID_57071
ccactatcttcggatagagcagagaagatcgcggctttatttcggacaagcaaaaaggttgtgatatggattacgactaagattgatgccacaaatgtaacttggagcaatttcttcacaatatatatatcgaaccttgagcgaaatctttcatgtaagagtttcttcacaatatatatatcgaaccttgagcgaaatctttcatgtaagagtttcttcattgacatggagaagaaagttgctatggtttttgataaagaaaaaggaaaaaaagtcgctcacaacattattaatatcattggagaggctggatgcgtgaggaaattggttcttaaagaatctggagacaaaagctgttggccacttgtgtgctcttatgttccaagtacagtgcaaatcaagcaacataatagaggcaaaaggcaaaaaaaagtgattaggaaaggcatcgacattgatatgagacatgataaacgtatcaaggttgattagtctcaatttacaaagtctatatagtttatatgtttttcacttacccgtttaacttttttcttcccatctattgttctatatggacaaaattttcatgttttaattttttaagttttacaaaaccgctgtgtgatctattaaatgactagttttgtcgtctgaaatatcacatccgtctccggcggtgtggttgatgcaagttgcaagtatagaagaatatgtgtacttgtctcttactctgcacttgatgagattgtgttgcggcttctgactacatgtatgtggtttattccttacattgtttcatgatttgaaagtaggttatggatgtgttatggtttgtacggctacactttcagacatacacaaaatattacgaattgatctcatggcacatcactccgtcttcgagtcacctctatgtgtatctagtagctttctcgttatgattgtttttcttcttggatcagttttggttgctcaatttaaccttttttctagagaacattcaactaggaatctcactatcataaaatcattaaaggttttgttagttgtagtatgttatggatattcacttgcctgtagagaacaaacattcaagttgcaaattgtgtatatgctttacttttgaaacttgcatgaaacttttgtcatggcgtgtcagtacatagagttgagtaatcatggctttgctatatttgccctgatctacgttgaagtttccatatagtatctttttttcctagtcaaaagttggtttttcactaataaaaatttatgcagatagagagaaaccaaactgcactaaacgagcttaaccatgcattagaagatagagatatatactcgatttggtatgttaaggaagcaaccaactttgaacccatatccatttttctaataaactacgtacatgagaatcctcgtagcaacatttatagaagagatacccaaaccatgtgtaacataattaattaaagtctaaagacagcattggaagagattacacacatgagtatccaaaacgaacaagctgtcactatccaaaacaaacttcaagtgagaaaagtaataaaacatgaactaaaagatagtttaagagattgttaaagcattttcttgcagagttaggttttctcctgatcccacattgtaattaatgatgttgtacatgtcctctaaaaatctgtttgctggcattcgaatctttgcagctatcttttcctacaaacaattgcctagttttctgataatgacggcagtgtgatcttaatgacacaatggacgccgtcacatttctagagtgctattagctagggaatggttattaactttctcaaactttgatcaaggaactatgttttgccttttcttttgatgtaagttgaaatgatacatattttctcacatatgggctaccaaatcttttcttatagttgtcgaacgtaactaaacatatgctgacacagttgtataaataattttacgattcacgtttctgaaaatgttagttagtattagcctatgataattaactatacttcgctttatgtaaatcaaaggccaacttttttgaatatctatatgtaagaataaattacagctattaataaatacgagatgtaacttaattcagaaatgttcacacacatatggaacaagaagatttatccctgaaatagtattcacagtttggatcttatacctttttatgtaaaagaaaagattcaaacaaaaatctttcttatacaaataagattcaatcaaacatatattcctggaagttttgaacataaaaaaatgatttacaaaaaaattctcctaatttattaaaactgaatatttaataacataaaatctcttataatttatgtatatacaaaacaaattccatgatattcatagaatctcataaggttagattcttattataaaaagtagacaatctctaataatttatgtgtcgtgatattaattagaaatctctaataactcaaataggatattaatctaaattcgttgacaaaaatagatagagaatcattgttattcaacgcccaaaaccaaagtcattagtcaatgtcactcgtgaaactatccaaagataagagtttatgggattcgctaatctattacattaaagccacgtgtcttaatcttagatgttcaatagacttgccacgtcacacattgtctctctcgtttctcaaatcgcgtttcttctggtggaggtcaaactttttgattagcaaataaaagtcacacaagccgaatccaaaaatgtaacaagaaaaacaaatcttcacaaggcaaaaaatccaaaattgagttttttttttcttcattttttacaatggtgtctcggtttcgtcttgctctagagtacttctaagtctctctgttcttacttcgatttcgatttttattctcttttttttttttttttgaagacggatttggttggtggtttttagggctgttttgggttcgagacgacgtaagaagatg

SEQ ID NO: 18618 - DNA, 3003 bp, Unknown
  misc_feature (1)..( 3003): 2750-1469P.txt file - cDNA_ID_1818661; gDNA_ID_1621158; Annot_ID_57068
aaaaagaatataaaattacaaaaatatctttactaaaatttactaacaatttaaaaacatttctatttaaaacaaaaattagcttctttttttgttgtcgatatcaaaaaaattggttcacggtttttttttctttttcacgaattatattgatactagataaggcccgcctaaataggcgggtgtatgatataaatttatttaaatattaacagtaatatttaaactttatatagtaaatagtaatcaacacactttttctaatatttaatgtagtaatttttgtattacataaaattttaatcatacacattcaattttacttatattttaactatctatttcatcataataaactattttgttatttataatataaaaactacattcggacactctgtgaaaacgacatcccgtttgtatcctctaacaatgtcggacttacaactgttggacaaacatcaaataaatataaaccgagcagtaattaaaacgcatagtttgctaatccatttactatgcgattagctttactatacacatgagtaactcggactatgcagtccctatacactccatcttattaatgatatttgaattttaaatagtaacgtaactctcatactttttcagtatgtaattttgtatttttttaaaccaaatttcaatcttacaaattcgattttgcaatacaatttaaatacctattttatcataataaaatatataatttaatgatatacactccatcttattgttagtttttttatataatttaattatatacactccatcttattgttagttttacattttagataagaaaattgtaagttaaatatttagatataaatatattaattagtatatataaatatcttttttttttagtttcctattttcttttaggaaaaagtaaaaaaaaatcaaaaacatgtcaaaatctaagatcgttcaaataaccacgtgtcatgatctcgtgagttagtaactttcaaaactgtactttatataataagatttgaatttcaaatagtaacgtaactctcatactttttcagtatgtaatttagtatttctttaaaccaaatttcaatcttacaaattcgattttgcaatacaatttaaatacctattttaccataataaaatatataatttaatgatatacactccatcttgttgttagttttttatataatttaattatatacactccatcttattgttagttttacattttagttaagaaaattgtaagttaaatatttagatataaacatattaattagtatatataaatatctttgttttttagtttcctattttcttttaggaaaaagtaaaaaaaaaatcaaacatatgtcaaaatctaagatcgtttaaataaccacgtgtcatgatctcgtgagttagtaactttcaaaactgtactttatataataagattagattggaaacgttacaatacacatgagaaaataaaagtttaaacttcaagaagacaccatgctcgacccataacctacgacaagataaggaaggaattttccgataatacattgtaaaaaccaaacaaatcttgtctcgagactaaacgaagctctcgaagctcaccataaagacttcccgcacaacaaattatgaagaggggcttcttcataacttatggcaataacaagatagtggaacttggccttctcaataaatgcttctttttcaatgagtgcctttgtcaagggtcttccggatgaaccgtaagataatcgagaaccacttagacgttttaacgccacaacgatcaataaattaagcaaaccatcatctgctacacgatgagagaaaactcaaatataatcaaagtgctcaaccccaaactaacaaagattaacttagtcgggaagagaagattagcccaaacaagggagacggaagtccaaacgagggagacaattaaacctaatcctctgatgttaccatatctcacagagacgaactgatcagagcaacaagtcgacacaaaagaggaatacatgagagacattggagataccgagatatcgaggaggcgatccaatgttgcacagatgcagctttgggagaaaagaaacgagccgtcaagagagaagcaaaagcctccaaagtccgtcaagactcagcgaagagaaccacccgacaaagacgacgttgtgactccactctgtgaccaccgaacaagaacgatgacccaagaacacccttgaccaacagatcctatagatctgagtaccaagacccaacctcattaaatctgccccacaacacccactattccaaaatgtagagcctcgatgcttccacaaacaaagaatacaaagacaagaaatgaaaaactatgcagagaaacaaagaaggtgactgacgctggtgctatttgagcctccacgcgctggtcactttgtgttaaagcaggaagacgagagaaaaaaatattattttaggtcaaccttgtcgatttttgcgatacttagagcttcgatttttagggttaacggttcacctctgctatattttttttatcagaattcaactccaacaaactaaatcactttccgtgataaagaaaagaaaagtgcaaaaatttggattttgttgatccaaaataaaatacaaagaactgaaatcttaaaatcatatactaaactagttgttatttgtaaatttcttataaccctttcttacatttttaaattaccctacatataactttttcttacatttttaaaatatcctacaattatctaactaaacacccaaaaatatttttaccgttttatgttatcaacttatcatcgtgtccgacaaaaaaaaaaaaacttatcatcgtgctcctttacatttttcgtgacctaaaactgctacgacatcgttttagtgacttacttgctaaaaccctttttaactttctttcaagctaaagacctgcacaaactctctctcgaattcttttgtttcgaagccatg

SEQ ID NO: 18619 - DNA, 3003 bp, Unknown
  misc_feature (1)..( 3003): 2750-1469P.txt file - cDNA_ID_1818665; gDNA_ID_1621158; Annot_ID_57067
tatgtcagtgaaggagctgcatttattggaacatctagagattttaaccatagatattgtgtcaactatggttttggagcaaatgattgacgctggcactttgatgaattgtatgcaagaggtatctattcgttgtctcatttatgaccaagaacaagacacaaagttacgtctgccaactatggatagccttcgtagtctgaccatgtggaactgtgaaatttcagagatagagatagagaggttaacatggaacacaaatccaacaagtccatgtttcttcaacctctcccaagtcattattcatgtttgttctagtctcaaggatttgacttggctattgtttgctccgaacattacttatctcatgattgagcagttggagcagctacaagaattaattagtcacgcaaaagccaccggtgttactgaggaggagcagcaacaactgcataagattattcctttccagaaattacaaattctacacttgtctagtttacctgagctaaagagcatctattggatttctctgtcttttccatgcctaagtggaatctacgtggaaagatgtccaaagctgagaaaacttccattggattctaaaactggtaccgttggaaagaagtttgtcctacaatacaaagaaacagaatggatcgagagtgttgaatggaaggatgaagccactaaactccatttcttaccatcaaccaaactggtgtatatcctctcctagctccattctctctctgtttgatcaaaacaaataatataaataatgtattagcactaacgaaatcttttctttgtcagttgatttagctctttggttactcctaagacagcctgtaggccgtaggacaagccggtttttcaagaaccatatcagacgacacaaactgtcttacactatgaacatcaagcaaatgtaaccaactttctgttttctttcctaccactggattgtattttatatttcctctcccaccgtctcttttgttctgcaacttttctttatctttcctatttttttcaaacaagatcttccctatttattacagtcaaatctttaagtgatccaacatcaattttcttccaaaaatttaaaaatctatcccggcctgcaatttctttcactatgttaagtcttatgacaagtatctataaaacaccacgtttaaaactactgtttaagaaaatatacaaatcaagtcaactattaagacatgtaaacataattgaaagtttaaaactatcaaatcacatgtgatcccagattcttcacatggtagctaggcctaggctcaccttctaatagaagtagcaaatggaatttatcaattatgtgatctcagatcccatacatattattattataggatctcgaagataaagtaaacagagagaggtaacaaacataagaaaaaatctattagatttagttggtgaccaaatgatgttagtcaacaagtggttatcaatttgcttaacacatttttttcttgtaaactgcaaaatttgcacaaactaatttcttgaccactccggtttaagaagattggtttgagtctttgtctctctgagaaataaacaagaaaaggacatgaaaggtattcgatctgccaacgtgacattgtgagaatgggtaatataaattccaaataagattctctcttaatttggattatcctcctccatatgtaatataatttggaatctcgtgattgcttttttttttctatttgtaaggtttcatttagaaacagaaataatttgcatcccaacttagatactactaaccttatatgggcttatttggtagataggcaaaacttttacaaaaagttgtaaataaattatttgtcttacatgctttaaataaatattaaattgtatgttatcgaatagatgataaatttgttaaaaacttaaaatcgtcacaaagcccattgttataaaatttaaaatatatatttcttccaacttagggggtgttattggttccaaattataaggaattttgatgatttcaatcaaatcctagaaagtaaagaaatgaaagattttaaacgattgttagagagtattttataatcttgttgattagtttttcataatcttgtaaagtttctctaacaatctctttattttgataatacttttcatgactttccatgactttattttgtgaagaaaaatgtagaaagtcatgaaccaataacataataatttaaatcattaacaatcattaacaatcaaagattcttttgttttaattgaataacacaaaacttttaatgactttataagagtatgaatctaataaccaaaatttatgaagattttagattactttttacaaatcttaaatgaataacacaaaaatttaacatacttttaaaaaatcttgattgaataacaatagattttacataacagtttaaatcactaaaacttttttaaaatcataaacgaataacacccccttagtaaacatatatacatatgaggaaagaaagatatattaaattaagactctgcatgggtagctttaatatttgtttcaacaacgaatacaaaccaaccataagattagagatgatagaccaataacccttaaaaatatgaaatatcgttttgtccttttacccttttagttataatagaaaagacatgaaatagtgtatagctaaatttttgtaagactttgatgttaaaagaaattttatgtagacaagaaaattatcttagcaaaacgaaagtaataagtttgaaggaggatacaaatgtttataattgaatgaaaatctattgaaaacaaaactactttaatgtcaaaaattaaataagaagtaaatatacaatagacagttgttggatattattatttcaaatgggccaactcttcaagacgtgaagaagactagaagatagctttgtcagattcacatctccccaaaaaaaaaacagagcaagaagaagaagaagaagacaaccatg

SEQ ID NO: 18620 - DNA, 3000 bp, Unknown
  misc_feature (1)..( 3000): 2750-1469P.txt file - cDNA_ID_1818665; gDNA_ID_2926151; Annot_ID_139308
gtcagtgaaggagctgcatttattggaacatctagagattttaaccatagatattgtgtcaactatggttttggagcaaatgattgacgctggcactttgatgaattgtatgcaagaggtatctattcgttgtctcatttatgaccaagaacaagacacaaagttacgtctgccaactatggatagccttcgtagtctgaccatgtggaactgtgaaatttcagagatagagatagagaggttaacatggaacacaaatccaacaagtccatgtttcttcaacctctcccaagtcattattcatgtttgttctagtctcaaggatttgacttggctattgtttgctccgaacattacttatctcatgattgagcagttggagcagctacaagaattaattagtcacgcaaaagccaccggtgttactgaggaggagcagcaacaactgcataagattattcctttccagaaattacaaattctacacttgtctagtttacctgagctaaagagcatctattggatttctctgtcttttccatgcctaagtggaatctacgtggaaagatgtccaaagctgagaaaacttccattggattctaaaactggtaccgttggaaagaagtttgtcctacaatacaaagaaacagaatggatcgagagtgttgaatggaaggatgaagccactaaactccatttcttaccatcaaccaaactggtgtatatcctctcctagctccattctctctctgtttgatcaaaacaaataatataaataatgtattagcactaacgaaatcttttctttgtcagttgatttagctctttggttactcctaagacagcctgtaggccgtaggacaagccggtttttcaagaaccatatcagacgacacaaactgtcttacactatgaacatcaagcaaatgtaaccaactttctgttttctttcctaccactggattgtattttatatttcctctcccaccgtctcttttgttctgcaacttttctttatctttcctatttttttcaaacaagatcttccctatttattacagtcaaatctttaagtgatccaacatcaattttcttccaaaaatttaaaaatctatcccggcctgcaatttctttcactatgttaagtcttatgacaagtatctataaaacaccacgtttaaaactactgtttaagaaaatatacaaatcaagtcaactattaagacatgtaaacataattgaaagtttaaaactatcaaatcacatgtgatcccagattcttcacatggtagctaggcctaggctcaccttctaatagaagtagcaaatggaatttatcaattatgtgatctcagatcccatacatattattattataggatctcgaagataaagtaaacagagagaggtaacaaacataagaaaaaatctattagatttagttggtgaccaaatgatgttagtcaacaagtggttatcaatttgcttaacacatttttttcttgtaaactgcaaaatttgcacaaactaatttcttgaccactccggtttaagaagattggtttgagtctttgtctctctgagaaataaacaagaaaaggacatgaaaggtattcgatctgccaacgtgacattgtgagaatgggtaatataaattccaaataagattctctcttaatttggattatcctcctccatatgtaatataatttggaatctcgtgattgcttttttttttctatttgtaaggtttcatttagaaacagaaataatttgcatcccaacttagatactactaaccttatatgggcttatttggtagataggcaaaacttttacaaaaagttgtaaataaattatttgtcttacatgctttaaataaatattaaattgtatgttatcgaatagatgataaatttgttaaaaacttaaaatcgtcacaaagcccattgttataaaatttaaaatatatatttcttccaacttagggggtgttattggttccaaattataaggaattttgatgatttcaatcaaatcctagaaagtaaagaaatgaaagattttaaacgattgttagagagtattttataatcttgttgattagtttttcataatcttgtaaagtttctctaacaatctctttattttgataatacttttcatgactttccatgactttattttgtgaagaaaaatgtagaaagtcatgaaccaataacataataatttaaatcattaacaatcattaacaatcaaagattcttttgttttaattgaataacacaaaacttttaatgactttataagagtatgaatctaataaccaaaatttatgaagattttagattactttttacaaatcttaaatgaataacacaaaaatttaacatacttttaaaaaatcttgattgaataacaatagattttacataacagtttaaatcactaaaacttttttaaaatcataaacgaataacacccccttagtaaacatatatacatatgaggaaagaaagatatattaaattaagactctgcatgggtagctttaatatttgtttcaacaacgaatacaaaccaaccataagattagagatgatagaccaataacccttaaaaatatgaaatatcgttttgtccttttacccttttagttataatagaaaagacatgaaatagtgtatagctaaatttttgtaagactttgatgttaaaagaaattttatgtagacaagaaaattatcttagcaaaacgaaagtaataagtttgaaggaggatacaaatgtttataattgaatgaaaatctattgaaaacaaaactactttaatgtcaaaaattaaataagaagtaaatatacaatagacagttgttggatattattatttcaaatgggccaactcttcaagacgtgaagaagactagaagatagctttgtcagattcacatctccccaaaaaaaaaacagagcaagaagaagaagaagaagacaaccatg

SEQ ID NO: 18621 - DNA, 3003 bp, Unknown
  misc_feature (1)..( 3003): 2750-1469P.txt file - cDNA_ID_1818677; gDNA_ID_1621159; Annot_ID_57098
cttggcaatactacgaatagagaaaccagagacaagtattggtaccttccagagaccgtcgttgaggtaatgcatgttgtcaactcctattcctttgttaatgctctttctgtgaacatacacaagaaaagtttagcgatgcgaaagaaattttatgagcaaacaggggaaacacggccaaaattgatcctggtgcaggtatgtgtatctaagggaagaaggaatatcaataaagtgacaaagatagggttacttggagaggcctggagccaagagactgtattttggctaagatacgaaagtatatcaaagcacatgtttgtattttcaaataaattccagcgaaaaattgacttacatgtcctttgctgacattttggtgaagcctattgctaaggcatgttgctttccttctgcatatatggcctaaacaaatacagattcatggtttaagatcagcatatacaaacaaaaatgcaacccagggaaatactgtttttattcataccactggcctttcagcctcgacttcttgatccagaacgcctcccggggatgtaagaccaggacacattatgtttgcaccagacagaacaaactttatggcacctctatcaacttgaaacctcttcattatatttgggtctgcaaaactccaaacattcagctgccaaatttttgacattcgtggctaattgaaaaaactccaagtttctttctatgtatcattcaagtatgtaaaagttagctgaacgtggtgttttcaagaatattttatactcttctggtaacagccaatgccaaaaccttctcactatgataagggtcagctaacccggaaaacataaaacaaaatatactaaacaaaaatcctggctaaccaatcatacgtggaccttttatatagttcactcgcatgaaaaaagccaaaggaacaacaacttacaggaaccaaaccccaggaagttctaaataactcagagaaaagtgtcggacatactattcaggtatatgcagtatttgaaccaggtaagttctactgcagaccacagtaagactaacaggtgtgaagaagagtgattgtatgaataaaacacccagatatgttatgttttgataacaagaccatatagcatggatggtgtgaaggaaaagtgatattacattgatgaagaagccgcagtgttggcatgtatggcccgtcacggatacagaagaagagggggacattgttgacaacaactagggtcagatggtttgggctgcacgagaaatatagtcaggaatactgtaagacatagatagtgggtaaaagaaaattcagaaaacaaaacaatgaatatgagtttgttaatttacagaccacttcactacgataagaggaatctttttgggaagtagatcctccatcactgattcaagtcccgggtactgcaacattaacataaacatatttatatctgacaaacttcacgaaatcataaaagtttaagaaggggaaaaagacaaatgaaacaacagacatacctcatcttggatactctggcggatcctacgttgaacagatgccttcacttggttttgtgatgaaatctcctccaaacaaaacctaaataaaaagtagtgaacataaataacaccttcatagacataatggtatatcaaatagatctaaagttgatagcagtagggaaaaataaactttatacaagattcactatgaatgtataagcatgtttcaggagatggataaacacaaactccatgatagtagagagtttagactggtcaaatcaagacacaaactttcctctatgacccacgactctttgtacagatttgataaatcaaatagtgacactatcaatatagaaaccaaaactttacaatagcaagatgttagcttttgagaactcaaaaccttctactttgaagaaaatataacaaccaatatgcccataccaaggctactctaagcaatcaaattaacaatgtggtcgacaacaagtagaagggagtgagttctcgatagttattagagtaagtggatactaaataaagagaccatcacattctttatcaactagtataaacaatgccgagatgttgaaaccactaattcttagattctacaatccgggtatgaaaaacagtttctatctaaataaaaaagtagagaaagaatctagaaagagacaaagatgcttacttcttaaacatgttcgaggtttattgaaaatgatcaccagcttctaactatggtatcttcttccctgcaagcgaacagtggaagatgattgataacggaaatatcggaacatcactcaacaaaccaaaaatttggacatcatatcgcaacaaattcaataggaaaaatactgaaattccaaaacagaaaaaccaaacggaacagagcaggaactcacggactgagagagaccgtggacggtgtcacggcggaaaatggtcttggacggagttactaatcggcgaattgagatttgagaggtggtagtagaggaaccgagagaatgtttctctcaaaaaaatccccaagtgtttccgatctagtgtctcttttgtccaaaaacgacagtgtttaggaaacctaggagaatgaatgacccgatggtccgaatccgattcgaaattggttcgaattgtaataactaacatacaatattccggtttgaatgataagaaaaaacacattcgatccggttagaacaatatattaacaggcccattaaaacatatgggccgatcttgatcaactgggctattcatcgttgatacatgcggccgcacaggattaaaatccagttccgttttataaaaggatactagtttccaaacgaacggtggttgtctcctttccagaacaatctaacgctttctcgaacatcttcttcttcttctttctcgaaattatttttccagtaatcaatttcttctcttctagatttttacaggaactaattttctgctctgaggtatcagatg

SEQ ID NO: 18622 - DNA, 3003 bp, Unknown
  misc_feature (1)..( 3003): 2750-1469P.txt file - cDNA_ID_1818706; gDNA_ID_1621159; Annot_ID_57087
agccaagccaaacgaatgatgatgatatatataacatcaacggtttttgaagagtaggtgcaaattctttttgtgtatcatcatgtaactctttgactctcagtttaaagtcaataaaatatatcgctgcctaattatatcaatgagcagttgaaatcaattcttgctagatttgtgttcaaacaaactatgttcttgttctcttcacgtagaatcacctctctacgctcttacaccataatcaaacattcaagttgttattcgactttggtttctgatggtaacatcttctcgattcaacactttcaatctcttatgcaaaaatatgaatcaaaccttaaaatcatccaccagctccattcacacttcaccacttctgggtttcttctccttcatcagaagcaaaactctgggaaactttttctattcaatcctctgcttcgatgctattctcttggcgaaacccctcttcatgcttacttcctctacgaccaactccaacgactccatttcttgtctgatcacaataagagtctgcctccttttgatagtttcacttacctctttctcctgaaagcgagttcgaatccgcggttcccatctttactactgggaattggactccacgggttgactctaaaactgggttttgaatctcatgtctacgtgcagacagctttggttggtatgtatcttgttggtggaaacatgattgatgctcacaaagtgtttgatgaaatgcctgagagaaatccggtaacttggaatgtgatgatcactggccttactaatttgggagatttcgaaaaagctctttgctttttggagaagatgccgaatcggacggtagtgtcttggaccactatcattgatgggtatgcacgagtagataaacccaaggaagctatactcttgttttcaagaatggttgcttgcgacgcaataaagcccaacgagataaccattctcgccattctcccagctgtttggaacttgggagacttaaagatgtgcggatcagttcatgcttatgttgggaaaagagggtttgttccatgtgatatccgtgtgactaactctctcatcgacgcttatgcaaaatgtgggtgtattcaaagcgcgttcaagtttttcatagagattccaaacggaaggaagaatcttgtatcgtggacaacgatgatctcggcgtttgcaattcacggaatgggaaaagaagcggtcagtatgtttaaagacatggaaagattaggattgaagccgaacagagtgaccatgatcagtgttttgaacgcttgcagccatggaggtttagcagaagaagagtttctagagtttttcaacacgatggtaaacgagtacaagatcacgccggatgtgaagcactatggatgtctagtagatatgttgagaagaaaaggaagattagaagaagcagagaagattgctttggagattccaatagaagaaaaagctgtggtttggagaatgctgcttggagcttgtagcgtttatgatgatgctgaattggctgagagggttactagaaagctaatggagctagagagaagccatggaggagactatgtgcttatgtccaacatcttttgtggtactggaagatttttagatgcgcagagatttcggaaacagatggatgttagaggagtagctaaacttccaggacattcacaagtaacatagcggagcatgtatatatttatgactccaatctttattgttttgatgataaacttcagaatttttgggagctctgttctgatcctcaatgttttgatcataaactcccaaaaggtgttttctattctgaatggttttattggattataaagaaacgcaaacctaatcaagaagaccaagttcataattcattgtcataataacttcacaagaaaaaaggaaaacatgagagcattgctgggtgcaagtttgatagataataaaagaaaaagcgatgagaatctgcaacaagggtttttgatgattcctcttctgaagacccaagcttatgaaatcttgttcatagaccactgggggttgcatgtgtttctgtgctgcgcttggattctcctgaagatgggtcagcaccgaatctgtgaggatgatctgtttcttgcatccccttttcctaaaccctaaatcctaaactcccaatcttcaatgagttttgatcataaactcctaaagtttggtgagctctctaatgaagtctcagttagctgagattacagtgacaaagatgtgtaaaatacaatggagctcaaatcattcaaagagattaaaaaagactaaatggatcaatgagtaacaagaacatgcataaaaatagttcattttttgaaaaaactttgcttcaatgggtgtcattatcaaatttgaatccaagtcagattttgagtagcttttacgctaatcttcttcacacaaaaaaaccatcaacacaaaaagatttataatttaaaattttatcggcccaaaatacacacatcaatcttcctctcggcccacgcttttagaatttttgtagatttaaaaattcagttggaatctaacggctgagatcacgtttaatccaacaaaccaagctatatatttactaaaacacccgagagatctgcttcttttgtttactctactctccacgagaagcacacttgttttttgtttatatcaccgcaccaaccgctaatatctttacacgtgtcaaatcttttgcttaaggctaattatgcacagccttctttctcccgttttatccaatactataacgacatgtcattctcaatgacaaatgtatctgacgtgtcggttacctattggattacgtggctgcagatttacacgacgtagcctaaaataaaatccatgagagcaaagctcacttgctagctcctctcctcgcggtatatataagctccaggtcttgtacatcttcatcatctgatctcggggaagctccgatctgagttttttttagcaatg

SEQ ID NO: 18623 - DNA, 3003 bp, Unknown
  misc_feature (1)..( 3003): 2750-1469P.txt file - cDNA_ID_1818714; gDNA_ID_1621159; Annot_ID_57085
acaagagcagctagaaacacgacatcaaagctctttaagctctctgtcacgtccattatatcaacggtgtggaagaacatgcgttgagagatgtctggatcagaggaaaccagaagagaagcgagtgagttcgctgatgggtcgatgtcaaagttgtgaaagattgtgtctttgagatggaatgaagcaagaacgatggaagtgagaggaagaggaccagatccaatgaaagccacactctttgggacaaagccatttaggttttgttcgaggaggtcgaactcgagctttccgagtttcaaatagttgttgtaataagggaaaatgtttaaatgatgaagtgggttgtcttggtaagaggtcaagatcgaagagaaatggttttctaagtgaccttcggctagaccacaaatcttgatgagattaagtcgaatctcttggactctgtcacacatcttggtgacatcgatgttagggtttggtggtatgcatgtggaaacgagctgcttgaagagaatgttgacatcttcggatggttttagactctcaagctttgagatcttttcgtagagatcgcatattgtttgcaccaattgttcgtcttggcaacccatgtcgacactatgaggttattgatttttctctttctctttggagaataatcgtgtgttctcgggtggtgtgaactgtttggactggagggatggatatttattggcgtggggttggggatctacatcaactagaaaaagaatctaattattttaacatttcattattcaaatatactatataacgtacacttgcgtttttgtttctttttttgtttaactaattaagaatagatccttatatttaggttttgaagtaaaagatttatttaagtcaagatattagtttaatgtttacagtattggtttagtttctatgatttctgatttaggtttaaggttttagtttaggtttagagtgtatgttttcgattatagaaatttcattcctaattgctataaaatttacaatcattttcaaaattatcctggttatgaaaaatgacttgtgtgaacatggattagatccaaaaatgttataaattattggatatattgtattacactaagcaagatgtacagtaattgatggatgatatgaaacgtataatctccattaattgatggattacatgaaagctaaatgagataatttgtttgttttattccattcttctgtatataaaaaatgagataaggtttgaatgtgtccatgtagtacttcttccaactcgtatgagacaactacacaaaagtttgatgccttatcatttttctgtacgtagcatatgatgtaaacacataattacacagaaataaagagtccattactatattatggggcagttcaaaatatatagccaagagcttttagtcttttagaaagaaatgtgcatgacttgcgacaacacaaaaagtgtaactaaccacagtaattaaaaatatatatatggagtaactactaacctatataacaagttgcttgaccgaaaaacatacgtcctttgtctgtttccaaacatcaactttggaattaaattgtaagacttcctcacaaatatcaaactgagttttcaatattttttgaaaagaatatgcgaatttcagaagaagataatctcttcatggcgtgtgccttccacaaatttcttacggctctccttgttttcttttgatatgcttcatgaatctctcaaattcttcacgcaatcatatatattttcatatctagaaagaataataatttttttttttttatctcaatatagcttttaggaattctaggagagtagcatatatgggatatatacgttgacaaaaaaaacacgtatatgaaattggaatccatgtgagacgaatataaaagattggaagaagacacaaataataagaggtacttaaagatacacacacacacaacaacttgaaaggatcgatattcttttatgtaaatgacgcatcatatttatttcttatgcgaaaaaacatattcgaaacaaagaaaaaagaaaacatgtttgatctatgcatttttgcctcttctattaactccacggccaacttgattaattatatatgccaacaaaattcatacaacactattaatattcgtttgtttttctccttctcaatttcaacattaatttttaaagttttatgtttattttttgtggttgtcagtcaatggattccataatgtatatattattttcgtagagatgctaagatttttttttctcttctttttcttcctgtataaataagattgcgtgaagaacttgcggaatttcatgagtgagacaagaaaacaaggagagccataagaagtgtgtggaaggcacacgccaaaaaagatattatattctcagagaaatggacatattcttaatatttccaaaaattgaagtttcagtttgataattgtacgaaaacttacaaaaatttgtcaatgttaatgttttgaaacggatgaaagaaagtatatttagtcaagtaacctgttatagtcatgttcacttcactatcaactctatcttcttattggattgcattgtccatctcccagtttattcttcttctttttcaaaattaatttatttcctcatgttacattaacatctatctattgatttttttttttttgtaatgttaaatttatttatcaattaaagtaacaaaatatattactgaagatttaaatgattgttgccatttgccaaagctaaagagataggtctgttaaccaaaaaaaaaacattttaatgggccacatgtgtggaaaagcccatacactttaaaacaaaacgtctccccggtttgattcaatcttctctcttggtttttctggttcggtaacttaccccaaagtctagtccggtttaatctcccaaatcaattttattgaaaagaacatgtcatcgttctgagtttgggttttcgagctctaataatg

SEQ ID NO: 18624 - DNA, 3000 bp, Unknown; identical to SEQ ID NO: 7725
  misc_feature (1)..( 3000): 2750-1469P.txt file - cDNA_ID_1818721; gDNA_ID_1621159; Annot_ID_57081

SEQ ID NO: 18625 - DNA, 3000 bp, Unknown; identical to SEQ ID NO: 7725
  misc_feature (1)..( 3000): 2750-1469P.txt file - cDNA_ID_1818721; gDNA_ID_1621159; Annot_ID_173637

SEQ ID NO: 18626 - DNA, 998 bp, Unknown; identical to SEQ ID NO: 7724
  misc_feature (1)..( 998): 2750-1469P.txt file - cDNA_ID_1818725; gDNA_ID_1621159; Annot_ID_57080

SEQ ID NO: 18627 - DNA, 3000 bp, Unknown; identical to SEQ ID NO: 7738
  misc_feature (1)..( 3000): 2750-1469P.txt file - cDNA_ID_1818736; gDNA_ID_1621160; Annot_ID_57129

SEQ ID NO: 18628 - DNA, 3000 bp, Unknown; identical to SEQ ID NO: 7738
  misc_feature (1)..( 3000): 2750-1469P.txt file - cDNA_ID_1818736; gDNA_ID_1621160; Annot_ID_173696

SEQ ID NO: 18629 - DNA, 3000 bp, Unknown; identical to SEQ ID NO: 7743
  misc_feature (1)..( 3000): 2750-1469P.txt file - cDNA_ID_1818787; gDNA_ID_1621160; Annot_ID_57114

SEQ ID NO: 18630 - DNA, 3000 bp, Unknown; identical to SEQ ID NO: 7755
  misc_feature (1)..( 3000): 2750-1469P.txt file - cDNA_ID_1818791; gDNA_ID_1621160; Annot_ID_57113

SEQ ID NO: 18631 - DNA, 3000 bp, Unknown; identical to SEQ ID NO: 7745
  misc_feature (1)..( 3000): 2750-1469P.txt file - cDNA_ID_1818803; gDNA_ID_1621160; Annot_ID_57110

SEQ ID NO: 18632 - DNA, 3000 bp, Unknown; identical to SEQ ID NO: 7745
  misc_feature (1)..( 3000): 2750-1469P.txt file - cDNA_ID_1818803; gDNA_ID_1621160; Annot_ID_173678

SEQ ID NO: 18633 - DNA, 3003 bp, Unknown
  misc_feature (1)..( 3003): 2750-1469P.txt file - cDNA_ID_1818807; gDNA_ID_1621160; Annot_ID_57109
tttaattactctttatctgtgtgtgtgtgtgtgtgtgtcaaagttacaatttctttcccttctttacgacaaaaatcttaagtaacttttgtttattgttacacgtgtcaataaattattggctcattattccattgtttcaaagtcaattttcattatacaagacaaataataggcagtcgggaaaatataattcatctatacttaataaagaaaattaatggtaatttgcttaattgaccaacaaactcttaatatattcaatttatttttatgatattattgtcttggtacttagtaatcattaatcaatatacttatttaagcaatcatccttgaaaacatgatgataaaataatatttttaatggatcaagatacttaaccagtttaatttataaaagaaagaaatttacttgttgatccactcaatttagccttgaaatctttggtggttgattagcctttgctttggaagtgacaaatctgattcaatttggggtgaagatggtgacgttggtgtggagtgaagtcggcggtgctgagctcctttgttaattctttcatatgtcatcttggaaggttgctagatcggaggttttgtccttctatcaccactttgaatattattttcatcgttgtaggcgatttggtgttcttagttgggctttacttctctttctcggctattcattctgtttttagtttgggactgagttcttggctaaagaattgtggtgtcgtttactgattttttgagaatggttgtggattgaagccttagttttaaggctttggttgggtctacaaatgtcctcgtgtaagaaatgagggtcctctttggcattttccccttcggatatcaagttttctccttgtacctttgctttctcgtcttctttggttgctggaaggtagtattagtttggttctttgctctactctatttgattatccgtcttcatttctgctgaggtagtggttgtgtgagctcggtttagcccttttctcgggctttctcttttgaaggcattctaatgatttggttttcttcaaggcttttgtttgtaacctttcttgtggtgaagagtttctagtagtgaattgctttggagtctttaattgttagtcatctccatgtcttagtgattgtcaagtttagtctcagtaatcttgttttgtactagttgataggtttttgtttactatgggtttgtccattttaatggttcatatataaaaataacactcttgtgacccaaaaaaaaaaacacatattctatcttaattgtttttttttaatgatatttaaaattttaatagtaaaccacacattttttctatatttagtgtttttacttttatctcaatttatttattctctcaatatatctttaaataacgtcagttatttttgttgtttactaaataattactactgtgtaacttaaactttaaatattagtgacgataaaaaagactttaaatattagtaacttatccttaacgttttactcaaacataattatacttaattctcattcatctttgtactattgagttttcccattataatctttatctatgcatcacaccatttatgtgttttgttgagatctatattttatagttatcttaacatagcaataggaaaaagagaaattttttgacaaatactaaaaaaacttatttggaaggtccccattttttataaatctgttatattatgaattatcttattatataataaataattaataattacgaatatataattaattttttgtgattcatgtatatagattcttttcggttaggaaattttctattttttgtttttaaatattttaacaaaaacttagatttgacacatgtcgatatctcatcaatgtagttgactcgtgcgtgatcacgttagttagcaactttaaaaaccctattttatataataagatgcaaacttgaataaaatggttctatttgagacttgtttttttgtacaaaattagaaagatccaaaattcaaactgatcaaaccgtacaaattagggtttttttgtcgtgtattacgtcattagaaaatattatttttaacaatgatgatcttatacatttgataagcaaatctaaactagggttttgaaatcctaaattaaagtaaatgtttcatgtacatgacacatacattttcaaaaaattagaaaaatccaaaactcaaaccgttctaatccaataaaattaagttttttttgtcgttagaaaatactatttctaatgatgatattacatttttcaagaaaattcaaactagggtttcatgacaatacacatgcatatctttaacactattggaaaaatctaaaacctcaaaccgatccaacaagataaaattaatttttttgtcgtgtctgttaaaaagtactattttcaatgatgatcttatatttttcaagtaaatccaaactagggtttcatgacaatatacatacatttcacaaaatcgaaaactcaaaccgctccaaccttataaaattaagtttttcttttgtcgtgtattaaatcgttagaaaatattatttttaatgataattttatatttttcacaagtaaatctgaactagtgttttaaaaatcctaaattaataatatttgagcaaaagtaaattcttgacaattacacatacccatacatttacacaagtaaataagttactcaaattgcaaaattaccaacatttacgaaataacaaaaaaaagggaaaaaatctctttcttttgtggattgcgaaaaagagtcaaacattttcacaagcaaataattgctcaagttacaaaattaccaaactttacgaaaacaaaaaatagaaaaaaatccttttgtttgtttgtttgtttgtgaggaagagactcttcaaaaaggggctgacagtgaagagattgtgagaacaaagacgacaaatgggcgattgagcgaagaagaaaccttcgttctctctcggaaatg

SEQ ID NO: 18634 - DNA, 3000 bp, Unknown; identical to SEQ ID NO: 7752
  misc_feature (1)..( 3000): 2750-1469P.txt file - cDNA_ID_1818813; gDNA_ID_1621160; Annot_ID_57107

SEQ ID NO: 18635 - DNA, 3003 bp, Unknown
  misc_feature (1)..( 3003): 2750-1469P.txt file - cDNA_ID_1818825; gDNA_ID_1621160; Annot_ID_57104
ttaagcgtgttgacttacctgttatgcataagacacatccaccaagagcagaccaagcctgtttgctattcttgttgaagaacaaaacgatataaaacgggtttagtgctcttatgacagtgaagtcatacttcaacagattatagattccaatagcaccaagagagaagaaccagagcgccagaactggagcaaatagaaaaccaactttacccgtcccaaaccgttgtatgctgaacaaagccacgagaatcacaatcgaagacataaccaatgcatctgacaagaacaacacatcaagattgaaaatcaaagatcaaattgacatcaagacatagagagagaaatcatgtgataatgatacccacttgttccaaatcctttaacttcaccttgtagaccactcattgcagacatcactgcagaagaatcaaaaggaagatcaaattccaactgtaaatgcagctcaagttacactgtattaatacaaataagactcacctgacatagctggtgttagaattccatcgccaataatcatggaagttcccattaggactaaaagcaaaagaagagttttcaaatacccttttgtctccaaagcttctttaatccccagagctctttccagctcaggagttgggagtttaagcctaaaactcgagatctgctcatccgcaggttgttgatttggcagcttattcacctttgcatacctacaaataagtgaatacaacgcaaatgtccctcctgcacacataacaaacatatcctgagaaaccacttaaatatctcactttactaaacacatcggtgcggaagcattaccttcgccattgtcgttagctttaaggactacaaatacatactttgccaaaggaatcacagcaatagtgtagataacgagagacaaagctccaagaacatcaacttctgatcttataggaactttactaaacacatcactgaacacatacaaaggacttgttcccatatcaccatacacaacacctaacgtctgaaacgctattccaagtgtagtcaaaagtgacaaatcctaaaaaagttttcatttttcaatgtcaataacacaaacacaacatgtgcacttataaaaatcaaaactttaatcatgggtgattaaccttgagattgtgaccatgagaacctgcaatttccatagcttcaacatcaagagaatcagctcttttgggttttttcattaatcttctcctcaaattcccaaaactatagtctctatctctgatttctgaaaacagcggcgtttcagagtctacctcgcttccatcaacccatctccggtcactacttccggtaccaacacgtcttatgctgttgttgctgcttccttcttcaatttcctccattatttagaataatcctccaaaacgagaagaagcagagaaactaacaactctgttttcttgaaaggattataattttggttggaggaaaaattagaagagattggattggtcattgttattggttgagtgtgacttcactctctgacaatatctcacgggtaacatgttcatagttactgtcaagaaacagacaattatttgaactactttaataacgttcccaatgaaaacactatatttttttttttttttcctcgattatctatccttatcctataaaagtattttagttccttctttcttttgttatgtataatggaaatttactttattcaagaaaaaatttactctttttagtttctttgcttttttggtagcaacattttccccaatggagaacaaggatctctgtctcaaccatttttttagatacattttactctattttatttgatatacaatagattttagtttaattttttgttgtttcaagaaacacattataaagagagaatttttttttttcgatgggtgaaaattttgttttatcaaaaaaaattgttgatttgtaattgtaatataaaatttgctacatatgtataattattttaatctatatatacatttttgcagccactttgtgaaataaatcctcaagttgggacttatttacagtggctgccactgacatttaataattatttttgataattagaaagtaaatcttcgaattaaatatttgacatttaactatcttcccgaaatctctccatattaactacacaattagttactaaaataaaacttccaaaatatttaatatcatttaaacactacaaaattatcatttttgatattgcttttttcatgactataacaattcgattataagcatcaaaccgcagaaatatttgatagcagttaattactacaaaattacaaaatatttatacaatgatttataaatatatcataaataaaatcaacattaataaaataaataggtttcttttacgggacgggtttggcaggacgttacttaataacaattgtaaactttaaaataaaaatattttatatatagatacaatttgcaaatttttatatatattaaaaaattaattatccccgcggtgtaccgcggattaaaatctagtgtgacataaaatagaactgaagcaaacctaaagagtaacttccttttgtagaaatataattatttcaacaaaagattgtatagtaagatattttaaaacggaaatttgcagaagcccatttactagtgttagtttcaaagaaggcccattaaaaaaggcccaaatattgccggcttcgaaactcgacttttttatagcacacaaggtttcaactgaaaacattcctcttcgccttcctaaggaaaaaacactagtcgctcgctgctcttcaattttcttctcgaatctaatcgattgatttctccttcgattcttcaggtaacttttgattatcctcctctaatcaattgtgtatatcccaagctttctctataaattagggtttctgaatcaacgatttttcttttatccgtaggagaatcactgaagcttttgcctcccaagtagaaagagatatg

SEQ ID NO: 18636 - DNA, 3000 bp, Unknown; identical to SEQ ID NO: 7747
  misc_feature (1)..( 3000): 2750-1469P.txt file - cDNA_ID_1818829; gDNA_ID_1621160; Annot_ID_57103

SEQ ID NO: 18637 - DNA, 3000 bp, Unknown; identical to SEQ ID NO: 7747
  misc_feature (1)..( 3000): 2750-1469P.txt file - cDNA_ID_1818829; gDNA_ID_1621160; Annot_ID_173671

SEQ ID NO: 18638 - DNA, 3000 bp, Unknown; identical to SEQ ID NO: 7748
  misc_feature (1)..( 3000): 2750-1469P.txt file - cDNA_ID_1818833; gDNA_ID_1621160; Annot_ID_57102

SEQ ID NO: 18639 - DNA, 3003 bp, Unknown
  misc_feature (1)..( 3003): 2750-1469P.txt file - cDNA_ID_1818857; gDNA_ID_1620617; Annot_ID_46912
ttgtttcttcttcagcaattcagattcatcaatggtgggaacaaaaccctaattcgttactgttaatgacggaggctactggtggttattcgttggctagctattatacgtctttgggtttgtttgttatctctgttcctggtctttggtctctaatcaaacgctctgttaaatcaaaggttcgaactttactaattacaaaaccctaaatttcacttccaattcccaatttcttcgattttgaaaaagcttgaatgcaatgttgaggatttgtagatagtgagaaagacgtttgttgttaatgacgtcaagaaggagccaaagcaagtagctggagagattctatctttcttcacaaggaagaatttcaatatcactgatcgtggagaaacaatcacgtaagctacaaaaagctcgaacttttcatttgggtttctgtgttttgttactgacattgttttgataaaaagatttgaaggaaagatggttccaagtagaggacaagctgctctgcttacgttttgtacatgtataagcttagcaagtgttggtcttgtcttaaccattacagttcctgattttggaaacaattggttcttcatcattctccttagtccactcgcgtaagctctctctctttaaggtctctgagactgtttttttgtcaatgaaatggtgattattttgtatgtgtgtgtgtgttgcagaggagtgtattactggaaaaaggcgtcgaggaaagaggagataaaagtgaagatgatggtgggatcaaaagggagattggatgagattgtggttcaaggagatgatgttcaggtcgaagaaatgaggaaagagcttcagcttaatgagaaaggcatggtttatgtcaaaggtctctttgagagatcatcataatgataacattttagcctcccatttttgccttttggggaatgtgtctatacttgttttattaaggttgagattaatgactttttaactcatttcccatacttcatactaaacgaatcgatttgaatatagttcatttgattgagcaattttgttattttgaaagtccaaatccattttttcattaccaaagacaacaataaagccacaaatttactaagaattagtaagtatggtcttcctgagtgatcggctagtccatgattcccaaagccaaggttgttcagtactatatgccatcaatgatgagttcgaattatatgtacatatgaaatgggagatatggatacttcgatgccattgagaacaactcaaaaatcttggtgatcgagacttgaaataatgacagcattaagtgtacatctaaaatgtgttttggaacttttcgagatccttcagatgctcgaggtttgacacattttcttgaacacatgatgttcaaaggatcaaagctatatcttgaccggagtgaggtataatgattacaacaatagtagagacgaatacgtggagataagtataagtttgttatggaggctaataagaggttaaaacacgattgaaaaaaagaaaaaagaatcatgagaataagacttgatcaaacataatacattctatgaaaggtaaaacaccaagatgtagagttggcaaaaagaaactagaaaaagaaagtggaacttgttttttttttaatattaaattatatattttttaatattaaattatatattgacaacatataactttttgttaatattaaattatagaatttattttcatctttatttgaaatgttaattatatattgaaaacataaaaatagttacattatttgagtattttattatataaatcttggttttcaaagttagtaactcgtatgatcttgatcagatgatgcacaaactttgtagacatcatggttaacctaacataaatttatctaagttaatcaaaagaatcttacaaattaaaaaatgattaggtcgaggtgaagagaacaaattaccacatagtgttgtaattagacggacatatatgtttaagttaataatgggctttacctctatttgggttgagctcaaccttactcgattaacaaaaaatctgaaggtcgcgtgtttgatctacgctcaccgcaccatttgttaagaataagaaacgtaatctctatttcttaacttccgatacaccgtttcacaaaagattgagccaccggcacatcaccgattcataactctctctcacaagcgacacatacgttactaaacattcatcaaacaatgcataaaactaattacaagtctaatctcagtatttatatacaattgtttcttaatttttcttctttcttctcttcactcacgtgatcaatactaaactttgactctctcttgttacgaccacaaatttttgacgtatcgaaatggttgtcagtctaataaaaaaccgtaaataaaatctagtaaaatctctgttaaattaatagtgttggaatcaaaatattttgatttatagtgataagttatctctaaatgaatatttattattttatgatataaatgaattgttaatttgtagagacatttttttatttttttattaatatacgtatatcaccttgaataattaatacaaagatacttaaatgatactgtgtttatataaaaaaaaaaaaaaatcattagcaatcattcgattcggcttgcaataatctaaatggaccattttatcacttctccaacaagcaactctacagtgtttaattttaaattaagaatttaattatctatatcgtctcttctttagttaggaagtggataagataaagtctaatccaaattaaatcattaatacaaataaagttaagacaaatatttaatttaaataaataatcagaagaagagtgatgatagtgattcttcacgcgcctctctctcttcttcgtcctctacaaaaacacttgtctctcttctacacattgttcttcacgaacctctctgtatcatcttcatcttcttctcccgtaaagctctcgcgtctatg

SEQ ID NO: 18640 - DNA, 3003 bp, Unknown; identical to SEQ ID NO: 18639
  misc_feature (1)..( 3003): 2750-1469P.txt file - cDNA_ID_1818857; gDNA_ID_1620617; Annot_ID_162081

SEQ ID NO: 18641 - DNA, 3003 bp, Unknown; identical to SEQ ID NO: 15779
  misc_feature (1)..( 3003): 2750-1469P.txt file - cDNA_ID_1818861; gDNA_ID_1620617; Annot_ID_46911

SEQ ID NO: 18642 - DNA, 3003 bp, Unknown
  misc_feature (1)..( 3003): 2750-1469P.txt file - cDNA_ID_1818871; gDNA_ID_1620617; Annot_ID_46908
gaccctctcatggacaaaatctttgcccgttcgagtccgtttcctctaaaccctgtaatcttcgaagataccattggcatcactagaatcgcagatgcatttatagagtcttcaccaaatcctagtgctgctaaacaagcagtctgcaacacaatgaagtaaagagttttaattagtactgttgaataagctcacaaatgaagatggttctgcttgtgggtacctttgtcttggcaattaaatcagctgctttcatatacattccttgtacaactactcttgtgtctttgctgtgtccatcttcagatgattgtggtatcaacctgttattgaagatcaaaatagttatagtagctaaatcatagaaaacttctgaatttctaatgagaacacagttttttacctgtcctcctcagttggcacactcgaggacacgatggagtcaagagatgatgaattatcttttgtctcattgcctcttgtatcatcaggtgctagtaaagaaatgcctatgaatacacacatcattcctaatatgaacattgttgttcttagcgcatcgaaaacctgtttaaggaagaagaaaattatctaagcgactatccctaaacccacaccattctgtgacaaaatgatcaaactaatcatctagatccgtattagcccgaagataaagaaaagagaggaaaagcatcacaatgtagtcaatagatgaacctgaaactcttgaaagtaaatgcatcctgtacagatggagaagaaagtccaagcaatctgaaacattggaactatgagaattgcatcatatagagacaatccttcattcaatcttgtcatctgcaacagaagcacatgaaagacgtttttacttcagtaactatatagtctcaacggcacaacaaagcaccaaaatatttcagtagcttgaggtttttttttacccagaatccggctgtactaagaaataaaagaagcatagagtatgtgaaccagctgtgcagttgatagctactagacatggccaatctcagcaagttcgagctacaaaacgaaactcaaatttatcacctgaaactatctgattttcaagtaaagcctgtagatttgcaaactcacagtgacttggcaaataaaactgaacatgatcctatagcacccgagaccactgcatatgagaaaggaagcagcattttccaataagagctaatttcttgtccaggtgtagatatcaaaacttctcccttcctgaatatttcgattaaactaatcacaaaagaggtcccgatagttgaaaatagtcaaggaagaatttcaaatgcaagactcacctatagaggaaatggtgcacggctactattaaaatcaaaataccacagtagaccaagaatgttacattgctatatttctctgccaactgttcgggtgtgaaaactgagcacagaagatttttattaggccacgctttgtgaaaaaacgacagaacaatctgttcaagaatagttacctggtgactggtgattaccaaaagctacaaggaaaacgtttccaagaactataaaggctgtagcaacgagtactctgtgaccaaggcatactaaagatattagaagagcagagacttagtaaatcggtaatgcatgttaaagattgcagcgaggtagtttgcatacttgacagtaaccattttgttcaatacaacataagcaaatgctatgttggatacaaattgaatggatccaagagctgctagaagggactgcaaagagagttcataacggtaagaaaaccaaagagaaaccataatgaaacctgacaaatcacgcaagtaggcaatgtcgagcagatcattctacctgagcagcataaccaaacgaaatgaaattgaggcaattcccaagaagaaagacaaggatccctgtaagattccaacaacattggagactcagaaaaagcttcatataaacttcaacggggaaaaggtttaagaccaggacataccaactctccaagtctgattatgtataattggcttcaatggcatctttcctccgccatcttgtagggctaacctttctctctgataatacacaaagtaagacaatacgtttcacgtgacgagatcaaatgtaaccaaacagtagtggctgaggcaaatgcagacctcattatgtcccaatttgagaaggtttgtgccaaaattaatagcaacacttccaaaaatgttgatgaaagctccgatgacccactctcccattggtaattaaagaatgaagatagctcagttaaaggatcatctaaagctgcaaacttgaaccaatcaactagctcaggcctccctcatatgaatcttagccttcaagagaagaagcataaaacctaagaagggctattagatggtgattgcaaacacaagcttgtacctttgattgaaacagagatcaaatggacaaaattgaaacaagggttttcgatgattagcatagagaaagagaaaatgagacaaaacctgcgaagggacgatagaggagcttcagatccagatcgatttctaacagaagatgcagattgcacaagttctctcccaacaaagagaatcctttttgagatttaagctttaccaaacaaaatggcgtcgaataaaaggaagaaggataaaaattggatctttccccaaaaattgaaaattctaaaaaagctttgatttttcgtaaggaagacccaatcgccgataaagcttgaagacgacggtgacgaagacgacgacgatggcgatgttagattgatacaaaatgacgtagtggttgggcccttttgtgttgttaaatctgtcttcttgctgctcctcacgttttgttttgggctttttaccatttttactctcttctcttctctctctctcgttgagagacactcaatggccaaaaagcaacctttggcgggcgggtcaaaattgactcttttgacctttcattttcattgaacctctatagacagaaaaggatg

SEQ ID NO: 18643 - DNA, 3003 bp, Unknown; identical to SEQ ID NO: 18642
  misc_feature (1)..( 3003): 2750-1469P.txt file - cDNA_ID_1818871; gDNA_ID_1620617; Annot_ID_162077

SEQ ID NO: 18644 - DNA, 3003 bp, Unknown; identical to SEQ ID NO: 18642
  misc_feature (1)..( 3003): 2750-1469P.txt file - cDNA_ID_1818871; gDNA_ID_1620576; Annot_ID_160990

SEQ ID NO: 18645 - DNA, 3003 bp, Unknown
  misc_feature (1)..( 3003): 2750-1469P.txt file - cDNA_ID_1818875; gDNA_ID_1620617; Annot_ID_46907
caacgtttctcattggcatttgattgaatacaatctctgcagaatctaactgagaattggagacaagaccataaagcatagtagtccatgaaacaatacttctcccaggcattttatcaaacaccttacgtccactatctggtttcccacacttaaagtaaagatccatgagagtgttttggaagaagacatcattaaaaaacccagctttaatagctaaaccatgaacttgggtacctaaacgaatcgacgaagaagcgagacaagctttgataacaaaagggaaagtgaatttatcaaactgggattgatgagagatcatcataaggataaagagaagaagagcttcacgaggtttgtgattaacagagagagatcttatcataaggttccaggtaaaagtagaaggagattgaagttgattaaagacgagagaagcgtattgggtttctccgaaggaagaagaaacacttatgagctgacgaactagtaactgatcgttggtgagattgtgtttgatgattttggtgtgaatttgtttcaattgagagaaatttgaacaagttcggagaaagtaagaagcttcgggagatcggaatggtggaggagagaggaggtttggtggtgaagacggcgacggagccgccatggattaacgataaatcaccaaattctcacattcactctttcctcgattgatcgtgtgtggatgatgatgaagctgcatataaaccgaactaaaccgaagtttggctgatttggttcggattcggtttattgtgtagcaagaggaagcataaccagattgattcgactaggaaccactaaaccaaacgaaatacagaaatttcgaaccaaaccggatcgattctacgtgtattaaacgtcgtcgtttttgttagctaaaaagaagaaatagtaaatatccattagaagaagaagacgaagcagaggaatctagggtttatgctacattgaagcaaagatggttacgagcagcgatcaaatccaaaatggttctgaagagcaatcaaaaagatcagagatttacacatacgaagcaccatggcagatctacgcaatgaactggagcattcgtcgagacaagaagtatcggctcgcaatcacaagcctcatcgagcaatatccgaatcgcgtcgaaattgttcagcttgatgaatcaaatggtgagattcgttcagatccaaatctctgcttcgaacatccttacccaccaacgaaaaccagtttcatacccgataaagaatgtcaaagacccgatcttttagctacttctagtgatttccttcgtttatggcgaatctctgatgatgaatctcgtgttgagcttaagtcttgtcttagtagtgataagaatagtgagtttagtggtccaatcacttcatttgattggaatgaagctgagcctagacgaattggtacttctagtattgataccacttgtactatttgggatatagagcgtgaagttgttgatacccagcttattgctcatgataaagaggtttatgacattgcttggggtggtgttggtgtctttgcctctgtctcagaggatggttccgttagagtgtttgatctccgtgataaggagcattcgacgattatctacgagagtggtgagcctagtactcctttggtgcgacttagttggaacaagcaggatccgaggtatatggctactgttatcatgggcagtgctaaaattgttgtgttggatattcggtttccggctcttcctgtcgtggagcttcagcgacatcaggctagtgtcaatgctatagcttgggctcctcatagctcttcccatatctgctccgctggagatgattctcaggcgttgatttgggatatatcttccatgggacagcatgttgaaggtggtctggatccgattctagcttacacagccggcgctgaggttgagcagcttcagtggtcatcttctcagcctgattgggttgccattgccttctctaacaagctgcagattctccgggtctgattatgttttacagatttctgttggatacttggatgtaaaaactcgttgctattgttgattaatgatcttttgatctctgactctaagcctcattgagtttctttcatagtatggtctgtgtaggaactatgtaccttcaaaattgtgaataactagctttagcattggatttgattagacgtatggaagttagttttaacagagagcatgtggcataacggggaacttgaagtagattatgactaacaccagcatttatgtttctctgccctcgagctgatggagttgcaggattttgaaggagtgtgtgtatagaggtagttcttaacagaataatatttctctgcctcaccatcgtatggaatgtgtagctttctatggtagttgttataagctttgtctccattgtccatgtcatttttgcaatgatacttaaaacactttatgggtatgtagatttgtgaaattaggcattagtaacatcgtacagatgatgtattcttcattacttcaatacaggcatatagattctctgtccaacttaaaaggcatacaagttccgtggtttaaaaaatcagctttcctaaatcctttggccaatactctctcagccagtcctaagaacctctgctctaaaaagtctgagctttgaaaggcagacaaatggagagcagccttatcctccttttataactgtgaccacacacacaaatgaagaagcccaaatgaaaggcccaaaaatctaaaaaaataggtgaaggagggactttgtgaatatgtgatcatagaaacatgaggagacaagagagtgctaaaatcacaaccatagaaacaagtaagaaagctatccagaatctaatcttatttgcctccaagtcatcaattctttatcctatattactagtctctgcttcaccaatcctttttgctctcctgtctgctacaaaccttaacttggattctttctggtcaccatg

SEQ ID NO: 18646 - DNA, 3003 bp, Unknown; identical to SEQ ID NO: 18645
  misc_feature (1)..( 3003): 2750-1469P.txt file - cDNA_ID_1818875; gDNA_ID_1620617; Annot_ID_162073

SEQ ID NO: 18647 - DNA, 3003 bp, Unknown
  misc_feature (1)..( 3003): 2750-1469P.txt file - cDNA_ID_1818883; gDNA_ID_1620593; Annot_ID_161482
gctaacaagacgttttccgaaagtaaacgaccaggaaggaacgcagactgagacggagaaatcacctcatttaaaagcttctttagcctagaagtcagcagcttagctatcactttatacaaagtgtttaagcaagagattggcctaaagtcagtcatctttgaagagtttgtgatttttggaataaggaccaaagttgttgcgttccactgcttcaataactgacctgaacgaaaaaattcttggactgcttcagtcacctctggacccacaacaaaccaaacacctttaaagaactcagaggaatagccgtcagggccgctagctttgttcctgggcaaagagaagaaagcctcttgaatatcaagatccgagaaactcctttccaagtcattaatctgatccacagaacatctgaaagaaagaagcagattcatatcactctgtgccaaagagttctcgccctctacaccacataggagggattcaaaaaaattacagctatgctcctttatgccctcctttatgccctgctgggtctcaatcctttcaccaaaatcatcaatcaagaaatttattgtattaatcgatttacgcatgtcagccatcttatgaaagtaagcagtattattatcaccctcatataaccaagagatacttgacttctggcagaaaaaactctcctcagccttagcaagaatttgccattttctggtggcctccaactcaagtgtagcatgaacaacagaagggttggtaagagtaatcctttgacggtggagcacaatagcatgggcctcagagacccttttctcaatatcagagtagttctctctactaaaacaacaaatagggagcttaaggtgcttaagctttttggagaccctgtacatcgcagaaccagagacattgcaagagtaccaattctcacgaatcagctgcaagaaatccgggttatgtaagaaatagttgaagaaccgaaaaggtcgctttgctttcaagaccgctggatctaacaccacctcacaagagctgtggtcagagaaatctggctcaccgaagttcgcgtaagcggatgggaagagagtgttccaatgatcattgaccaaaattctatctatcttttttgccaaaggtctagagctgcacttattccaccaagtgtaagaactacctttgtagacgaggtcatacaaatcagaatcaagcaagcaacttctgaacgcacgaatcttcctgccaatatttgcattgatagcactttccggatttaagatttgattaaagtcgccaagaacaatccacgacctgccaacaacaaccggagataaggcaagctgaaccaactcattccaaagctcttttctggtaccctcctcatttgaagcgtaaacaatagacaccacaaaccaagaaggagaatcaggaagaagaagctcacatgtgatcatttgcagggacctaccaataacaactaccttcacacttggatcccacaaaacccatatttttcccaaaacagagaattcataattctcaacaaaagaccagccaggcaaaaggttagagatgaacttcttctccttaggctgctttacatgtgtctcaatgagacctccaaaaagtggtttattcaaaagaaaccatttcttaaaaccgcggcggtgactggaaatattaaatccgcgaacattccaacaaaagagcttagtacacatacttaagctttggttttgaggcccttgcctcgtagattcctcttctgacgcttagacaaaaccttgatgaaagcctcttcttcagtgtcagtagataacacgtcagaggaatcatcctcaactgcacaaactgtgcctgaacaaatgccaacctcctcattttcagttgcattatcaatgattacagcaaactgtccaacacttgaatctcctttctggaccttatccaaaccgagagagatcccattggtctgaactgaaatagacccaaaaacactatcttcaaccttaagagacttggacttagccacattcttcacagaccaaactaagccaccatcttcctttcctttgacagggagccgagtttgagtctcttgacccagagaagcttcacagaccaaactaagtccaaataataaaatcagtaatttatcaaattgaactttttttctccatcttatacttattatttattgtaaattatgagaattattaaacagacgtatgggcttaggttccttcggacagacgatatttctttctcgacacttccttcttcttctccatgtttttgatgaacacctttaatgatcttttttgcgtagaatcctggcgaacggctataattgtataatcgttggagatctcctaataaatcacagtatctgagattcgaattccaaatccctaggtgtattaatgaacatttggtcaaccaaaccaatgtaccaccaaaggggcttacacgaactttacttttctttaggaagaaaaataaaagtcagttcaaaaaaatacattgtccgtttataatgggcttttaacgttaaagccaagcccataatgatacatgacagcccattcattttagtactctaatttggggtgaataatccgtcccgcgttaaaaaacacagaatcaaaattacttcatatcttcttcacgtgagagtcacgtgttcggtaaaagtggttgaaagttgaaacccattggggaacaaaaacctaaaggagtctcatttctgctgggtcgagaaatcgctgatagagagtagagagacacacgcaggtacgtgaatcttcgcgacttcgatctctttgtgtatcaaatcaatccgttcttgttaaagttttcatttttaatcttccaatttcaatctgggtctacttaaatcaatcgaaatctcaatttcaagctgattcttataaagtttcgatttttcttgctgttttagattttgagctgcgtgctctgttttaagcttgaaggaggaaaaacatg

SEQ ID NO: 18648 - DNA, 3000 bp, Unknown; identical to SEQ ID NO: 2911
  misc_feature (1)..( 3000): 2750-1469P.txt file - cDNA_ID_1818895; gDNA_ID_1620617; Annot_ID_46900

SEQ ID NO: 18649 - DNA, 3000 bp, Unknown; identical to SEQ ID NO: 2918
  misc_feature (1)..( 3000): 2750-1469P.txt file - cDNA_ID_1818895; gDNA_ID_1620617; Annot_ID_162059

SEQ ID NO: 18650 - DNA, 3000 bp, Unknown; identical to SEQ ID NO: 2781
  misc_feature (1)..( 3000): 2750-1469P.txt file - cDNA_ID_1818895; gDNA_ID_1620593; Annot_ID_161473

SEQ ID NO: 18651 - DNA, 3003 bp, Unknown
  misc_feature (1)..( 3003): 2750-1469P.txt file - cDNA_ID_1818899; gDNA_ID_1620617; Annot_ID_46898
ccttaatcgctaagcctttgaatttctgatcatcaccttcctctttcttcttctccgacttaggcttcggaggataaataccgtggattgtagttaacaacgaccggacgaagtaatccggcatctctgcacctgccttccttaagattcttatcgaattcatcgactgtctcagagtgacgacctagatcgataatgaactcagccaaaactttttctgcagatcctagatgcgtttccaattcgttgcagacattggagacgagagagagatgattcaatttgttgagctcttctttttccattgaagaaaccaaaggaagtaacaacaaaaagagaagaagacactgtttctggataatcgacttctttctagggttttttcttatagacgctcgcagagttctgattttgctaatcctatttttttctgaaatagctgactcttaaaacgctgcgttttaatttttaaacatatgtaactttttctttaggatttatatttgggccgatgcaaaacaacttaaagttaatgggctttcgcagttaccttttttgtttttttcctcaatatagctaaccttcaatttgtataattgaaaaacatcagaacggccacgtcgtcgtctctcatcctcctcaaaaactctctcaagagagacaactttctcaataatacatgattttgatttatttttaatcatctttttccagaaaaacagctgagagaacccaatttagtcaccattgaagatgctcttacattgtttagaaaaacagggagataaacaatttatcttttctgaaagaataaacaaattgttgaatttttaatttaaaagaaaagtttaaaaggtttttcaatctaaaaataacgcaacatcatcttaaaaaaagaaatgagtacataatatggtagtgaactccgcatttttagttttctaatgctagtaacatgaaagagtactcagagtagaggtgcgtttatcatttataactctaaaactcaaaacaacttgaatatcttatagagaaataaacagattgttatccccaatacatacacattaatcacaaggtttcttgatcaactaaagatcatatctaactatatccaaatagtattgcaacataaaaataaaatcgttgaaaatcgcaaataagtataccacttattcaaataatactttgttactcttcttaccaatatttttcctaaatatacggaagaagctatcatatgtattggactacttggtaggaaatctttatcaacgttgaatttttattattttgtttatagaataaagatttataaagaagaaaagaactaaaattgtataaaaagttgataataccaataagaaattttcttcagtcatatccacacacaaaaaaaaatcattgaattttaaaaaaggagaaaaattaatcatcatgatgaatgtctttcggttgatatttgatcgtgtacataattcgtcccaacattaacactatgtcaaacgaaaaaataagttttttattgttttattgttggctacaaataggatgctaaattatcaaaactaattgaatcgaaggtgaaatctatgaaaaccaagttaataaatgacatatagttaactaaacactatgccctcaaactaacacttgaattactataatttataattgatgtgaatgagtatgtttattttctcgagcgtatatgcagttatatttgtgtattaggggtcttccaaaaaaaaatttaccacaaaattatatattaaaatatccatgatgggaaatgattgaattaaaatgatctcctctcttactcaagaaaattatgggccgaaaactcaaaatatcttggtaaaaccgaaagaaaatccacctctggttttattttgtgtagttatatcatgatgattttcaaaatacaagttctaaataagtctttttttttttttttctgaaatacaaatttaaactgaagttgttgatcaatatatgatctcccaggtaaataaaaaactatatacatatatgtctatatgatcgatcatcccaatcttccacaatcgatcttatcatgatgcatatcgaccaaattggtccaaagatcatatcttagaaatgttttgaactatttttaatgcatgtcgaccaaacattttttaatcgaaacacacaaattttatactaaccaaactgaatgaaactaaacatattcgaatatttgaaaaccaagctggataaatctattaaatgtttgatggaaaatgtattaaagtttttttgacataaaaggaaaacaaaagccataatggtaagagaagatggtgtccatcacctaactaaccagcctcacctacctcataaaccacatgatgaaatcgagttaccccacgaacacactcagctccatgtttttttaagaactaaaatgtttgatttgatttgtaatatttagtattactgttgacaatttgtatatgtaataaaaattgaagattgatttactttaacataagagataatgccattttgttaaatcattattaaaattgaagaaaaatttaaacagtgcatctaattctcttctttgactacatccaaacaaagaacaaaattcccaaatcatttttattcttcttttttacaagtgggcatttgtgaggttgtgaggcccaaccaaaagagcctctcactacattccacaagaaccacacaaattcaaaagtctcactcctaacacaaagaagcatccaaacgcaatcctctcacctccacctcacattcccctgtgccaccatcacttaccctttctcgcctctcctgaaatcaaaatcccattatgcaaatccattttcatcatcatcaatatcatcaccaacttcattctcatcatccatggcccatttctcatctatgtagattctcatctctctacctcctcctcattttctcctcttgattcactaattcttcttcttcttcttcttttcagacatg

SEQ ID NO: 18652 - DNA, 3003 bp, Unknown; identical to SEQ ID NO: 18651
  misc_feature (1)..( 3003): 2750-1469P.txt file - cDNA_ID_1818899; gDNA_ID_1620617; Annot_ID_162057

SEQ ID NO: 18653 - DNA, 3003 bp, Unknown
  misc_feature (1)..( 3003): 2750-1469P.txt file - cDNA_ID_1818899; gDNA_ID_1620593; Annot_ID_161471
ccttaatcgctaagcctttgaatttctgatcatcaccttcctctttcttcttctccgacttaggcttcggaggataaataccgtggattgtagttaacaacgaccggacgaagtaatccggcatctctgcacctgcttccttaagattcttatcgaattcatcgactgtctcagagtgacgacctagatcgataatgaactcagccaaaactttttctgcagatcctagatgcgtttccaattcgttgcagacattggagacgagagagagatgattcaatttgttgagctcttctttttccattgaagaaaccaaaggaagtaacaacaaaaagagaagaagacactgtttctggataatcgacttctttctagggttttttcttatagacgctcgcagagttctgattttgctaatcctatttttttctgaaatagctgactcttaaaacgctgcgttttaatttttaaacatatgtaactttttctttaggatttatatttgggccgatgcaaaacaacttaaagttaatgggctttcgcagttaccttttttgtttttttcctcaatatagctaaccttcaatttgtataattgaaaaacatcagaacggccacgtcgtcgtctctcatcctcctcaaaaactctctcaagagagacaactttctcaataatacatgattttgatttatttttaatcatctttttccagaaaaacagctgagagaacccaatttagtcaccattgaagatgctcttacattgtttagaaaaacagggagataaacaatttatcttttctgaaagaataaacaaattgttgaatttttaatttaaaagaaaagtttaaaaggtttttcaatctaaaaataacgcaacatcatcttaaaaaaagaaatgagtacataatatggtagtgaactccgcatttttagttttctaatgctagtaacatgaaagagtactcagagtagaggtgcgtttatcatttataactctaaaactcaaaacaacttgaatatcttatagagaaataaacagattgttatccccaatacatacacattaatcacaaggtttcttgatcaactaaagatcatatctaactatatccaaatagtattgcaacataaaaataaaatcgttgaaaatcgcaaataagtataccacttattcaaataatactttgttactcttcttaccaatatttttcctaaatatacggaagaagctatcatatgtattggactacttggtaggaaatctttatcaacgttgaatttttattattttgtttatagaataaagatttataaagaagaaaagaactaaaattgtataaaaagttgataataccaataagaaattttcttcagtcatatccacacacaaaaaaaaatcattgaattttaaaaaaggagaaaaattaatcatcatgatgaatgtctttcggttgatatttgatcgtgtacataattcgtcccaacattaacactatgtcaaacgaaaaaataagttttttattgttttattgttggctacaaataggatgctaaattatcaaaactaattgaatcgaaggtgaaatctatgaaaaccaagttaataaatgacatatagttaactaaacactatgccctcaaactaacacttgaattactataatttataattgatgtgaatgagtatgtttattttctcgagcgtatatgcagttatatttgtgtattaggggtcttccaaaaaaaaatttaccacaaaattatatattaaaatatccatgatgggaaatgattgaattaaaatgatctcctctcttactcaagaaaattatgggccgaaaactcaaaatatcttggtaaaaccgaaagaaaatccacctctggttttattttgtgtagttatatcatgatgattttcaaaatacaagttctaaataagtctttttttttttttttctgaaatacaaatttaaactgaagttgttgatcaatatatgatctcccaggtaaataaaaaactatatacatatatgtctatatgatcggatcatcccaatcttccacaatcgatcttatcatgatgcatatcgaccaaattggtccaaagatcatatcttagaaatgttttgaactatttttaatgcatgtcgaccaaacattttttaatcgaaacacacaaattttatactaaccaaactgaatgaaactaaacatattcgaatatttgaaaaccaagctggataaatctattaaatgtttgatggaaaatgtattaaagtttttttgacataaaaggaaaacaaaagccataatggtaagagaagatggtgtccatcacctaactaaccagcctcacctacctcataaaccacatgatgaaatcgagttaccccacgaacacactcagctccatgtttttttaagaactaaaatgtttgatttgatttgtaatatttagtattactgttgacaatttgtatatgtaataaaaattgaagattgatttactttaacataagagataatgccattttgttaaatcattattaaaattgaagaaaaatttaaacagtgcatctaattctcttctttgactacatccaaacaaagaacaaaattcccaaatcatttttattcttcttttttacaagtgggcatttgtgaggttgtgaggcccaaccaaaagagcctctcactacattccacaagaaccacacaaattcaaaagtctcactcctaacacaaagaagcatccaaacgcaatcctctcacctccacctcacattcccctgtgccaccatcacttaccctttctcgcctctcctgaaatcaaaatcccattatgcaaatccattttcatcatcatcaatatcatcaccaacttcattctcatcatccatggcccatttctcatctatgtagattctcatctctctacctcctcctcattttctcctcttgattcactaattcttcttcttcttcttcttttcagacatg

SEQ ID NO: 18654 - DNA, 3000 bp, Unknown; identical to SEQ ID NO: 2908
  misc_feature (1)..( 3000): 2750-1469P.txt file - cDNA_ID_1818903; gDNA_ID_1620617; Annot_ID_46897

SEQ ID NO: 18655 - DNA, 3000 bp, Unknown; identical to SEQ ID NO: 2908
  misc_feature (1)..( 3000): 2750-1469P.txt file - cDNA_ID_1818903; gDNA_ID_1620617; Annot_ID_162056

SEQ ID NO: 18656 - DNA, 3003 bp, Unknown
  misc_feature (1)..( 3003): 2750-1469P.txt file - cDNA_ID_1818930; gDNA_ID_1620618; Annot_ID_46958
tgtttttttattattattatttaaatttagcattcaaatttttgattagaatttttaaaagttgttttaaatttttgattttgtttattattgggaattttaaaacctattttgtgttttttttttttgaaaattttatttgttggattctaaatttacataatgataaaaattctaaccggattttggatctaatattagtcgttagcgattccaaacattcaacttatattttctattattatgtaaatttaccattcaagtttttaattaggaatttttaaataattaaatgtccgtctttaataggctcctaatccatctttttatttatatatatatatatatatatatatatatatttttaagttaaatatcaatattttatgaataaaactgtattttctcagtaaatcgaattaatagaacaattaggagaagattaacgtattaggctccgtcttcttcttcttcttctcccttgtaacgttttctggtatgggccgctcacgatttctctctcaaaatatctttgcctttgtacttatctgatccataataatctctggataacgacgaattgacgattctgagactttatttttgtttggttttttgctagtttactaattcgttaagtgtttgatgataatgactcttgaaaaaagtttactttatcttcttctcttcttctgcttttggtagtcgtctagtaattaagattgatagctaagtaaagccaagatttctctggcttgtttttcaagaggaataacgtaagcgagcaaaaagctccacttattgtcgggaagcaagcttcgattctttaaattcctccaaacaaaaaaacacaacgtggaaacttttctataaacccttttcaaattctgtggattagaccagaagaaagaagaaaatttactataaacccttttcgattccactaattgttttcacaaaactctgttctgtactctgttttttgttaggtcattttttagcaaagaagaagaagaggaatggcgatgctagttgatcctccaaatgggataagacaagaagggaaacattactacacgatgtggcaaacattattcgaaatcgacactaagtatgttccgattaagccgattggaagaggagcttatggtgtggtttgttcttcaatcaacagcgaaaccaatgagagagttgctattaagaagatccacaatgtgtttgagaatcgcatcgatgctttgagaacattgagagagcttaagcttttaaggcatgtgagacacgaaaacgttatctcccttaaggatgttatgctgcctactcacaggtacagcttcagagatgtttatttggtctatgagcttatggattctgatttgaatcagatcatcaaatcctctcagtctctctccgatgatcactgcaagtacttcttgtttcaggtacgttggttcgatacattttctgtttctcttgttaagctttggtttgatgattgaattgtatctttttgtcgacattgtagttgctaagaggattgaagtatcttcactcagcaaacatccttcatcgcgatttaaagccagggaatctcttagtgaatgctaattgtgatctaaagatttgtgatttcgggcttgcgagaacttatgaacagtttatgacagagtatgtggtcactcgttggtaccgagcacctgagcttcttctctgttgtgataactacggaacctccattgatgtttggtcggtaggatgcatattcgcagagattcttggaagaaaaccgatattcccgggaacagaatgtctcaaccaactaaagctaatcataaatgttgttggtagccaacaagactgggatctccagttcatagataaccagaaagctaggagatttataaagtctcttcctttctcaaagggtactcacttttctcatatttacccgcacgcaaatccgctggcgatagatttgttacagaggatgcttgtgtttgatccaaccaagagaatatcggtcagcgatgcgcttttacacccctacatggagggactgttggaaccggaatgtaacccgtcggaaaatgttccggtcagtagtttggagatagatgagaacatggaaggagatatgatcagggagatgatgtgggaagagatgcttcattacctcccccgagcttaaatcaatattttgtaaaatcatctctctaacacttgtttataactttagtttgtggtaacttgtattcgtcttccatgtttctttgttacgttgttttgtgcggaatgtcattgagatgtatgcgtcaaagtagactttcggttattgaaatttggtctggttatttgatttataccggatccggtttactcccctcgtatgagagaccttcggaactatggagaaggttttgactctctcttcagtgatatgatccgtcgcaaatcggaatctgccggcgagatggttccagtcgtctttgttcccttattgatagaataatcaaaaatccgagtcggagacgacgaagacccgagttccagctattaactatgcagataccatcaagagagcatagtttcattctatttctcttcatatctggtaaaaatcctcgtcgcacgaatttgccctctctcgaatttttgagcttttgaaattttatcttttgggaaatgctgcagcttttgtaattggtgctgcgtctgtacctgtacctgattctaattgctacgctctcgacaattcaagtcgtcttgtcgattttgtatcctctttctattttattaaagcttaggatcaattcttagtaaaaaagtttgctttttgttgcattggtttgatttcgtgtcttgtaaagctgcttcctttaacttggtttgatcagagcagctggatcggtcatccatttgaatatgatggcaaggttgtgtatatgtttctcattttttagtgttgagagttagttttaaggactttggggttgagttggtatg

SEQ ID NO: 18657 - DNA, 3000 bp, Unknown
  misc_feature (1)..( 3000): 2750-1469P.txt file - cDNA_ID_1818930; gDNA_ID_2926211; Annot_ID_141985
ttttttattattattatttaaatttagcattcaaatttttgattagaatttttaaaagttgttttaaatttttgattttgtttattattgggaattttaaaacctattttgtgttttttttttttgaaaattttatttgttggattctaaatttacataatgataaaaattctaaccggattttggatctaatattagtcgttagcgattccaaacattcaacttatattttctattattatgtaaatttaccattcaagtttttaattaggaatttttaaataattaaatgtccgtctttaataggctcctaatccatctttttatttatatatatatatatatatatatatatatatttttaagttaaatatcaatattttatgaataaaactgtattttctcagtaaatcgaattaatagaacaattaggagaagattaacgtattaggctccgtcttcttcttcttcttctcccttgtaacgttttctggtatgggccgctcacgatttctctctcaaaatatctttgcctttgtacttatctgatccataataatctctggataacgacgaattgacgattctgagactttatttttgtttggttttttgctagtttactaattcgttaagtgtttgatgataatgactcttgaaaaaagtttactttatcttcttctcttcttctgcttttggtagtcgtctagtaattaagattgatagctaagtaaagccaagatttctctggcttgtttttcaagaggaataacgtaagcgagcaaaaagctccacttattgtcgggaagcaagcttcgattctttaaattcctccaaacaaaaaaacacaacgtggaaacttttctataaacccttttcaaattctgtggattagaccagaagaaagaagaaaatttactataaacccttttcgattccactaattgttttcacaaaactctgttctgtactctgttttttgttaggtcattttttagcaaagaagaagaagaggaatggcgatgctagttgatcctccaaatgggataagacaagaagggaaacattactacacgatgtggcaaacattattcgaaatcgacactaagtatgttccgattaagccgattggaagaggagcttatggtgtggtttgttcttcaatcaacagcgaaaccaatgagagagttgctattaagaagatccacaatgtgtttgagaatcgcatcgatgctttgagaacattgagagagcttaagcttttaaggcatgtgagacacgaaaacgttatctcccttaaggatgttatgctgcctactcacaggtacagcttcagagatgtttatttggtctatgagcttatggattctgatttgaatcagatcatcaaatcctctcagtctctctccgatgatcactgcaagtacttcttgtttcaggtacgttggttcgatacattttctgtttctcttgttaagctttggtttgatgattgaattgtatctttttgtcgacattgtagttgctaagaggattgaagtatcttcactcagcaaacatccttcatcgcgatttaaagccagggaatctcttagtgaatgctaattgtgatctaaagatttgtgatttcgggcttgcgagaacttatgaacagtttatgacagagtatgtggtcactcgttggtaccgagcacctgagcttcttctctgttgtgataactacggaacctccattgatgtttggtcggtaggatgcatattcgcagagattcttggaagaaaaccgatattcccgggaacagaatgtctcaaccaactaaagctaatcataaatgttgttggtagccaacaagactgggatctccagttcatagataaccagaaagctaggagatttataaagtctcttcctttctcaaagggtactcacttttctcatatttacccgcacgcaaatccgctggcgatagatttgttacagaggatgcttgtgtttgatccaaccaagagaatatcggtcagcgatgcgcttttacacccctacatggagggactgttggaaccggaatgtaacccgtcggaaaatgttccggtcagtagtttggagatagatgagaacatggaaggagatatgatcagggagatgatgtgggaagagatgcttcattacctcccccgagcttaaatcaatattttgtaaaatcatctctctaacacttgtttataactttagtttgtggtaacttgtattcgtcttccatgtttctttgttacgttgttttgtgcggaatgtcattgagatgtatgcgtcaaagtagactttcggttattgaaatttggtctggttatttgatttataccggatccggtttactcccctcgtatgagagaccttcggaactatggagaaggttttgactctctcttcagtgatatgatccgtcgcaaatcggaatctgccggcgagatggttccagtcgtctttgttcccttattgatagaataatcaaaaatccgagtcggagacgacgaagacccgagttccagctattaactatgcagataccatcaagagagcatagtttcattctatttctcttcatatctggtaaaaatcctcgtcgcacgaatttgccctctctcgaatttttgagcttttgaaattttatcttttgggaaatgctgcagcttttgtaattggtgctgcgtctgtacctgtacctgattctaattgctacgctctcgacaattcaagtcgtcttgtcgattttgtatcctctttctattttattaaagcttaggatcaattcttagtaaaaaagtttgctttttgttgcattggtttgatttcgtgtcttgtaaagctgcttcctttaacttggtttgatcagagcagctggatcggtcatccatttgaatatgatggcaaggttgtgtatatgtttctcattttttagtgttgagagttagttttaaggactttggggttgagttggtatg

SEQ ID NO: 18658 - DNA, 3000 bp, Unknown; identical to SEQ ID NO: 18657
  misc_feature (1)..( 3000): 2750-1469P.txt file - cDNA_ID_1818930; gDNA_ID_2926211; Annot_ID_202629

SEQ ID NO: 18659 - DNA, 3003 bp, Unknown
  misc_feature (1)..( 3003): 2750-1469P.txt file - cDNA_ID_1818934; gDNA_ID_1620618; Annot_ID_46957
tagaaaattagaacttgacattattgtccaaagtgggttaaataaatgaatagcattttattaagaaaacattgtatttaaaaacatattaaaaaaatctaatttaaaagtttttaaaaatatatgtcggctgtttgtgtgaatagcatgattatggaatatattttttgtcgaaaaagtagtatttgtcatctagttgtaaagatatatttctgatttttcaaacttttttagatctacattttttttttaataagatttatattcgttaaaaaagagatgataaataaatttattttgaagatgacaaagaaaaaaaaaaattgaagacaaattaacttttattatgtctattttgaagatttttattataaaaaaataaactattttgaagatttttattatgtctctgaccaatggcagagtagggcaaatgccatgggttcattacaaaattcaaaaaaaaaaaaaaaggaaaaaggcccacttttatattaaaaaaatatactaagaggttttaaaattttttttgaattttaccaaaggcccacaaaaaattgagacgggcctaaaataaataataacgtcctgtttagaaaattagaactcgacattattgtccaaagtgggtcaaataaatgaatagcattttattaagaaaacattgtatttaaaaacatgttaaaaaattctaatttaaaagtttttaaaagtatatgtcggctgttttttgaatagcatgattatggaatttatattttttgtcgaaaaagtagtatttgtcatctagttgtaaagatgtatttctgatttttcaaacttttttagatatatatttgttttttgtttctaataagatttatatttgttaaaaagagatgataagtaaatctattttgaagatgacaaaaaaaaacaaaaaacaaaaaaaaatctattttgaagacaaatttttatcatgggtagttaatcttgattttggttaatggagttttggatttttgggtgggagaagagtaaagaggtaaatgctattgaaagatttattaaaggttatttgtcaatgtccatatatacattttttgtacactagcctttagatatttcgagacctacattgaagttggtttagggaaagttgggtaaatctctagataaatttgatatgatcaaattgcgttgaacactagttttaagaaaactaaaattttcaatatggacttgcgatgttgaatcaatgaatctttgtctagaaaaagctgaaatctgtttgagtttggtgaatcaaaaagattactcgatcgagatgctaagatggttcctgaagagttgaaaattattagctttgatggagaaaaagaagttattggagtagttgggaggatcatcaaatcttttttggatggaaaaggcaaagtgaatgccggtttccgtgagaatgtgttgtatcttgtgaatgtctgcctgcgcattgtgtgtctagtcacttaccaaaaatttgagccttatgaagactttggcagtgcaacgactgttgttgcgtccaccatcacgtcgattataactgtgtggttgttgtacaacaagtttgagatggggatatacgacaagatagaagtatttgctgcttggtatttatttattttgtccaaccgctatgaagaaattgtgatgtcggatgacttcgttcatgtattgctgtttttttggattgttaaggtaatattaacatggtctatcttcttctactaactagtttagagatattaacattgttttgtttgttgtaggtgcataatgaagttgcattgctatggaggtttccaaaacttaactatgctaaaatcaattatattctttgtagatcgcatgaaaaaggttagatagaaatcgaatgattggtacaatcttaaataatgatatgaaatctaacttaattttggatctatcattagtagttagcgattgtaaacattcaacttgtttttttattattattatttaaatttagcattcaaatttttgattagaatttttaaaagttgttttaaatttttgattttgtttattattgggaattttaaaacctattttgtgttttttttttttgaaaattttatttgttggattctaaatttacataatgataaaaattctaaccggattttggatctaatattagtcgttagcgattccaaacattcaacttatattttctattattatgtaaatttaccattcaagtttttaattaggaatttttaaataattaaatgtccgtctttaataggctcctaatccatctttttatttatatatatatatatatatatatatatatatttttaagttaaatatcaatattttatgaataaaactgtattttctcagtaaatcgaattaatagaacaattaggagaagattaacgtattaggctccgtcttcttcttcttcttctcccttgtaacgttttctggtatgggccgctcacgatttctctctcaaaatatctttgcctttgtacttatctgatccataataatctctggataacgacgaattgacgattctgagactttatttttgtttggttttttgctagtttactaattcgttaagtgtttgatgataatgactcttgaaaaaagtttactttatcttcttctcttcttctgcttttggtagtcgtctagtaattaagattgatagctaagtaaagccaagatttctctggcttgtttttcaagaggaataacgtaagcgagcaaaaagctccacttattgtcgggaagcaagcttcgattctttaaattcctccaaacaaaaaaacacaacgtggaaacttttctataaacccttttcaaattctgtggattagaccagaagaaagaagaaaatttactataaacccttttcgattccactaattgttttcacaaaactctgttctgtactctgttttttgttaggtcattttttagcaaagaagaagaagaggaatg

SEQ ID NO: 18660 - DNA, 3003 bp, Unknown; identical to SEQ ID NO: 18659
  misc_feature (1)..( 3003): 2750-1469P.txt file - cDNA_ID_1818934; gDNA_ID_1620618; Annot_ID_162143

SEQ ID NO: 18661 - DNA, 3000 bp, Unknown
  misc_feature (1)..( 3000): 2750-1469P.txt file - cDNA_ID_1818934; gDNA_ID_2926211; Annot_ID_141986
aaaattagaacttgacattattgtccaaagtgggttaaataaatgaatagcattttattaagaaaacattgtatttaaaaacatattaaaaaaatctaatttaaaagtttttaaaaatatatgtcggctgtttgtgtgaatagcatgattatggaatatattttttgtcgaaaaagtagtatttgtcatctagttgtaaagatatatttctgatttttcaaacttttttagatctacattttttttttaataagatttatattcgttaaaaaagagatgataaataaatttattttgaagatgacaaagaaaaaaaaaaattgaagacaaattaacttttattatgtctattttgaagatttttattataaaaaaataaactattttgaagatttttattatgtctctgaccaatggcagagtagggcaaatgccatgggttcattacaaaattcaaaaaaaaaaaaaaaggaaaaaggcccacttttatattaaaaaaatatactaagaggttttaaaattttttttgaattttaccaaaggcccacaaaaaattgagacgggcctaaaataaataataacgtcctgtttagaaaattagaactcgacattattgtccaaagtgggtcaaataaatgaatagcattttattaagaaaacattgtatttaaaaacatgttaaaaaattctaatttaaaagtttttaaaagtatatgtcggctgttttttgaatagcatgattatggaatttatattttttgtcgaaaaagtagtatttgtcatctagttgtaaagatgtatttctgatttttcaaacttttttagatatatatttgttttttgtttctaataagatttatatttgttaaaaagagatgataagtaaatctattttgaagatgacaaaaaaaaacaaaaaacaaaaaaaaatctattttgaagacaaatttttatcatgggtagttaatcttgattttggttaatggagttttggatttttgggtgggagaagagtaaagaggtaaatgctattgaaagatttattaaaggttatttgtcaatgtccatatatacattttttgtacactagcctttagatatttcgagacctacattgaagttggtttagggaaagttgggtaaatctctagataaatttgatatgatcaaattgcgttgaacactagttttaagaaaactaaaattttcaatatggacttgcgatgttgaatcaatgaatctttgtctagaaaaagctgaaatctgtttgagtttggtgaatcaaaaagattactcgatcgagatgctaagatggttcctgaagagttgaaaattattagctttgatggagaaaaagaagttattggagtagttgggaggatcatcaaatcttttttggatggaaaaggcaaagtgaatgccggtttccgtgagaatgtgttgtatcttgtgaatgtctgcctgcgcattgtgtgtctagtcacttaccaaaaatttgagccttatgaagactttggcagtgcaacgactgttgttgcgtccaccatcacgtcgattataactgtgtggttgttgtacaacaagtttgagatggggatatacgacaagatagaagtatttgctgcttggtatttatttattttgtccaaccgctatgaagaaattgtgatgtcggatgacttcgttcatgtattgctgtttttttggattgttaaggtaatattaacatggtctatcttcttctactaactagtttagagatattaacattgttttgtttgttgtaggtgcataatgaagttgcattgctatggaggtttccaaaacttaactatgctaaaatcaattatattctttgtagatcgcatgaaaaaggttagatagaaatcgaatgattggtacaatcttaaataatgatatgaaatctaacttaattttggatctatcattagtagttagcgattgtaaacattcaacttgtttttttattattattatttaaatttagcattcaaatttttgattagaatttttaaaagttgttttaaatttttgattttgtttattattgggaattttaaaacctattttgtgttttttttttttgaaaattttatttgttggattctaaatttacataatgataaaaattctaaccggattttggatctaatattagtcgttagcgattccaaacattcaacttatattttctattattatgtaaatttaccattcaagtttttaattaggaatttttaaataattaaatgtccgtctttaataggctcctaatccatctttttatttatatatatatatatatatatatatatatatttttaagttaaatatcaatattttatgaataaaactgtattttctcagtaaatcgaattaatagaacaattaggagaagattaacgtattaggctccgtcttcttcttcttcttctcccttgtaacgttttctggtatgggccgctcacgatttctctctcaaaatatctttgcctttgtacttatctgatccataataatctctggataacgacgaattgacgattctgagactttatttttgtttggttttttgctagtttactaattcgttaagtgtttgatgataatgactcttgaaaaaagtttactttatcttcttctcttcttctgcttttggtagtcgtctagtaattaagattgatagctaagtaaagccaagatttctctggcttgtttttcaagaggaataacgtaagcgagcaaaaagctccacttattgtcgggaagcaagcttcgattctttaaattcctccaaacaaaaaaacacaacgtggaaacttttctataaacccttttcaaattctgtggattagaccagaagaaagaagaaaatttactataaacccttttcgattccactaattgttttcacaaaactctgttctgtactctgttttttgttaggtcattttttagcaaagaagaagaagaggaatg

SEQ ID NO: 18662 - DNA, 3000 bp, Unknown; identical to SEQ ID NO: 18661
  misc_feature (1)..( 3000): 2750-1469P.txt file - cDNA_ID_1818934; gDNA_ID_2926211; Annot_ID_202630

SEQ ID NO: 18663 - DNA, 3000 bp, Unknown; identical to SEQ ID NO: 2955
  misc_feature (1)..( 3000): 2750-1469P.txt file - cDNA_ID_1818948; gDNA_ID_1620618; Annot_ID_46953

SEQ ID NO: 18664 - DNA, 3003 bp, Unknown
  misc_feature (1)..( 3003): 2750-1469P.txt file - cDNA_ID_1818948; gDNA_ID_2926211; Annot_ID_141990
acgtagaagacttctatgtagttcgttgtatagccttattctgtgttatgcttaaagattttgttgggtccatacagtgctgctggaccgcatacaacagttaatggaaaagatgtggtgaattttgcctcagctaattatcttgggctcattggccacgagaagttgctggtaacgtgaagctactttgttttcaatacaatctctcttctgtttgaatagttttatttaagatttgtcttatgccaggaatcatgtacttctgcattagaaaaatatggggtcggttcttgtgggcctcgtggattctatggtacaattggtaagaagacaataattttctaaatagatactttggttcatccattggctcgcttggaaagggttcttactgtttgattacttctcttgactagatgtccaccttgactgcgaaaccagaatatccaaatttttgggtactcctgattcaatcctttactcttatggactttccacaatgttcagcacaattccttgtttctgtaagaaaggcgatgtcattgttgcgtaagtacacaatttcttataacatcgttctacttattagattacgttagtagaaatcccaggattacattgaacatctttgtttgaaacttttttatctcgatattaaactcattcttgtcttttctattttcttagtgatgagggtgttcactggggaatacaaaatggacttcagctttcaagaagtacaattgtgtacttcaagcacaatgacatggaatcccttcgaattacccttgagaaaatcatgacaaagtacaagcgctcaaagaacttgaggcgttatattgtagctgaagctgtatatcaagtacctggcagttttctttcttctcctgcttccatattttgaaaattctccctgaactgtgatgcttacccatttgcctttgggtatgttaaaatctacagaattcaggtcaaattgcgcctctggatgagattgtaaaactaaaagagaagtatcggtttcgtgttatattggatgaaagcaactcttttggtgtgcttggccgttctgggagaggtcttgcagagcatcatagtgtccctgtaagtatgattgacacacattttagtagtgttctcatttgccaaacctgatgctaaaaatttcacggcggtttatctttaaacagattgagaagatagatgttgtgactgctgcaatgggccatgcattagccacagaaggtggattttgcactgggaatgcccgcatcatcgattaccaggtaaacatcgatcatgctgattaactaattacaaacaaaattaaaaaactaccgataatagaaacttttctctgggacgctcaaatgcacagagacttagcagttcaggatatgtgttctctgcttctttaccaccataccttgcaagtgctgctatcaccgccattgatgtcattgatcaaaaccctgatatgttagttaagctgaagcaaaatgttgctctgttatggaaaggtttgatcttcaagttttaatctaatctagcaacaattagagtttgatttagtttgttatcttcctctaattgaaaaagaaatgctgggaacaacgcaggattgtcagatatcaaggggatgtcattaacaagcaaccgggaatcacctattgttttcttaaaattagagaaatctagcggttcagctaaagatgatttgcttctacttgagaaaatggctgaccgtgtaagttcattgtttctttgcaaaaccaaatctagaccctgtccccgtttcttgacatgactagatgcatgcaggctctgaaggaagactcattgttggttgtgagttctaaaagatcatttcttgataaatgccggttacctgtgggaatcaaactctacgtctcagcgggacattcggaatccgatcttcttaaagcgtcggagtcactgaagagacttgcttcagagcttctactcaagtcctgaaacaccgaaactcttttttcttcaagaacaacaacactgaagggaactctttgaacacatccgtgtgagatagtagacaacagaatccgcagagtcagtagcttgaagatgttcatagcagattcctaaactggttctccactttcagtgatgggcttgtggttgatctgaagctcaattgacgaaggaggattatcgaagacaatggcttcttgttcttacatttatttcatttgatcatctgagttctttttttttttttcctactcatacccttcaatgatcaagtagcttagtgttgttgccgaaattcaaaaactttcaatttatgggaaacaaaaaagttcatgtgctgacatcagcctcttaaggctttctgagtttcttgcggtaaaagaaagtgtttttgcctctctcaaatctcaatagtattgacacgtgtcagtataacactcgtgcataattgacacgtgtcagtataacactcgtgggcggtataatgtgaacgaaagagcgagggacaggtaatctctcttcctctgtttctaagtttgtataattagaactgcataacgaaaaacaaaaacaaaacagtgaccaaaaaaagaagaagaatcaatggttggggaaagagagaatatgaggtggagctttacctcgacgttaatggagttgagaatccaatggaacgattttgagagattttcggagcaatctcactctccttttatctttctccttcctctcatttcctctttgcagaggtaatttatcttttaattgtctctctgttttgttctgttttcttaacttcatgttcatcgttatcgttgttcgaatttgatttgtaattagggaatgtgaatttcttacaggaatttggcaaagggcattggctaaaaataataagacactcgttagagtgctcgtccctcgtgcccttacctgcctaattccaactatctggcaaaatcatgactttgatccaaggtatagtaaacaaaaatg

SEQ ID NO: 18665 - DNA, 3000 bp, Unknown
  misc_feature (1)..( 3000): 2750-1469P.txt file - cDNA_ID_1818963; gDNA_ID_1620618; Annot_ID_46948
taacacacgaaacaaacaacagttaggtctctttattatgtatcaaaacagaaaaaactctttatgggggtttaatacctgtagtatacttctccagcatttggatctgttgcaggttttgaaatggattcgacgaggtagtcatcgacattagtagagtctatgtacacctgcaaaaacaagaaaaaactaagtacaaagtaacatacttgagatgaagtctgacagaagttaataagacattacactctttaagacagattcgattcgagaaggttgcttggcttgccagaacaagaacccaagaaccacacgttggaaaatctcttttagcggcttaactataaacttggttatcacagtttcatcagcttcctctcgttttctactctcggctgcaaattgtcccgcagagttcagaagtgcaactcccgtgacttgctcgggtaatccaaccgcaactgacaatgccgtaaatcccccaaggctgtaaagaagtggaagaacttgtttcagacttccttgtggaatgtcaaaaagagcttcaaagaagacattcatttacctgtttccaacgacaacagctggttctttcactacctctttcatgaaatcaataacttgatctgtccaaaccatggcatcatactctatgagagctttgtcactccatccgaaaccgagtaagtccaaggcgtaaaccttgtatttcttagccaattcaggaatgttatacctataaaaatctaccgatattagctcgaattcgtatgataaggtaaaaagttgacttaaagcctacactgatcaatagagcatggaggtgagattgaaggtacctccaatgaaagacagaagcaccaaaaccatgaataagaactagaggcgagccttctccttgaacaacataatgaatcttgtgacctctccattcccaaaagttatagccttctggtttaaaagccaacctctcactacctaaagaatcatccaaattctttttaacaaagatgacatttttagaccaagagagaagcaatagttccaaagctagtttttttttaccttgaacagactgagaagaagcagaagaagtatccatgactgaaactccagaagcaacaatccctcccctaattgcaaaatcccttctgctgatttcacatttgtttccttcattgcaaagattaaacagattgttcataattcaggcttaggggcacatctaaatgaaaggttggagttgaatcttacttggtcgacaaattctagcaggaaagattgatcttttagatgatgatgaactgaataactctgtcctaacagacggtgttaaagcacatgaagcagacatcgattattcacagagaacaacctcgtaaaattttcaaggacaagagaaccagatatttcagaactgagagatgcaaaaaggacaaactttttgagcaccgagtgtatgtgtgaacttgcgggagagttgtggcgacccctgagccagacaagtcgaatccgctcgacgaagcagagtgtttctgaaagttgcggtttttatggtttaacgattaggccggtaatttcgacttagctaaaccggccggttcagccgtatttgtcccaaagatcctgattttttactcatcattttgacaaaagctgtcaagttgatattatcaaacagaactattgatttgtacacaacaagatattgaagcactctttcttaaatttcatgttctctaactctcttcctcagatcttgtctcactgttgcataggtgtgacattcttttgaagtaaacagaaataattgacgtggaatgtgattcctgttatcacatagatccatcattagtgaaaagagcaaacaacacagttttgtaagtaagcaaattagagacgtgatacacacgatctagggccttatactttgatgtgacgaatacgagtgttccttccgttttcgtgattcgacaaaatgcctaattgcaacatgaatgcattgacacaaacttctttacaaaagaatacatcctgaaacccattgaatcaaaaactttctaaaacttttttgtggaaattgcaaaaaacaacagatactctcaacgttaagtattttggcatttgaagcatttactcttctcatctcataagcagcttgttattgatgtttcccaaagaaccaatgaaatggaaacctcaaagcaacctgtacggtgtgttattgaaatcggtctaattttggatatattttttcaagttcttcaaaaaaaaaaaatcgaaatagtattgattctcttgaattatgtcacgcattatagataatgtatagatatataattaatagggaaaaaaagaaagtatagggaccaaacacttagatcaaaagcaatggtgtcgcctaccttcctatcacttatcttcaaacccattttcttctttaggtcgcttattttgtgtccctatcagttatgaattataatatgtgatattataatatgtcatatattcatcgagttgccatctctctaatatatgaaatccacttaaattattggtgtaatctatggattgatgaagggtagtaatcatacgtcacaaggatcacgtatagattcacaacaagacattgaaatgatatcactcatgattcaaaccattgtttctattcatttgcaagttaagattcataattcacattccccacattctccaccttcaagcctaagaaagaccctctctctctctctctctaacaaaacaaattggtacaattagaaggttgtcttaccaaaaactcaatgatttgattttacaaaagaggatatttatatgataataccctcatgaaccttaagttttacaaagtttgattattgttgccaaacaaaaagatcctctcaaaaacttgaaaggccaaaaggaaaaaaaaaaacacagagaaaagacacaaaagagactaacttaagagactcctcatctcatgttcataaggacatg

SEQ ID NO: 18666 - DNA, 3003 bp, Unknown
  misc_feature (1)..( 3003): 2750-1469P.txt file - cDNA_ID_1818963; gDNA_ID_2926211; Annot_ID_141995
tattaacacacgaaacaaacaacagttaggtctctttattatgtatcaaaacagaaaaaactctttatgggggtttaatacctgtagtatacttctccagcatttggatctgttgcaggttttgaaatggattcgacgaggtagtcatcgacattagtagagtctatgtacacctgcaaaaacaagaaaaaactaagtacaaagtaacatacttgagatgaagtctgacagaagttaataagacattacactctttaagacagattcgattcgagaaggttgcttggcttgccagaacaagaacccaagaaccacacgttggaaaatctcttttagcggcttaactataaacttggttatcacagtttcatcagcttcctctcgttttctactctcggctgcaaattgtcccgcagagttcagaagtgcaactcccgtgacttgctcgggtaatccaaccgcaactgacaatgccgtaaatcccccaaggctgtaaagaagtggaagaacttgtttcagacttccttgtggaatgtcaaaaagagcttcaaagaagacattcatttacctgtttccaacgacaacagctggttctttcactacctctttcatgaaatcaataacttgatctgtccaaaccatggcatcatactctatgagagctttgtcactccatccgaaaccgagtaagtccaaggcgtaaaccttgtatttcttagccaattcaggaatgttatacctataaaaatctaccgatattagctcgaattcgtatgataaggtaaaaagttgacttaaagcctacactgatcaatagagcatggaggtgagattgaaggtacctccaatgaaagacagaagcaccaaaaccatgaataagaactagaggcgagccttctccttgaacaacataatgaatcttgtgacctctccattcccaaaagttatagccttctggtttaaaagccaacctctcactacctaaagaatcatccaaattctttttaacaaagatgacatttttagaccaagagagaagcaatagttccaaagctagtttttttttaccttgaacagactgagaagaagcagaagaagtatccatgactgaaactccagaagcaacaatccctcccctaattgcaaaatcccttctgctgatttcacatttgtttccttcattgcaaagattaaacagattgttcataattcaggcttaggggcacatctaaatgaaaggttggagttgaatcttacttggtcgacaaattctagcaggaaagattgatcttttagatgatgatgaactgaataactctgtcctaacagacggtgttaaagcacatgaagcagacatcgattattcacagagaacaacctcgtaaaattttcaaggacaagagaaccagatatttcagaactgagagatgcaaaaaggacaaactttttgagcaccgagtgtatgtgtgaacttgcgggagagttgtggcgacccctgagccagacaagtcgaatccgctcgacgaagcagagtgtttctgaaagttgcggtttttatggtttaacgattaggccggtaatttcgacttagctaaaccggccggttcagccgtatttgtcccaaagatcctgattttttactcatcattttgacaaaagctgtcaagttgatattatcaaacagaactattgatttgtacacaacaagatattgaagcactctttcttaaatttcatgttctctaactctcttcctcagatcttgtctcactgttgcataggtgtgacattcttttgaagtaaacagaaataattgacgtggaatgtgattcctgttatcacatagatccatcattagtgaaaagagcaaacaacacagttttgtaagtaagcaaattagagacgtgatacacacgatctagggccttatactttgatgtgacgaatacgagtgttccttccgttttcgtgattcgacaaaatgcctaattgcaacatgaatgcattgacacaaacttctttacaaaagaatacatcctgaaacccattgaatcaaaaactttctaaaacttttttgtggaaattgcaaaaaacaacagatactctcaacgttaagtattttggcatttgaagcatttactcttctcatctcataagcagcttgttattgatgtttcccaaagaaccaatgaaatggaaacctcaaagcaacctgtacggtgtgttattgaaatcggtctaattttggatatattttttcaagttcttcaaaaaaaaaaaatcgaaatagtattgattctcttgaattatgtcacgcattatagataatgtatagatatataattaatagggaaaaaaagaaagtatagggaccaaacacttagatcaaaagcaatggtgtcgcctaccttcctatcacttatcttcaaacccattttcttctttaggtcgcttattttgtgtccctatcagttatgaattataatatgtgatattataatatgtcatatattcatcgagttgccatctctctaatatatgaaatccacttaaattattggtgtaatctatggattgatgaagggtagtaatcatacgtcacaaggatcacgtatagattcacaacaagacattgaaatgatatcactcatgattcaaaccattgtttctattcatttgcaagttaagattcataattcacattccccacattctccaccttcaagcctaagaaagaccctctctctctctctctctaacaaaacaaattggtacaattagaaggttgtcttaccaaaaactcaatgatttgattttacaaaagaggatatttatatgataataccctcatgaaccttaagttttacaaagtttgattattgttgccaaacaaaaagatcctctcaaaaacttgaaaggccaaaaggaaaaaaaaaaacacagagaaaagacacaaaagagactaacttaagagactcctcatctcatgttcataaggacatg

SEQ ID NO: 18667 - DNA, 3003 bp, Unknown
  misc_feature (1)..( 3003): 2750-1469P.txt file - cDNA_ID_1818967; gDNA_ID_1620618; Annot_ID_46947
tactttcatctaacctatacatctactgaatctaaacaggtctaccacctactctaaacgcgtgccttaccaaaacttggaaaattttcaattttgattatcatgtgggtgaaaaacatcaaaaaattatgttgatgtattatctaaagtcattcacaattaatcaagaagtgtacttgttgtgagactgagagtagctttcacttgtcaatgagtaggtacctattcatttggccaataacaaaatgacaacaaaaatttacctaaaacttaaataatttagtgatttggtcagtaagcctaattaaaccctcaagcagtttacatcacaatcaagcttgaagcttttatttgatttggccaatgaaggagtttataaccctaaaacagttcacatcacaacaaaaccatttgactcgttttctgattaatttggccaatgacgagtcatcttgggcttcacatatggacattgatgttgtgtccatattacgacacacctttatcattttccatttcaaaaaaagaaaacaaaaacacccatgctattttttaaaacacacttaagaaacaaaaatcaaattaaatctttaacccatgatatctactaccaacaactaacaatattttacatcaagtgtgtcgtcaatagtagcactattatctaatttagatctagataaagccagataacactcttttgaactttccatgcttgaatatttcttctataatatcatcattaagaaatcttctcccattctttggcttcttttagaaaagatactctattagattttttagcgagtgaaagaagaataaaagatggaccagtcaacaaatggagacgaacaagtctttatacattgttgataatttgcgtttgcgaaggatgtggtcacaagaaaagaaagtattccgtccctctctctagctaatggcgtgtgatgtgactactacactctctcttctatacatgtttattttttccagaaatgtctgtttgaatataaactttttaagtgaaattgttgggcacaacagaaaactttaacaccaaaaaaaacgcgacataacatgttgcattgttgattagtttctttctactagagattagcattctcagactccgaacggtgactgcgttttacagtgcggaaaaaatgcggtacggtttaaatattaacgaaaatacataaatacatatgtataaatagagattttaatactgttatagcactgttgcggtacggttttgggtgcggttttgatcaccatttacagttttttttattcagattagatttctgtaggtaattttgattaaaatcttttggtgataacgcagtcttttcgtctggactggacccacgcgaggacccaaaatttgaccaatatgcgatccaataaacaaaaaaatggtaatttaaaatgaaataatccacatgtatgatgtcaaatgtattattttacattcacaattaaatacaggtcagcgaagtaattgttttgacaataaaaatggtaagaattacttggaacgtcatctaacatcattttaattaatactaacatcatcattttaagtaaacaatttttttagaataatagacagaaattaaggtggagttcatctttttgataattagcattaatccctactctaccatgtttataattgaaatcattatttcatattttgataattagaattaatccctactctaccatgtgtataattaaaatcacaatttcatgaaaaagatcaactaacttaaccaaaactatagtcaatgtcttttactgaaaaattcaagaataaaacaatcttagttacgtcactatcaatctccattagaaagaatggtttaaaatcattagtttttaacaaactctaatcatgattattaaaaaaaccaaagaagcaaggaagacttttattcaaaagattaaattttcttccatttaaaaaaggaataaaaagagatgtcaaaataattactacaaaaaacattagaatttgttggatatgtaattgacctaagaccataacgagcactcagacctcgtcctttcaatttagtctgcgcttgacacggcactcttaaaaataaacacggtgacgtagacgccgtcaccgtccaatctcatcgtcccttttttaattagcagctcaacgatttaaaatcgactgtcatttacaaaggctgtcatttcaacactcttcagtccttcttccttataatcctctcatcttctttttctccaggtttttaccaaccagttttttttttttcaaccctcgagatctttctttgcacgaacaaacctcgaaaaactcattctttatcttgacccatctgaaaaagtttctctttttttgtcggaataccatagagtttcattattttcgttttagggttctttttttgtaataaataattggaagcagaggagctatgctcaagttctcagatgaaattctcgcttttgatcatcagttcttgtttctctttctgatttacgctggatttgcaagggaaacactctgactttgtcaggactcttctgtgaaattctgcaagtttatgacttttctagtgctttttaactgtttgtgagtttgaagaaaacaaatttcaattgagttgctttggaatccgttgacataatagggtaagtcaattttcttactactaatatttatcccattaatgcttgagaattgttcctaatagaactctttttgctgtttgttaaatttgcagaatttagaaacttctcgtttagatgaggatcgattacacagaacggatgcctcaatcctataaggtttgttgttttatcaaatatgtcttatgatggagttttggtgtcttaaggtttgttactgtaatgactgacatgttgtgttgttctgtttcagatgcactcttccattgtgcttagaattgaagaggctagttgatagaatcatgagaatctttcctgatatagaagatg

SEQ ID NO: 18668 - DNA, 3000 bp, Unknown
  misc_feature (1)..( 3000): 2750-1469P.txt file - cDNA_ID_1818967; gDNA_ID_2926211; Annot_ID_141996
tttcatctaacctatacatctactgaatctaaacaggtctaccacctactctaaacgcgtgccttaccaaaacttggaaaattttcaattttgattatcatgtgggtgaaaaacatcaaaaaattatgttgatgtattatctaaagtcattcacaattaatcaagaagtgtacttgttgtgagactgagagtagctttcacttgtcaatgagtaggtacctattcatttggccaataacaaaatgacaacaaaaatttacctaaaacttaaataatttagtgatttggtcagtaagcctaattaaaccctcaagcagtttacatcacaatcaagcttgaagcttttatttgatttggccaatgaaggagtttataaccctaaaacagttcacatcacaacaaaaccatttgactcgttttctgattaatttggccaatgacgagtcatcttgggcttcacatatggacattgatgttgtgtccatattacgacacacctttatcattttccatttcaaaaaaagaaaacaaaaacacccatgctattttttaaaacacacttaagaaacaaaaatcaaattaaatctttaacccatgatatctactaccaacaactaacaatattttacatcaagtgtgtcgtcaatagtagcactattatctaatttagatctagataaagccagataacactcttttgaactttccatgcttgaatatttcttctataatatcatcattaagaaatcttctcccattctttggcttcttttagaaaagatactctattagattttttagcgagtgaaagaagaataaaagatggaccagtcaacaaatggagacgaacaagtctttatacattgttgataatttgcgtttgcgaaggatgtggtcacaagaaaagaaagtattccgtccctctctctagctaatggcgtgtgatgtgactactacactctctcttctatacatgtttattttttccagaaatgtctgtttgaatataaactttttaagtgaaattgttgggcacaacagaaaactttaacaccaaaaaaaacgcgacataacatgttgcattgttgattagtttctttctactagagattagcattctcagactccgaacggtgactgcgttttacagtgcggaaaaaatgcggtacggtttaaatattaacgaaaatacataaatacatatgtataaatagagattttaatactgttatagcactgttgcggtacggttttgggtgcggttttgatcaccatttacagttttttttattcagattagatttctgtaggtaattttgattaaaatcttttggtgataacgcagtcttttcgtctggactggacccacgcgaggacccaaaatttgaccaatatgcgatccaataaacaaaaaaatggtaatttaaaatgaaataatccacatgtatgatgtcaaatgtattattttacattcacaattaaatacaggtcagcgaagtaattgttttgacaataaaaatggtaagaattacttggaacgtcatctaacatcattttaattaatactaacatcatcattttaagtaaacaatttttttagaataatagacagaaattaaggtggagttcatctttttgataattagcattaatccctactctaccatgtttataattgaaatcattatttcatattttgataattagaattaatccctactctaccatgtgtataattaaaatcacaatttcatgaaaaagatcaactaacttaaccaaaactatagtcaatgtcttttactgaaaaattcaagaataaaacaatcttagttacgtcactatcaatctccattagaaagaatggtttaaaatcattagtttttaacaaactctaatcatgattattaaaaaaaccaaagaagcaaggaagacttttattcaaaagattaaattttcttccatttaaaaaaggaataaaaagagatgtcaaaataattactacaaaaaacattagaatttgttggatatgtaattgacctaagaccataacgagcactcagacctcgtcctttcaatttagtctgcgcttgacacggcactcttaaaaataaacacggtgacgtagacgccgtcaccgtccaatctcatcgtcccttttttaattagcagctcaacgatttaaaatcgactgtcatttacaaaggctgtcatttcaacactcttcagtccttcttccttataatcctctcatcttctttttctccaggtttttaccaaccagttttttttttttcaaccctcgagatctttctttgcacgaacaaacctcgaaaaactcattctttatcttgacccatctgaaaaagtttctctttttttgtcggaataccatagagtttcattattttcgttttagggttctttttttgtaataaataattggaagcagaggagctatgctcaagttctcagatgaaattctcgcttttgatcatcagttcttgtttctctttctgatttacgctggatttgcaagggaaacactctgactttgtcaggactcttctgtgaaattctgcaagtttatgacttttctagtgctttttaactgtttgtgagtttgaagaaaacaaatttcaattgagttgctttggaatccgttgacataatagggtaagtcaattttcttactactaatatttatcccattaatgcttgagaattgttcctaatagaactctttttgctgtttgttaaatttgcagaatttagaaacttctcgtttagatgaggatcgattacacagaacggatgcctcaatcctataaggtttgttgttttatcaaatatgtcttatgatggagttttggtgtcttaaggtttgttactgtaatgactgacatgttgtgttgttctgtttcagatgcactcttccattgtgcttagaattgaagaggctagttgatagaatcatgagaatctttcctgatatagaagatg

SEQ ID NO: 18669 - DNA, 3000 bp, Unknown
  misc_feature (1)..( 3000): 2750-1469P.txt file - cDNA_ID_1818973; gDNA_ID_1620618; Annot_ID_46945
attaacaaaaaaagtaacacgaaaataaaattattacatgtatccagatttttttcgtgtattcaaaaatgatttggcggcttttactttttacttacaatattgcagccaaaatagtcgtctccggacaattacgtgcagtgtcaggaggcaaaatgaattatttttgtaatactacattgtattttatccccaaaaacagaagttaaggttctgatgtttatgatgacatcaaaatacgtggattcgggaacatatatggtaattaaacaatggaaatttcatttgcatgcatttaatttgtgcccccataataacgccaccatgagatttctttatatttaacctcgaaaagaagtaattaagagcatcttcgaaacgtcaaatgaggtccacttcaaaaggatcaggtaagatcggaatctaatcaaataaagaagaaaagagaatttgtcccccctatggactgagacaacaacaatattattagtcccgtcattagatagggaggtagtactattagtccatactgtaatatatatacagtattaggaaccccacattatacgtaaaaaatatccgcaaatgcattgttaattgagtacgttgaacattgacatataggttaaatgggtatagggtaaaaccccatatatggcctgttcaaataatgaaatcgttatcaaaatcactggaaaaagcaagtttttcgttcttaagaaatcataataaacctaactgatcaaacccaacgtaatctcaacgtattttgggtacaaatttgctataagaaatcacatgactagccaaaagcggacatagaaacaacttattcatacaaaacttggaagcaggaatagtttagacgttcgtaatggaagagtaatgaatgtgagtgcttagcataagcaatgaaggcgtagacgtgaagttacggatccaaatggaagagtccaaagaaatattccaagaaggcaagttgttgagtgggaagatgaagttgaaaggagatgagtatctgccaaaagaatgttttatcacaaagcttagaatagagaccaaaagggtactacgagagctgatatttttaaactttttggagaagaaatacagtccatatcttcatctttttgttattttatatcttataataataagtacaataaaacatagcgagtggagagggatcagagtagttaaacaattaatgtccaaaacaaaggagcagaagaagcgtaggaaaggcgcagatgtcgtcgataaaattcatctacgagatcttcccaagatttggaatttgtccacttgtattgccactcaatgttaaataagagagaaatataaacaagaacacctgaatatcctcgaaaaggtgctgttttttttcttttctttttttcgtttgtgtcatgcattactaaaccaaagctaaatatgcatctcgtatatgaacaaactaaacacacacacaaaaaaaaaaaaaaaaaaaacactttgttggagtgtctttgtaaaagtacttaatttatatcttacgcttgtgtatatctttagaattactatcattaaaatatcttttaagggttatacacaaaaataattctgttaagttttaataaagttgcaaacaaataatatgacaagtattgacaatttttcgtacagaactgtttcaactcattctccggattttatgtatataaaattaatttttaattaagcattagaaaacattttgaaatagaacaatttctagaattttatctccatgctttacagttttatatccacgttaattttttttatgcatgcgccaaacggagtacatctttaaaaaggagtggtatgcaacaaaagtagctgctcaagtttactataaggtttaaatcagccaatcttcttagcccattttaagaaaagaatgacaaagcaaatattcctatacctataaaagataaatattgactaatttgatgacgaattaatcaataatactataacctaacaaggttcggttcttatcatcttatggttgccaaagaatgtttttgtgatcacggtccagaggattacatgtttaggggctaatctttcattattaattaagccaaatcacttcttagtactactctgatatttgtcttctcattggaaggaatataatttaaagctaaagagcatcaagccatgtaaagagtttgatgatattcactaataagggttgcatgcacgagtttctgttcttatcaacagatgctcaacacgagccaaatgtataaaagagatcactcagataattctattaccaaatttgctataagagccatgagacaagaatggcaagaatcgacgaagtgggattgtgttttatttttatgacattaccaaatgacttcgactatatatggcatctacgaaaagacatatcatcactaacctatccatcataaacagatatttgatatttccaatcaaaatggatggagatcaaaagaagcatcaaacataatctaacaatgtcatgtgtttataataagcatccgatactacggtctagtgatgactagatctatacaagagccttaaagaggtaagggaaggtccacaaacatgcatgggttactgacttagtcgtttactgtacggaaatatagtagcaattaatacaaaagaaaaacggggaagaaaacatcttatatttctctattgcaaggtcaaggaatctcaagtttcattggattgtttcacaattgtgtgtaccttctctaagactttatgtggttgctaaaagaaatagtcactctcttaaagtatatattcttccaactggcttaaccccacaccatgctttttcctcctacttataaggagcttctccttctcttagctaaccaaatcaactccttttttatcaagtcatagatacatcttccttcttatttttttctccctcccaagaagcagatcttgtactctcgatatacatacttattttatatg

SEQ ID NO: 18670 - DNA, 3003 bp, Unknown
  misc_feature (1)..( 3003): 2750-1469P.txt file - cDNA_ID_1818973; gDNA_ID_2926211; Annot_ID_141998
aaaattaacaaaaaaagtaacacgaaaataaaattattacatgtatccagatttttttcgtgtattcaaaaatgatttggcggcttttactttttacttacaatattgcagccaaaatagtcgtctccggacaattacgtgcagtgtcaggaggcaaaatgaattatttttgtaatactacattgtattttatccccaaaaacagaagttaaggttctgatgtttatgatgacatcaaaatacgtggattcgggaacatatatggtaattaaacaatggaaatttcatttgcatgcatttaatttgtgcccccataataacgccaccatgagatttctttatatttaacctcgaaaagaagtaattaagagcatcttcgaaacgtcaaatgaggtccacttcaaaaggatcaggtaagatcggaatctaatcaaataaagaagaaaagagaatttgtcccccctatggactgagacaacaacaatattattagtcccgtcattagatagggaggtagtactattagtccatactgtaatatatatacagtattaggaaccccacattatacgtaaaaaatatccgcaaatgcattgttaattgagtacgttgaacattgacatataggttaaatgggtatagggtaaaaccccatatatggcctgttcaaataatgaaatcgttatcaaaatcactggaaaaagcaagtttttcgttcttaagaaatcataataaacctaactgatcaaacccaacgtaatctcaacgtattttgggtacaaatttgctataagaaatcacatgactagccaaaagcggacatagaaacaacttattcatacaaaacttggaagcaggaatagtttagacgttcgtaatggaagagtaatgaatgtgagtgcttagcataagcaatgaaggcgtagacgtgaagttacggatccaaatggaagagtccaaagaaatattccaagaaggcaagttgttgagtgggaagatgaagttgaaaggagatgagtatctgccaaaagaatgttttatcacaaagcttagaatagagaccaaaagggtactacgagagctgatatttttaaactttttggagaagaaatacagtccatatcttcatctttttgttattttatatcttataataataagtacaataaaacatagcgagtggagagggatcagagtagttaaacaattaatgtccaaaacaaaggagcagaagaagcgtaggaaaggcgcagatgtcgtcgataaaattcatctacgagatcttcccaagatttggaatttgtccacttgtattgccactcaatgttaaataagagagaaatataaacaagaacacctgaatatcctcgaaaaggtgctgttttttttcttttctttttttcgtttgtgtcatgcattactaaaccaaagctaaatatgcatctcgtatatgaacaaactaaacacacacacaaaaaaaaaaaaaaaaaaaacactttgttggagtgtctttgtaaaagtacttaatttatatcttacgcttgtgtatatctttagaattactatcattaaaatatcttttaagggttatacacaaaaataattctgttaagttttaataaagttgcaaacaaataatatgacaagtattgacaatttttcgtacagaactgtttcaactcattctccggattttatgtatataaaattaatttttaattaagcattagaaaacattttgaaatagaacaatttctagaattttatctccatgctttacagttttatatccacgttaattttttttatgcatgcgccaaacggagtacatctttaaaaaggagtggtatgcaacaaaagtagctgctcaagtttactataaggtttaaatcagccaatcttcttagcccattttaagaaaagaatgacaaagcaaatattcctatacctataaaagataaatattgactaatttgatgacgaattaatcaataatactataacctaacaaggttcggttcttatcatcttatggttgccaaagaatgtttttgtgatcacggtccagaggattacatgtttaggggctaatctttcattattaattaagccaaatcacttcttagtactactctgatatttgtcttctcattggaaggaatataatttaaagctaaagagcatcaagccatgtaaagagtttgatgatattcactaataagggttgcatgcacgagtttctgttcttatcaacagatgctcaacacgagccaaatgtataaaagagatcactcagataattctattaccaaatttgctataagagccatgagacaagaatggcaagaatcgacgaagtgggattgtgttttatttttatgacattaccaaatgacttcgactatatatggcatctacgaaaagacatatcatcactaacctatccatcataaacagatatttgatatttccaatcaaaatggatggagatcaaaagaagcatcaaacataatctaacaatgtcatgtgtttataataagcatccgatactacggtctagtgatgactagatctatacaagagccttaaagaggtaagggaaggtccacaaacatgcatgggttactgacttagtcgtttactgtacggaaatatagtagcaattaatacaaaagaaaaacggggaagaaaacatcttatatttctctattgcaaggtcaaggaatctcaagtttcattggattgtttcacaattgtgtgtaccttctctaagactttatgtggttgctaaaagaaatagtcactctcttaaagtatatattcttccaactggcttaaccccacaccatgctttttcctcctacttataaggagcttctccttctcttagctaaccaaatcaactccttttttatcaagtcatagatacatcttccttcttatttttttctccctcccaagaagcagatcttgtactctcgatatacatacttattttatatg

SEQ ID NO: 18671 - DNA, 3000 bp, Unknown; identical to SEQ ID NO: 2965
  misc_feature (1)..( 3000): 2750-1469P.txt file - cDNA_ID_1818976; gDNA_ID_1620618; Annot_ID_46944

SEQ ID NO: 18672 - DNA, 3003 bp, Unknown
  misc_feature (1)..( 3003): 2750-1469P.txt file - cDNA_ID_1818976; gDNA_ID_2926211; Annot_ID_141999
taagaaagcattcataaataatagacatgcactctccagtttcttatgcgtgtcttcttgtttcaccaggccagagaaaaaaaaaatctagctttatgatatagtaaacaccaccgtttcccatatctatgaactgtcccaacttctaactgtggggccaaaagcaatctagtaacagagaattcaaaagttagttttgtcaagttcttgaaattgatcattagcccattagctctatatatatatataaaaagtcatagacgcaaaaagccatttcctggtgaaaagatgaaaagcttccatccatctttttatatgtcttttagcaaacaaaaatcaaagtcccacatagtgataggctgatagcatgttccatgtttcttgtctttaccattgcaaaaactactccacttacatagatagtattttgcccccaaaaaacaaaaacataaatagtataacgtaacccccttctctactaacttttggttagcctatagttaaagttcagaattattaaaattgctaaatttgtgtaacaagattatctagctgatttcttcattttgatatctacatctttttagtcttttgaagtagttaactcatctggattttatgtcttgcaggctctactgaagtggacatggttccaaaaccattcacaaagcacatctaagcaaagatatctaaatgtatttacttgtttttgtgttacgaatatgtaagaattatctaaatcaatcaatgtggtttcatatagtataaagtattaacaatcggacaaactatagttctccttgaattccatccatacacaaatctttacaaatcgatctaagtctaacaaacaagatcgataggccaaatatcaaaactcctgaaaaaacgattcagaacatgttttgattcacttttgcactcatctcgtcgttttggcgcgtagcctgatgagaatctccatgaacattgtaatttgaggaaatttgatacggtttcgcagaaaaatcaagagatcatcaaataaaagtaatagagtagaaaattgtgtatttacttacggataaatcaatactggatcgtttagttctcgtcagatacctcatatacacgcgtctgtgtttggggggaaactttttgcatgggatgtaatttgaatacaaacgggctaaaatcgacggtggtcataactattgtccccgaaaatgtagcgttcttattttgttttgtttttttaactttcgttgtcatataaatatcatagctttatttatggttttcgtttataatatttgcgttgatgaaaattaaaacaactactataactaaggagagtacatgcactcatgcatgcatgcaaacacggcatatcgtaaaattgtaaataagcaaattcatttatcgtgtgtttttaaaacaaacaaaaaatgttatttttataagataaaacactattttacaagatattataatatttttatttttaagtgataaagagtaacagaaacgatagattacctattacaatttttcttaatactaaatttgaaagtcaagatgagaggtccctattgagctataaactttttgtcaatttgattcatctcgagtattattcgttttgtgcaaaaaaataataaaaaaatacattacatatacctttctaaaagaaaagaagagctcaagaggggtatatatattctgtaatatgttagagcacatgccttgtataccgaaaaattgcgacccatatatgaaccatgacggataattggatttatacagtccatattaataattacaattcgaattcgtttaagaaaaagaaaagacaaactattatctgtttttttctgaaaaagagagacattattctgtaatattttaaagcacaagtctcgtatatattcctggcacaaaatagcgacccatagtcccatactaacaacaatgaagaactaaataaataaaaatttgaaaactaaaaaaccgtaaatgtctttcagttatttatagaaaatactgcgttcaaaatcgttgcaagtagaactagacaagaactaacgtttttttcaaaaaaaagcattaaacaaaagataattttacagtcaaagtgattaaagttgtggatttttttatacggtgcatgcataaccatttatttcaacttcgaacttcatctttcaactaaatggatgaaattacaattatataaaaaaaaaaatgtttagtttaaaattatgtagtataattaagtggattagatttgtacttaaaaatatgacaaaaatagtagaatatagccgatattttaaacttataaaaatttcaagtacgtacgttcgaataatccttatatccataatccactagctcaaatggtgtgtttttgtttgatattcctgcgagaatatactaatcagtatttggtcgttttaataatttgaatgtggattgtggaataatttcttctaactatattaattatctgaagaacaattatcttacgtacccgtgatctacacaaacggaatcttataaatatatatctttcgtcgctgagtggaggagaacaaaacttagcaaacttcaaacatttttttaaaaaccaaaattttacactaatggtttagtcgtggttcgagttaagaaaaaaaagaatctgtttagaacatggcccaataatagttcctatgaaaatatgctttttgattattctccaagcaataataagcccaattatatttaggcccagatctgctttttgattattctccaagcaaagtaaacttatacggtcgagattttattatcattttattttttgtccttttgaaaaataccgtttaaaccctaaaagctaactgccaccgtgggtttatggtcggcaaaacccagaaatcgaccatcattcaccgtcaatttcccaactttcatgaacctttagctctatttctcaatctctgaataagggtcaatcttttctttttatcaaaatcgatg

SEQ ID NO: 18673 - DNA, 3003 bp, Unknown
  misc_feature (1)..( 3003): 2750-1469P.txt file - cDNA_ID_1818992; gDNA_ID_1620618; Annot_ID_46938
ctagagtagctagctcctggagaagtaatacgagtatcgaaggtctctgatttttgatatgatggcgtttggactcgattcgagcctgcagtttcgattgatatatactctgttgttgtatcatttcgtacagtagttttttttagacttttgcattctgatgggatctttcaaatttaataagtcagtttcagtttatgcattgatcattgtttgatatcatacaactctgtggtgttactacttcaaattagttctatttgatgattttatatataaatttcaagtttgatttatatctaatttggttttattaaactcttgcaaccgtgggctttccgtcttcaggatgcttcaagtggggtggaatattggagcgaccatattagaaatgattctcggtagcccatggagttgatccaaataggcaaggtttgtgctaatagatctgtaagctcaaaatggtagagctctcattatgagaggttggtggttcgaatccatccagatctgtcgactttctatcctcttttacctttatcatgtcattgtataacacaatatttcaaatctatgtgtgttgaatatgatctgccgatgttattgctaaaaccagggcagccgtaaaagggcctctgtaaaatttagcatctgccacggaggaaggtggaattgatcatttttaaagcaacggcgtctaaacatggactgacatcctaagtcctaactagttgtgttatttggactacaagcaataagcaaggagcataattcacttaacagtaataaaaaaacatactaatgaaagatgactgcaaaactctgttaatcattgttgggttatgatatttatcaaggctaactcattcaccatctctatgtattcgtcatttcttagttgataaagaatatttttataatataaaaaaaaagttaaggtaattaatttcatattttttaaaggaactttaaaaattcatgtactttcttaaacaaacaatgtcatattgaatatatggtttaaatatgttatatatagaggtggacaatccggtttacttggtttggtttttaggttttagaaagagtgaaaaccagtgttacattttcgttttgctataatgctagtttttttttttttttttttttttttaaaacctagtattaataatttctaataataatttgtgtgatacagactattcaatattataaatacctttcattcatatagataacattatgcatataaagttttgttaaattccagttgattgaggtcggcaacatttgaatactaatattttttatgtggtaacaagtaacaacaacaatttaacaacaactgataagatgttctttcgattatatgaagaaaacgtcgactccaaatacagagaaactatcaatataaaataacattattctcagtgtatacctatttgatagaagaccaatatatatcttggtagaagagatgatatgaaagtatcagattaagaaaagatttggtgtcggattaacgtcacatggtgttattttaaattgtatgccatttaataatcgtccattgtcaatgctgttaatataatacaaaaccaaatatatgttaactaacatagtccaggaaccgtttaatttgattaaaccaaatcatacgcacatgattgcgatgataaaccgaatctttaatattataaaaatcaatagatcgagtaaaacgttacattttaattattattattagctgatgctgtcctttatggacttttcttcttcgtttttttgttcttctacctaaaaccatgaaagagtggtttgcacataaatacataatgaatatagtatgaaaaaactgttacatttttttaattattttgaagctaattagtgaactcaataagttttctaatcataatttacctgttctctatcgtgacacaataaacaaagacagataagagttagttaaacgtgaaagaaggttagaattttggaaaatgaccaaatttgttattacttcaccaaattcggatcttgtcctcttgtcataaaatcatttcagatctgagttatttggtccaacgccaatactgaaaattaatgttattaaagtaaatcatatttattattttcaaccaatggggcctttcacaataacaaacaaagggccagctttaaagttttattgaaattttacatgccacataaattggttaaaatacattttcttcacgtttctcgctttttaagtccctttgaagtgggaatgatactcgcgtgacgaccaaactccatcgagcctctctctctctctctgtgatcagtttaatctactgaaagaaagaaagaaagaaagaaagatccgtattattaggtaagaatgagattcccttttacgtttcgattttgattcgtttgtgtttgattctcgatcgttttgcttcgatttagcttccttctgtttttacaagtctctcttgattagaaatgtttaggtttcaatgtttcatgatcatatttagaaaaaagtttcatggtgaccaaaaaagaaagaaaattttgatggctgagagatgtcagagtcttgttttgtttttttgataaattctctgtttgtgtgcttttaaaaagtcaaatataagaaattctttgaatcatttaaagccgtatttatgtccttttgacaagtcgatttaatgctttctagaagagagtttatcagatgttaagaagattcaaagttggattataacgaaaatttgtatacctcattagagatttttcaagtggtaaatactaatagaattcatgatcccgttttagatgtaagatttggttgtgtttatcagttttctattaatagccgatattattaaaaccttttgcttaatcttggatctgatttaatttgctttaaattggacttgaaagaaatctgaatttgatttgatcgtttctaggcttcgaagctgtctcaagattgttgtttaattaaacatg

SEQ ID NO: 18674 - DNA, 3003 bp, Unknown; identical to SEQ ID NO: 18673
  misc_feature (1)..( 3003): 2750-1469P.txt file - cDNA_ID_1818992; gDNA_ID_1620618; Annot_ID_162119

SEQ ID NO: 18675 - DNA, 3000 bp, Unknown
  misc_feature (1)..( 3000): 2750-1469P.txt file - cDNA_ID_1818992; gDNA_ID_2926211; Annot_ID_142005
gagtagctagctcctggagaagtaatacgagtatcgaaggtctctgatttttgatatgatggcgtttggactcgattcgagcctgcagtttcgattgatatatactctgttgttgtatcatttcgtacagtagttttttttagacttttgcattctgatgggatctttcaaatttaataagtcagtttcagtttatgcattgatcattgtttgatatcatacaactctgtggtgttactacttcaaattagttctatttgatgattttatatataaatttcaagtttgatttatatctaatttggttttattaaactcttgcaaccgtgggctttccgtcttcaggatgcttcaagtggggtggaatattggagcgaccatattagaaatgattctcggtagcccatggagttgatccaaataggcaaggtttgtgctaatagatctgtaagctcaaaatggtagagctctcattatgagaggttggtggttcgaatccatccagatctgtcgactttctatcctcttttacctttatcatgtcattgtataacacaatatttcaaatctatgtgtgttgaatatgatctgccgatgttattgctaaaaccagggcagccgtaaaagggcctctgtaaaatttagcatctgccacggaggaaggtggaattgatcatttttaaagcaacggcgtctaaacatggactgacatcctaagtcctaactagttgtgttatttggactacaagcaataagcaaggagcataattcacttaacagtaataaaaaaacatactaatgaaagatgactgcaaaactctgttaatcattgttgggttatgatatttatcaaggctaactcattcaccatctctatgtattcgtcatttcttagttgataaagaatatttttataatataaaaaaaaagttaaggtaattaatttcatattttttaaaggaactttaaaaattcatgtactttcttaaacaaacaatgtcatattgaatatatggtttaaatatgttatatatagaggtggacaatccggtttacttggtttggtttttaggttttagaaagagtgaaaaccagtgttacattttcgttttgctataatgctagtttttttttttttttttttttttttaaaacctagtattaataatttctaataataatttgtgtgatacagactattcaatattataaatacctttcattcatatagataacattatgcatataaagttttgttaaattccagttgattgaggtcggcaacatttgaatactaatattttttatgtggtaacaagtaacaacaacaatttaacaacaactgataagatgttctttcgattatatgaagaaaacgtcgactccaaatacagagaaactatcaatataaaataacattattctcagtgtatacctatttgatagaagaccaatatatatcttggtagaagagatgatatgaaagtatcagattaagaaaagatttggtgtcggattaacgtcacatggtgttattttaaattgtatgccatttaataatcgtccattgtcaatgctgttaatataatacaaaaccaaatatatgttaactaacatagtccaggaaccgtttaatttgattaaaccaaatcatacgcacatgattgcgatgataaaccgaatctttaatattataaaaatcaatagatcgagtaaaacgttacattttaattattattattagctgatgctgtcctttatggacttttcttcttcgtttttttgttcttctacctaaaaccatgaaagagtggtttgcacataaatacataatgaatatagtatgaaaaaactgttacatttttttaattattttgaagctaattagtgaactcaataagttttctaatcataatttacctgttctctatcgtgacacaataaacaaagacagataagagttagttaaacgtgaaagaaggttagaattttggaaaatgaccaaatttgttattacttcaccaaattcggatcttgtcctcttgtcataaaatcatttcagatctgagttatttggtccaacgccaatactgaaaattaatgttattaaagtaaatcatatttattattttcaaccaatggggcctttcacaataacaaacaaagggccagctttaaagttttattgaaattttacatgccacataaattggttaaaatacattttcttcacgtttctcgctttttaagtccctttgaagtgggaatgatactcgcgtgacgaccaaactccatcgagcctctctctctctctctgtgatcagtttaatctactgaaagaaagaaagaaagaaagaaagatccgtattattaggtaagaatgagattcccttttacgtttcgattttgattcgtttgtgtttgattctcgatcgttttgcttcgatttagcttccttctgtttttacaagtctctcttgattagaaatgtttaggtttcaatgtttcatgatcatatttagaaaaaagtttcatggtgaccaaaaaagaaagaaaattttgatggctgagagatgtcagagtcttgttttgtttttttgataaattctctgtttgtgtgcttttaaaaagtcaaatataagaaattctttgaatcatttaaagccgtatttatgtccttttgacaagtcgatttaatgctttctagaagagagtttatcagatgttaagaagattcaaagttggattataacgaaaatttgtatacctcattagagatttttcaagtggtaaatactaatagaattcatgatcccgttttagatgtaagatttggttgtgtttatcagttttctattaatagccgatattattaaaaccttttgcttaatcttggatctgatttaatttgctttaaattggacttgaaagaaatctgaatttgatttgatcgtttctaggcttcgaagctgtctcaagattgttgtttaattaaacatg

SEQ ID NO: 18676 - DNA, 3000 bp, Unknown; identical to SEQ ID NO: 18675
  misc_feature (1)..( 3000): 2750-1469P.txt file - cDNA_ID_1818992; gDNA_ID_2926211; Annot_ID_202650

SEQ ID NO: 18677 - DNA, 3003 bp, Unknown
  misc_feature (1)..( 3003): 2750-1469P.txt file - cDNA_ID_1818996; gDNA_ID_1620618; Annot_ID_46937
ggcaaggagatattggaattggtatctaattcccctgaagaagcagaactccgctttcaagacatcaaagctgctgcgggaatcgacccgaaatgcgtagacgatgttgtgaaaatggagggtaagaagactcatggtgaaggagtgtggaaagagctcattctaagaccaactcctgcagtgagacgtgttcttttaactgctcttgggattcatttcttccaacacgcctccggaatcgaagcagtgcttttatacggtccgaggatctttaagaaagcaggaatcacgactaaagacaagcttttcttggttactatcggtgtcggaatcatgaaaacgacgtttattttcactgcgactttattgttagacaaggtaggtcgaaggaagcttttgttgaccagcgttggaggaatggtcattgcgttgacaatgttgggatttgggcttacaatggcccaaaatgctggcgggaaattagcgtgggctttagtactgagcatagttgcggcttatagtttcgtggcgtttttctctattgggctcggcccaataacttgggtctacagttctgaggttttcccgttgaagcttagggcacaaggagcgagtctcggcgttgcggtgaacagagtaatgaacgccaccgtgtcgatgtcgtttttgtcgttgactagtgcgataaccaccggtggagctttctttatgttcgccggagttgcggcagtggcgtggaatttcttcttcttcctcttgccggagacgaaaggaaaatcacttgaagaaatcgaagcgctttttcaaagagacggtgataaagtacgcggcgaaaacggtgcagcttagcatgatgaatataatgttatcattaaatgaaacgacagcgtttggggtttctcactcattacacgacgtcgtttagttgtacttttgtgtggcttttatcaaattataaatcaacggtcaagattgacgcacgctttagtatttttttcattaacaatttaagatcaacggctaatacatcgccaattactagctaataatggcccagtagtgtgaactgtgaagagagtgaactgatttttttttttttaaagttctctctcagatttaacaaaatcgagccgacactttcccaattgaactgaatctactgaaatcgattcacgagagctcagatttggtgttagcatcactcactaagcaagattattgagttgtaattagtatttgagatcaagatgaaggaggacgatgcattgccgacgacgacgacgactggtacggcgacgggaacagctatggcgaattcgaagaaggaaagctctgactcggtcttgtttggaagaggtcgatataagttctgggcgtttgctgcgattttgcttttggctttttggtcgatgtttactggcaccgtcactctccggttatctaccgggaatctgaaccggttatcggaagatctagggattccgaactacgataatctcgacgttctggttgtttactctctctgtttctatttcggttgatttggtgtgtaatttgattgtagtctggtttttgaggttttggaatttgtggtattttttaggaaatggaggagagagagaaagtggtgaagcatatgtgggatgtgtatactaatagtcgtcggatcaaattgcctagattttggcaagaggcttttgttgctgcttatgaagaactcactagtgatgtgcctggggttagagaagctgctattggtgaaatcgccaagatgtcggcgcggtcgatcactcttgatccacctccttctagatcaaggtgatgattcttgctttaaatttcgatttgttttcactatattagtcacttagaatcagtaggtagaggtatagatagatggtagtcgatcttgcctctgtgctggagtaaatagtaatgttcaatctggtatctggagtttagatcttgagtgtacctagcttaggttgttcagtttgatggtcaagttcttctgtgtctggagatatgccattaagatttagtgttactctttaagttattacctgttaaagttagtttgtgtatactctatctttgtttgtgattggtgaccagctatatggatccatgcttgatatccaaacatataaagacctgtatgaactttcgatacacatagtaccttataatggtcaaggtctaatttttctggagactgggtatgtagatctagtgtaagatactggtatgcataatagcatgtggttgagtagattatgtcttcttaaaattatgttatgagatttcagataggtatagctttcggttttgtttcttgcatttaatgctaaacctcttttgtgaaagttggttgatcaagtttggtagagcttccatcacccaccttagcttcttgatcaggattcatcttttaatttcttctcttaaattgttcatagacttaacctgagtgttaaactcttttttcttttctttatcggtttgttctcagagtgcaagggatttgggaagaaacttgaagagaattctacacaagccagcagctagtagctgataatgatattggtaacatatgtctactacttgctgaagccaaaagatgaactaccaaatggatagatttcattttgggactaaaattcaattttcgaaatcaaattgctctttttacattctatcgttggtaattatatagagctacttttataaatatatgtagaagcaaatggaaccttatgactttacacgaaaaagcaatggatcccttatgatatatttcttcttctgatatcttcaaaacttgggactcttgaatctgtgttgttattggcaaccttttgccactgtagattaccaaattaagatttgttgactaaactaaaatacgcggtttgtttactcttgtagtataaaaaagctttaccacactcgcacgtgagagtgaaaaaaaaaaaaacacaaacgtaaagaaacacaaaaatg

SEQ ID NO: 18678 - DNA, 3003 bp, Unknown; identical to SEQ ID NO: 18677
  misc_feature (1)..( 3003): 2750-1469P.txt file - cDNA_ID_1818996; gDNA_ID_1620618; Annot_ID_162117

SEQ ID NO: 18679 - DNA, 3000 bp, Unknown
  misc_feature (1)..( 3000): 2750-1469P.txt file - cDNA_ID_1818996; gDNA_ID_2926211; Annot_ID_142006
aaggagatattggaattggtatctaattcccctgaagaagcagaactccgctttcaagacatcaaagctgctgcgggaatcgacccgaaatgcgtagacgatgttgtgaaaatggagggtaagaagactcatggtgaaggagtgtggaaagagctcattctaagaccaactcctgcagtgagacgtgttcttttaactgctcttgggattcatttcttccaacacgcctccggaatcgaagcagtgcttttatacggtccgaggatctttaagaaagcaggaatcacgactaaagacaagcttttcttggttactatcggtgtcggaatcatgaaaacgacgtttattttcactgcgactttattgttagacaaggtaggtcgaaggaagcttttgttgaccagcgttggaggaatggtcattgcgttgacaatgttgggatttgggcttacaatggcccaaaatgctggcgggaaattagcgtgggctttagtactgagcatagttgcggcttatagtttcgtggcgtttttctctattgggctcggcccaataacttgggtctacagttctgaggttttcccgttgaagcttagggcacaaggagcgagtctcggcgttgcggtgaacagagtaatgaacgccaccgtgtcgatgtcgtttttgtcgttgactagtgcgataaccaccggtggagctttctttatgttcgccggagttgcggcagtggcgtggaatttcttcttcttcctcttgccggagacgaaaggaaaatcacttgaagaaatcgaagcgctttttcaaagagacggtgataaagtacgcggcgaaaacggtgcagcttagcatgatgaatataatgttatcattaaatgaaacgacagcgtttggggtttctcactcattacacgacgtcgtttagttgtacttttgtgtggcttttatcaaattataaatcaacggtcaagattgacgcacgctttagtatttttttcattaacaatttaagatcaacggctaatacatcgccaattactagctaataatggcccagtagtgtgaactgtgaagagagtgaactgatttttttttttttaaagttctctctcagatttaacaaaatcgagccgacactttcccaattgaactgaatctactgaaatcgattcacgagagctcagatttggtgttagcatcactcactaagcaagattattgagttgtaattagtatttgagatcaagatgaaggaggacgatgcattgccgacgacgacgacgactggtacggcgacgggaacagctatggcgaattcgaagaaggaaagctctgactcggtcttgtttggaagaggtcgatataagttctgggcgtttgctgcgattttgcttttggctttttggtcgatgtttactggcaccgtcactctccggttatctaccgggaatctgaaccggttatcggaagatctagggattccgaactacgataatctcgacgttctggttgtttactctctctgtttctatttcggttgatttggtgtgtaatttgattgtagtctggtttttgaggttttggaatttgtggtattttttaggaaatggaggagagagagaaagtggtgaagcatatgtgggatgtgtatactaatagtcgtcggatcaaattgcctagattttggcaagaggcttttgttgctgcttatgaagaactcactagtgatgtgcctggggttagagaagctgctattggtgaaatcgccaagatgtcggcgcggtcgatcactcttgatccacctccttctagatcaaggtgatgattcttgctttaaatttcgatttgttttcactatattagtcacttagaatcagtaggtagaggtatagatagatggtagtcgatcttgcctctgtgctggagtaaatagtaatgttcaatctggtatctggagtttagatcttgagtgtacctagcttaggttgttcagtttgatggtcaagttcttctgtgtctggagatatgccattaagatttagtgttactctttaagttattacctgttaaagttagtttgtgtatactctatctttgtttgtgattggtgaccagctatatggatccatgcttgatatccaaacatataaagacctgtatgaactttcgatacacatagtaccttataatggtcaaggtctaatttttctggagactgggtatgtagatctagtgtaagatactggtatgcataatagcatgtggttgagtagattatgtcttcttaaaattatgttatgagatttcagataggtatagctttcggttttgtttcttgcatttaatgctaaacctcttttgtgaaagttggttgatcaagtttggtagagcttccatcacccaccttagcttcttgatcaggattcatcttttaatttcttctcttaaattgttcatagacttaacctgagtgttaaactcttttttcttttctttatcggtttgttctcagagtgcaagggatttgggaagaaacttgaagagaattctacacaagccagcagctagtagctgataatgatattggtaacatatgtctactacttgctgaagccaaaagatgaactaccaaatggatagatttcattttgggactaaaattcaattttcgaaatcaaattgctctttttacattctatcgttggtaattatatagagctacttttataaatatatgtagaagcaaatggaaccttatgactttacacgaaaaagcaatggatcccttatgatatatttcttcttctgatatcttcaaaacttgggactcttgaatctgtgttgttattggcaaccttttgccactgtagattaccaaattaagatttgttgactaaactaaaatacgcggtttgtttactcttgtagtataaaaaagctttaccacactcgcacgtgagagtgaaaaaaaaaaaaacacaaacgtaaagaaacacaaaaatg

SEQ ID NO: 18680 - DNA, 3000 bp, Unknown; identical to SEQ ID NO: 18679
  misc_feature (1)..( 3000): 2750-1469P.txt file - cDNA_ID_1818996; gDNA_ID_2926211; Annot_ID_202652

SEQ ID NO: 18681 - DNA, 3003 bp, Unknown
  misc_feature (1)..( 3003): 2750-1469P.txt file - cDNA_ID_1819004; gDNA_ID_1620618; Annot_ID_46935
cttaatagctcaagagcatttcgattgaacatcttattttgttgcttgaagacttgttgaaaactatgatctagtatgcaggtttatttataagctgctcctgcatttttctttcctcataaattagcttgtaaaagcttgacggtttgttgttggaatctctagaattccatagtcaacaattttcaggttcatatagttcactgctttgttctacacacttgtgcttcatgatgaattcaagtttctttcagttttatgttgtttttacatatccttctacttgcaactaaagggtcaagctggttctgttggtatagctaaactctgtttcttggtacgaagatggtttcgcgtatagtggaatcttgatctcgttggaactcaatttgacttggcttcccctaattttgacttgcacgaaagataagagtgacaaattttcaacaatgattttgataggtttctgatcaggtaagtatttgagttgcaacatctttcagagaatttgcaaatcctaaggttgcaaaatgttaatcatcttgcgtagttgtttgcttattttgtatcaatagctctaaatttaattaaaaagattccaaagttcaaacgaaaattacgggaatcacataagtaatactatactatatagtctacattatatgtaatgtttttaattttctgtaacactgatgtctctataatattttaatacaaattgtggaacatttttgttgaaaagtatgctttcttcatactagtaagtcaaatataaacttttgacgaaataatccaataacatcacctactcgtccggaaacagaacagtacaaagttggtgaataaaatctatggatattttatatagtgagctttttgagaaacgtgatctactttgatgtactaaagttaacttttaacaatgaaaacaaaaattgaaaaattaacaacgttaaatcagaaacgtaaataaactgaatcatcatttcaacagttgattccacaagctattaaaattttaaatattagaaagtattttaaagatgcttgaaacttagcagacagtttggtttaaaagagtaaaagtggtaatgagctgatgttggcggctaaatctctaaaatcagtaaagcatatcgcgaaccaaaagccaaagcaccaaatgaaactgagttaggttcgttgtacacacgatgttttccaataaataatcctccacaaaattcaaacaccggatgtatctcgaaaacattagatgttctatatacaaacatatagaatcatggtattgagttcgtgattttttttttgtaacatgatgtaattagtaattcatcctaatatatgtaatcatctttatattttgataatacattcgtgattcgttcgatgacattaccacacgaggttacgactgcgcacatatggtgtattatgagtccaccatacgataaattattaaaagtgtggtagagagacttttcttatggttgataaattattattttcaatatcgtcaaaattacttattcattttctctttatttggaccaatttagatttagactcgattagtttttctatagatgtaggttcttcctctcaagatgtagcgataggttttagggttaaactttgtcgtggatataggaagaaactgcatgtagtttttgatgggttacacttttagttacaacacgaaagtttatcggaaatactagttggctcatggctgccttacgttagacaattaattacaaacatctctttttttctttgtcaataattgtttcttattgtaggcatactattggagaaacatgaggtacgaacttcccaaatcagttttttttttttgggaaaaagttgaaattatgcaaaacactgaaaaaggaaagaacaagtaattaaaatgcaaaaaaaaatttttaattaaaatgcatgaacatataaacaaataacatgttataggttcaaatctcatccactgatccacaaaccgtaatcaccatcaaaatattcatgcaagtcaacttgaggatatttacatactataattaagaaaataccacaaatttccaaatcaagtttttttttttttttttggctattggcttaattaacaaacaagaatttggctattcacgtgattcaaagtctaaactaatgaagcccacttgacttttcgggcaactcatctaaaacttcaaactttgaaatctaatttaaaaatggacccatgacgttttacactctgactctccatagttgactccatgagtccatccaaatcgagtgtttggttacacagtgacatgaagttttaaaattctcgcgatctaaaacaagatatttttaaaatattcacgtgtataaaaacaagaaaatttaaaaatattcacgaggataaaaacaaaaagcacctattagaaatagctcttatccaataaggcaatgataacggactcgtgtcggtgtctacccatatcttattaatcgaaaaaaaaatcttagttagtccaaaactcacccccaaagagtcaactttgttacacatacgttcttatccaaaatccaaagttaacttattaacgactaatgccaactcaggtttacacatgacatcagagcttccaagtttatagtctggtcaagctgtaactgttaacttttaattacagtcaaggtctgtaattagaatttgatcacaaaacatgtttcattctataaacatatattaaaacgatgtggatgactcttgtccattggattcaaataactaaatcatctcttaacagtagcttgtggctttcacgactactgttttgtcaactattttttttctatataatcaccgaatcttttctttggtactgagagagcaagagagattagtaagacctaactcttaacgaacttttagataaaagcttataactgagagagacatagatcgacaaaagtctctataccttcttgtaacgtggtggttaattaatcatg

SEQ ID NO: 18682 - DNA, 3003 bp, Unknown; identical to SEQ ID NO: 18681
  misc_feature (1)..( 3003): 2750-1469P.txt file - cDNA_ID_1819004; gDNA_ID_1620618; Annot_ID_162115

SEQ ID NO: 18683 - DNA, 3000 bp, Unknown
  misc_feature (1)..( 3000): 2750-1469P.txt file - cDNA_ID_1819004; gDNA_ID_2926211; Annot_ID_142008
aatagctcaagagcatttcgattgaacatcttattttgttgcttgaagacttgttgaaaactatgatctagtatgcaggtttatttataagctgctcctgcatttttctttcctcataaattagcttgtaaaagcttgacggtttgttgttggaatctctagaattccatagtcaacaattttcaggttcatatagttcactgctttgttctacacacttgtgcttcatgatgaattcaagtttctttcagttttatgttgtttttacatatccttctacttgcaactaaagggtcaagctggttctgttggtatagctaaactctgtttcttggtacgaagatggtttcgcgtatagtggaatcttgatctcgttggaactcaatttgacttggcttcccctaattttgacttgcacgaaagataagagtgacaaattttcaacaatgattttgataggtttctgatcaggtaagtatttgagttgcaacatctttcagagaatttgcaaatcctaaggttgcaaaatgttaatcatcttgcgtagttgtttgcttattttgtatcaatagctctaaatttaattaaaaagattccaaagttcaaacgaaaattacgggaatcacataagtaatactatactatatagtctacattatatgtaatgtttttaattttctgtaacactgatgtctctataatattttaatacaaattgtggaacatttttgttgaaaagtatgctttcttcatactagtaagtcaaatataaacttttgacgaaataatccaataacatcacctactcgtccggaaacagaacagtacaaagttggtgaataaaatctatggatattttatatagtgagctttttgagaaacgtgatctactttgatgtactaaagttaacttttaacaatgaaaacaaaaattgaaaaattaacaacgttaaatcagaaacgtaaataaactgaatcatcatttcaacagttgattccacaagctattaaaattttaaatattagaaagtattttaaagatgcttgaaacttagcagacagtttggtttaaaagagtaaaagtggtaatgagctgatgttggcggctaaatctctaaaatcagtaaagcatatcgcgaaccaaaagccaaagcaccaaatgaaactgagttaggttcgttgtacacacgatgttttccaataaataatcctccacaaaattcaaacaccggatgtatctcgaaaacattagatgttctatatacaaacatatagaatcatggtattgagttcgtgattttttttttgtaacatgatgtaattagtaattcatcctaatatatgtaatcatctttatattttgataatacattcgtgattcgttcgatgacattaccacacgaggttacgactgcgcacatatggtgtattatgagtccaccatacgataaattattaaaagtgtggtagagagacttttcttatggttgataaattattattttcaatatcgtcaaaattacttattcattttctctttatttggaccaatttagatttagactcgattagtttttctatagatgtaggttcttcctctcaagatgtagcgataggttttagggttaaactttgtcgtggatataggaagaaactgcatgtagtttttgatgggttacacttttagttacaacacgaaagtttatcggaaatactagttggctcatggctgccttacgttagacaattaattacaaacatctctttttttctttgtcaataattgtttcttattgtaggcatactattggagaaacatgaggtacgaacttcccaaatcagttttttttttttgggaaaaagttgaaattatgcaaaacactgaaaaaggaaagaacaagtaattaaaatgcaaaaaaaaatttttaattaaaatgcatgaacatataaacaaataacatgttataggttcaaatctcatccactgatccacaaaccgtaatcaccatcaaaatattcatgcaagtcaacttgaggatatttacatactataattaagaaaataccacaaatttccaaatcaagtttttttttttttttttggctattggcttaattaacaaacaagaatttggctattcacgtgattcaaagtctaaactaatgaagcccacttgacttttcgggcaactcatctaaaacttcaaactttgaaatctaatttaaaaatggacccatgacgttttacactctgactctccatagttgactccatgagtccatccaaatcgagtgtttggttacacagtgacatgaagttttaaaattctcgcgatctaaaacaagatatttttaaaatattcacgtgtataaaaacaagaaaatttaaaaatattcacgaggataaaaacaaaaagcacctattagaaatagctcttatccaataaggcaatgataacggactcgtgtcggtgtctacccatatcttattaatcgaaaaaaaaatcttagttagtccaaaactcacccccaaagagtcaactttgttacacatacgttcttatccaaaatccaaagttaacttattaacgactaatgccaactcaggtttacacatgacatcagagcttccaagtttatagtctggtcaagctgtaactgttaacttttaattacagtcaaggtctgtaattagaatttgatcacaaaacatgtttcattctataaacatatattaaaacgatgtggatgactcttgtccattggattcaaataactaaatcatctcttaacagtagcttgtggctttcacgactactgttttgtcaactattttttttctatataatcaccgaatcttttctttggtactgagagagcaagagagattagtaagacctaactcttaacgaacttttagataaaagcttataactgagagagacatagatcgacaaaagtctctataccttcttgtaacgtggtggttaattaatcatg

SEQ ID NO: 18684 - DNA, 3000 bp, Unknown; identical to SEQ ID NO: 18683
  misc_feature (1)..( 3000): 2750-1469P.txt file - cDNA_ID_1819004; gDNA_ID_2926211; Annot_ID_202654

SEQ ID NO: 18685 - DNA, 3003 bp, Unknown
  misc_feature (1)..( 3003): 2750-1469P.txt file - cDNA_ID_1819024; gDNA_ID_1620618; Annot_ID_46928
ccaatcaaaaatataaaggaattatggctggtgacggcgacggttatgggagaacaaaaaatctaattggtctgaagaaatgagtcaggtttcatgaactgaagttgaggacacgtgtacgaatacaagaggtggtctacattattaactcgtaataagtcgccacgtggataaccccatgttcttccctggtcacttttccttctctttggcgtggctgtctttttcacctcctgtttttaataattttcacctccgggtaaaaagaaaacacaaaaaagagagagcagcatagatatatttgcaaatagtaattaactaattactatatctaaacagttgcaaatacataacattaatacaactgtcaaaattacttcaaccctaattctcatgatgtgtgttatccaaattaaaataccatcaatccttaataaattagcaatgactcatacataagttccaaaaatagggtattatcacatgccagactttttaggtggtactttcagtatcaatattttggttccaataaggacatgtggattttcttttacaaaattgtttttaaaacactttcttcaacagtacaaaaattgtatattgagaaggtaattggaggaaagagagagatagagatgtaagggtgggattggaagaacatggaaagtagtagagacatggcagtgtttttaaagcagacacaaacacttacgagaagaaagagggagacaaaaggctttggcttccattgtctacttctctatattcttatttaaaccaattttaaaatatttataaaacttatttaacattagaaacgtacgtttggttgtgttttattcgccacgtttcgttgttgtattcctttcatatgactcccatcgtgttcctttgtctcccctttttctctctttacatcatctcatagaaaacaacttttagaaataaaaaaacgtggcacattatattcaataacgaattcaaatccccaattcaacttatgagtacgaaccttgtagtcaccatccacatgattcctctagagaccgtaagattaatcgggttgaagagttaattgtaatttgttttcaatatatatagttgtatgatcaatcacccattctatcgttttattatatggatgcgtttgtgcagtttagaagcatcagtgattcacttttgtataacaatatgtatatatatatatatatagttttgaatttataggatctgattctactgtgaaactttcattgtagatttttgcttaattaatcatgattttgctagctttattctagatttgaatttattagtacacaattgatatatttttcataaaaagactgaccgatgaatgtgatattaagctcaagaaataaataaatgggtctatgggaaccaaaataagatgcacatagctaaaatatccctcacaaaatgataatagcaatattccataaattgaaaaatctagctagatgataactaatccgtaactcttaactccaaaattatacaccgtttatctaataaaagttaaaaagataagcctttaaaagcagacattatccttaagacaaataaacaagtatcttacccagtttaggggttcattggtccaatattttattaaagagtccacatctacaagcaagtatcatcatgaacatgaacttaaacccatttaaggataataactataactaatcaatgatttacttgggagttcgaaggtgtctgctacactccttccaagcctccacccacattaaagtttctatcctctttatctttttttatccccaagaatatcctctgtggcaacaagctactaatttagtcatttatttgctcattggctgcttgacaaaaaaaaaaaaaaaaaaaaaatttgctcattggctacccattttttcctctaatttgcacgttccgtaatagaatatactcattaagatatgcttttcttggatgttcataatgtccatcagtccatgtatatatatcattgaattgatcatttctcaaatccatatggattcttagaaaatataacctcttacaattactcatcaatttataacctatcacacaattctgtcgatattcaacctctacattaattagtatgcgagttaaaaaaaaaaaaaaaaaaaaaaattagtatgcgagtttaataacaagaaattaaaatttatgccttttttttatctaaagtatatatatatatttaatgtttttctatgatttttctttcggtagtaattaacgttatcaactgaaccttaagtctatgataaattctggcttatttttacggcactagctaattttctaacgaataaactaagaaaattaacaattgatctctaactacgaatttagagaagagtctaaaaagtaattaaggggcttgattgggtcgtggaggacattgagaccggtgaatgtcctctccattggacatcacattctcatttaccaaatagtctctgattattggtctcccctccccaattgtcatactactatatagttttctagactcgcaaatcttattaactacgatagattgatttatgtcattttattttggtaatgaaaaattcactttagtgtgttcacgtgccaaagctttcgacttttcatgttcctatcaatgacgtgttgaaagaatacgtctttgtttagtgttgttttgtattacgcatgaaacagtattaaagttggtgacaaagaaatattttcttctcttttaatttcactgtccttttaattaatattcctaagtactaaatcacgtccagtggtaattccgtaatttaaaataacaagaagcccacatcaggaaaatgacatttcataacccaaaaaaaaaaatcatttcttgacacctactctccttataaatcataggtcttcctcttccccaacaacacttctcacatttcataaaaagtgagacaaattaaagacagagagagatccaagaacatg

SEQ ID NO: 18686 - DNA, 3003 bp, Unknown; identical to SEQ ID NO: 18685
  misc_feature (1)..( 3003): 2750-1469P.txt file - cDNA_ID_1819024; gDNA_ID_1620618; Annot_ID_162107

SEQ ID NO: 18687 - DNA, 1126 bp, Unknown
  misc_feature (1)..( 1126): 2750-1469P.txt file - cDNA_ID_1819024; gDNA_ID_2926211; Annot_ID_142015
aaaaaaaaaaaaaaaaaaatttgctcattggctacccattttttcctctaatttgcacgttccgtaatagaatatactcattaagatatgcttttcttggatgttcataatgtccatcagtccatgtatatatatcattgaattgatcatttctcaaatccatatggattcttagaaaatataacctcttacaattactcatcaatttataacctatcacacaattctgtcgatattcaacctctacattaattagtatgcgagttaaaaaaaaaaaaaaaaaaaaaaattagtatgcgagtttaataacaagaaattaaaatttatgccttttttttatctaaagtatatatatatatttaatgtttttctatgatttttctttcggtagtaattaacgttatcaactgaaccttaagtctatgataaattctggcttatttttacggcactagctaattttctaacgaataaactaagaaaattaacaattgatctctaactacgaatttagagaagagtctaaaaagtaattaaggggcttgattgggtcgtggaggacattgagaccggtgaatgtcctctccattggacatcacattctcatttaccaaatagtctctgattattggtctcccctccccaattgtcatactactatatagttttctagactcgcaaatcttattaactacgatagattgatttatgtcattttattttggtaatgaaaaattcactttagtgtgttcacgtgccaaagctttcgacttttcatgttcctatcaatgacgtgttgaaagaatacgtctttgtttagtgttgttttgtattacgcatgaaacagtattaaagttggtgacaaagaaatattttcttctcttttaatttcactgtccttttaattaatattcctaagtactaaatcacgtccagtggtaattccgtaatttaaaataacaagaagcccacatcaggaaaatgacatttcataacccaaaaaaaaaaatcatttcttgacacctactctccttataaatcataggtcttcctcttccccaacaacacttctcacatttcataaaaagtgagacaaattaaagacagagagagatccaagaacatg

SEQ ID NO: 18688 - DNA, 1126 bp, Unknown; identical to SEQ ID NO: 18687
  misc_feature (1)..( 1126): 2750-1469P.txt file - cDNA_ID_1819024; gDNA_ID_2926211; Annot_ID_202661

SEQ ID NO: 18689 - DNA, 3000 bp, Unknown
  misc_feature (1)..( 3000): 2750-1469P.txt file - cDNA_ID_1819024; gDNA_ID_2926212; Annot_ID_202675
gtgacggcgacggttatgggagaacaaaaaatctaattggtctgaagaaatgagtcaggtttcatgaactgaagttgaggacacgtgtacgaatacaagaggtggtctacattattaactcgtaataagtcgccacgtggataaccccatgttcttccctggtcacttttccttctctttggcgtggctgtctttttcacctcctgtttttaataattttcacctccgggtaaaaagaaaacacaaaaaagagagagcagcatagatatatttgcaaatagtaattaactaattactatatctaaacagttgcaaatacataacattaatacaactgtcaaaattacttcaaccctaattctcatgatgtgtgttatccaaattaaaataccatcaatccttaataaattagcaatgactcatacataagttccaaaaatagggtattatcacatgccagactttttaggtggtactttcagtatcaatattttggttccaataaggacatgtggattttcttttacaaaattgtttttaaaacactttcttcaacagtacaaaaattgtatattgagaaggtaattggaggaaagagagagatagagatgtaagggtgggattggaagaacatggaaagtagtagagacatggcagtgtttttaaagcagacacaaacacttacgagaagaaagagggagacaaaaggctttggcttccattgtctacttctctatattcttatttaaaccaattttaaaatatttataaaacttatttaacattagaaacgtacgtttggttgtgttttattcgccacgtttcgttgttgtattcctttcatatgactcccatcgtgttcctttgtctcccctttttctctctttacatcatctcatagaaaacaacttttagaaataaaaaaacgtggcacattatattcaataacgaattcaaatccccaattcaacttatgagtacgaaccttgtagtcaccatccacatgattcctctagagaccgtaagattaatcgggttgaagagttaattgtaatttgttttcaatatatatagttgtatgatcaatcacccattctatcgttttattatatggatgcgtttgtgcagtttagaagcatcagtgattcacttttgtataacaatatgtatatatatatatatatagttttgaatttataggatctgattctactgtgaaactttcattgtagatttttgcttaattaatcatgattttgctagctttattctagatttgaatttattagtacacaattgatatatttttcataaaaagactgaccgatgaatgtgatattaagctcaagaaataaataaatgggtctatgggaaccaaaataagatgcacatagctaaaatatccctcacaaaatgataatagcaatattccataaattgaaaaatctagctagatgataactaatccgtaactcttaactccaaaattatacaccgtttatctaataaaagttaaaaagataagcctttaaaagcagacattatccttaagacaaataaacaagtatcttacccagtttaggggttcattggtccaatattttattaaagagtccacatctacaagcaagtatcatcatgaacatgaacttaaacccatttaaggataataactataactaatcaatgatttacttgggagttcgaaggtgtctgctacactccttccaagcctccacccacattaaagtttctatcctctttatctttttttatccccaagaatatcctctgtggcaacaagctactaatttagtcatttatttgctcattggctgcttgacaaaaaaaaaaaaaaaaaaaaaatttgctcattggctacccattttttcctctaatttgcacgttccgtaatagaatatactcattaagatatgcttttcttggatgttcataatgtccatcagtccatgtatatatatcattgaattgatcatttctcaaatccatatggattcttagaaaatataacctcttacaattactcatcaatttataacctatcacacaattctgtcgatattcaacctctacattaattagtatgcgagttaaaaaaaaaaaaaaaaaaaaaaattagtatgcgagtttaataacaagaaattaaaatttatgccttttttttatctaaagtatatatatatatttaatgtttttctatgatttttctttcggtagtaattaacgttatcaactgaaccttaagtctatgataaattctggcttatttttacggcactagctaattttctaacgaataaactaagaaaattaacaattgatctctaactacgaatttagagaagagtctaaaaagtaattaaggggcttgattgggtcgtggaggacattgagaccggtgaatgtcctctccattggacatcacattctcatttaccaaatagtctctgattattggtctcccctccccaattgtcatactactatatagttttctagactcgcaaatcttattaactacgatagattgatttatgtcattttattttggtaatgaaaaattcactttagtgtgttcacgtgccaaagctttcgacttttcatgttcctatcaatgacgtgttgaaagaatacgtctttgtttagtgttgttttgtattacgcatgaaacagtattaaagttggtgacaaagaaatattttcttctcttttaatttcactgtccttttaattaatattcctaagtactaaatcacgtccagtggtaattccgtaatttaaaataacaagaagcccacatcaggaaaatgacatttcataacccaaaaaaaaaaatcatttcttgacacctactctccttataaatcataggtcttcctcttccccaacaacacttctcacatttcataaaaagtgagacaaattaaagacagagagagatccaagaacatgaactacacggtggatgatcagaacatg

SEQ ID NO: 18690 - DNA, 3000 bp, Unknown; identical to SEQ ID NO: 2941
  misc_feature (1)..( 3000): 2750-1469P.txt file - cDNA_ID_1819028; gDNA_ID_1620618; Annot_ID_46926

SEQ ID NO: 18691 - DNA, 3000 bp, Unknown; identical to SEQ ID NO: 2941
  misc_feature (1)..( 3000): 2750-1469P.txt file - cDNA_ID_1819028; gDNA_ID_1620618; Annot_ID_162104

SEQ ID NO: 18692 - DNA, 3003 bp, Unknown
  misc_feature (1)..( 3003): 2750-1469P.txt file - cDNA_ID_1819028; gDNA_ID_2926212; Annot_ID_142017
taacattatgattgataattttcatgcaactccttttctctagatcgtaggtaggaggatattaggttaatttgactacgctagagatttaaattagtacgctttcgaacaagtcaaaagacaccatcgggttagccactaagaaagcaatcatcatatacatcaattaattataatactacttatatacctgtactatatacactcatgcataaaaagtaaaaacgattctctctttatcaaatttagattctggatcgttaaaaagtagtaaaaaatgagaaaacttttacaagataaatttgatgagtcaccctcatcatattatagttagaggctaataatttataaataatgtcaaaacaattttctctatgtacatattattacggagcgattacatatatcattcacaactttagtcattttgttaaccctaatataatgtgatatcaaaacggaatattaataacgttatacattacaatttttgtaataaattttgattttaatcactaatcagttacttgttgccattatattgatcggggatcccttattgataggcccaatatgaatgagctcagttatattttgggttttttctcatagcataaatggcccaatgaaagcctattaagtgatcgaaggtcagacgttggactccttgtatgaaaccaacagactaggcccaaattatcaactcaaaattgaccgtaacatatacggcgccgtttttgtagacctgagtgtgataaagtgagctgttaaatcttcacttaaccccatttttaatcacgaaattagagtggtgattaaaaatacaactaaagttgtttcaagtgattgttttcatttatttaaattttaaattaatccaactttatcgttgacggaaaatttgggagagaatattctcgatggggaaaggaggaggttgtgttccgagcaagaagaagaagccggccaccaccggcgatggtcccggaatcgatgatgataacgacgctactaatgctccgatccaaattgacgatgatcaaaccaccattgacggcgatcgaacaacggcgacgaatactggaggaacaacaacaccagcgattactactacggctgctaagatctcgtcaccgctcaagatcttcgtcgtgttctattcgatgtacggacatgtggagagcttagcgaagaggatgaaaaagggagtggatagcgtcgaaggagtggaggcgacgttgtacagagttccggagacgctttcgcaggaggttgttgagcagatgaaggcgccggttaaggatttggagattccggagattacggcggcggaattgacggcggctgatggatttctgtttggatttccgactaggtatggttgtatggctgcgcagatgaaggcgttttttgattcgacgggatcattgtggaaggagcagagtcttgctggtaagcctgctggattctttgtgagcactggcactcaaggaggtggccaagagaccactgcgtaagcttttgcttctttcttatactctttagtaccatttgcattggttctaaagtatattagttgaatttggagtacaagtattgaattgctataatcacagagtcactatgtgaaataaatgcaaccttgaatttgatgtatataggtggttgctaaaacctgaaaggttgttgtggtcaggactttgtctagtactttagaggaaacttgtcagagatggctatcattctggtgaattgcttgcttgatctttaattgctttcttaactacaccattgaccatttcaagtccaatctggtcaccattgaatagtaccctggtctctcttttggtacgataggcttgcacttatgctacgcttatgttagctctagtaaggggagatctttagaacatgtaaaactggattattttagattctcactttctcatcacccaaagtaccaattctataggcatgagtgttgcctccgataatttgcatgtgtttaagctctgagatagattcctcaatgtatgtggactctctttagtcatcatttgcacttagatatttgtctgttttacttcagctgattcactcggttgctgtgatagtttgcgaatatagagaagcataacaatgcggaatcttaaagcttttgcgtatttctccaagtgtgcaatgtggatatttttattgccatcgtttccacattaaagctcagaaacacttgctgatttccatctcgtgtgtgttctgttgcagatggacagcaatcacacagcttgtgcaccatgggatgctatttgtaccaataggctacacatttggagctggaatgttcaagatggactcgatacgtggaggctctccttatggagcaggtgtgttcgctggtgatgggtcaagagaagcaacagaaacagaattggctcttgctgaacatcaaggaaactacatggctgcaatagtcaaaagacttgctcaaccttaaaacaaaaacaaaaattgcttcctctatttgtctcttttcattcaattcctcctcctgctaaataatcataaaaaaaaaaatcttcctttcttttctcaattccatcgaaatttctttcttttctttatgagtgttttcagtttcgccattaatggttagtgtgtacatgtttctttatattatttgtctcttatttattccttgttgtaaaataaaaacaaaatttcattacgtgttctttcattggagttgttgattggatattttatcaaaaacttataatttcacaaatcgttaaagtgtaggaaaaaaaaataattagttgcgtcagccattaggattccttggaacacgtaaagtttactaacataaaactgtgatatctgtacttttttatatctatctgctgctgcatctgtgttctgttcgtccttgaagcagtcaaattcttctctgaactccaaacatcgccatgtcccgagattctctcttcgttgaggtcactaatg

SEQ ID NO: 18693 - DNA, 3003 bp, Unknown; identical to SEQ ID NO: 18692
  misc_feature (1)..( 3003): 2750-1469P.txt file - cDNA_ID_1819028; gDNA_ID_2926212; Annot_ID_202677

SEQ ID NO: 18694 - DNA, 3003 bp, Unknown
  misc_feature (1)..( 3003): 2750-1469P.txt file - cDNA_ID_1819048; gDNA_ID_1620618; Annot_ID_46917
cttatgctggctctacattagtagacatcgcatcttcttcatcatctgctgtggtgtcagcatcgtccaagaaaggtgagaggtctgattttgagaagaaacttggtgagtttttcaagcatcaaatcgagtcggattcttcatcggcatatggggatgggttcaggcaaggtaaccaagcagttcttaagcatggtctgaggcgaaccctcgaccatattcgcttgaccggtacatttcctaaatggatttaaactataaaaagagagaaaacaagctttgttatagttttttagagtatagacttgagaagaaaagaaaaagaaaaatgtataggttacaacaatacacacatttaagtgtcataaagtttccactttttaagtaaaaaatcaagagtcaagaaacaagaccaaaaattcttggcttggtttttatctttttttgccaaacgttttgcttgttatttcttagatagcaaattattctgttttcaaaatctaaattactacaatcactagtttgacttcatcatatctggaccagtggataaaagtatgaaagataaggaaaatccgaaaatggatagacttgtatatccacaattccacattatatcataatatgtactgtatattatggctcttctattcgctgagaggacgaaggtcaaatatgtagaatgtagaagtatcctcatattgacctgtctaactagattaatattatagtatgcatgcttgccatctgttaattaaaatacagacattgtgaaaaaatacactccatgctctctatctttctatcgtttgtaaaatgatattttgttgatcaaaactactatggtctacaagatcgtgtaaaacaacattcaagtaacttagtattatgggaagatgagttctctcgatcgagatgttcagtcaattctctagagtataaaaaacgaaaacgtctcaagtcaattgtcaatcattaatttccaaatataaatattagacattatcaacaaatgatgataaagagatacaaaaaacattgtgaagatgtgggatatgaggataaacatagagagataggatgatatattcacacgtgtttcccacttcctcatccaacttgtcgcggcgcctcgtcgccggttctttcttctctctttggtttttttttctaaaacattttctctatcaagcgtttatgtttcaacaaattttatttaagctaatgttttttcttataaccaaatcaaaattttattcatcgatatagaaattaatggttttttgctaatattgaaatctaattttaaagtatatattaaaaagtttttgttaaaaaaaaatgaggatactcatgttggagagggagagcaaacggattcttgatgtttttacgatcgattaaagtgaagacgttttagtggacatgatatatttctttggtatgacatattttaaaagtcacctctaagaattcaattttttctagatattatcgtcattcgtcaacattatatcgtatgatgttaacaaaattaatggttggtagagtactcgtcatttagaattagggctaatgaattgatcgttcataatgtcttgtcgagggcaaaaacgacgtaacgtgacaaaacgtattaacctttgtttctttttcttttttttttgttatttcagaattcatgaaccagagaatttcattaatccactagctaatcttgaaattattctattgccttttgaaaaagttgtaaagtataatttgaaggttgcaaaattttaattttggtttttagtgtttgagaaacaaatcaaaactgcaacattatatacagaactatcttcccttttttttttaactaacttgaaatttatgcaaaacagttcaccaaggtgtcattaaaagatgtcattaaattcgaaagtcggttcatgaaagatgtcgtcatcatcgtaacatgatgccaccacgcagtcagcactaagcaggctatttggctttggcaccttcattcaaaaataaaataaattttaaattcctggttcagtaaaaatgtggaccgttgttttgggggcagccaatcgcacgaatatggtggctacgccacaaagttacaaatgtacaactttgtcgggcttttccagattcattaacatcaataggcaagtaaactacaaaatgcaagttgcttaatcaataatgttgtaaagcttttacagcatcttttataccataaaatgtcaacatcatggagtttactccaattaagttctcgtacactttgatttgaataatcagtacaaaacataaccaaaccggattagatgtggttttaactattgcatacatttccggccaatggattaggattactgaaagaacattaaaaacatatatgtatgacgacgaaaacaatttcttagggcttaggttatatatatttcgcagaaatgtataccaaaatgttggagaatcgtgaaaaagaatatacctaataaaccgtactaaaaaggctgaacatctgagattcagcagagcatcaaaagataaaagagaatatgctcattaatcataggtcgactgttttctccaccctccaactttaatttttgaaatctcttgtttttatgtgcccttgataattattaatcaccttaacattaacaacttgttaatgcctgttaatccaaaagtaaagcaatcaaagaactatattataagattaataatgtaatgattcgaaacattacaataaagtataacgtaacaagcttagatatggtgggtaaaatatacgaagtaaaataaatggtcccaagtatatgaatgaatacatgtatttacagatatctctctcccctatctccttatgatttgtcattttcctcacccataatcctataaaataatcaagaacctccgagggagagagacatacacacagacagagtaagacatatataacatatatagagagagaagacctaaacaaagagacatatg

SEQ ID NO: 18695 - DNA, 3000 bp, Unknown
  misc_feature (1)..( 3000): 2750-1469P.txt file - cDNA_ID_1819048; gDNA_ID_2926212; Annot_ID_142026
atgctggctctacattagtagacatcgcatcttcttcatcatctgctgtggtgtcagcatcgtccaagaaaggtgagaggtctgattttgagaagaaacttggtgagtttttcaagcatcaaatcgagtcggattcttcatcggcatatggggatgggttcaggcaaggtaaccaagcagttcttaagcatggtctgaggcgaaccctcgaccatattcgcttgaccggtacatttcctaaatggatttaaactataaaaagagagaaaacaagctttgttatagttttttagagtatagacttgagaagaaaagaaaaagaaaaatgtataggttacaacaatacacacatttaagtgtcataaagtttccactttttaagtaaaaaatcaagagtcaagaaacaagaccaaaaattcttggcttggtttttatctttttttgccaaacgttttgcttgttatttcttagatagcaaattattctgttttcaaaatctaaattactacaatcactagtttgacttcatcatatctggaccagtggataaaagtatgaaagataaggaaaatccgaaaatggatagacttgtatatccacaattccacattatatcataatatgtactgtatattatggctcttctattcgctgagaggacgaaggtcaaatatgtagaatgtagaagtatcctcatattgacctgtctaactagattaatattatagtatgcatgcttgccatctgttaattaaaatacagacattgtgaaaaaatacactccatgctctctatctttctatcgtttgtaaaatgatattttgttgatcaaaactactatggtctacaagatcgtgtaaaacaacattcaagtaacttagtattatgggaagatgagttctctcgatcgagatgttcagtcaattctctagagtataaaaaacgaaaacgtctcaagtcaattgtcaatcattaatttccaaatataaatattagacattatcaacaaatgatgataaagagatacaaaaaacattgtgaagatgtgggatatgaggataaacatagagagataggatgatatattcacacgtgtttcccacttcctcatccaacttgtcgcggcgcctcgtcgccggttctttcttctctctttggtttttttttctaaaacattttctctatcaagcgtttatgtttcaacaaattttatttaagctaatgttttttcttataaccaaatcaaaattttattcatcgatatagaaattaatggttttttgctaatattgaaatctaattttaaagtatatattaaaaagtttttgttaaaaaaaaatgaggatactcatgttggagagggagagcaaacggattcttgatgtttttacgatcgattaaagtgaagacgttttagtggacatgatatatttctttggtatgacatattttaaaagtcacctctaagaattcaattttttctagatattatcgtcattcgtcaacattatatcgtatgatgttaacaaaattaatggttggtagagtactcgtcatttagaattagggctaatgaattgatcgttcataatgtcttgtcgagggcaaaaacgacgtaacgtgacaaaacgtattaacctttgtttctttttcttttttttttgttatttcagaattcatgaaccagagaatttcattaatccactagctaatcttgaaattattctattgccttttgaaaaagttgtaaagtataatttgaaggttgcaaaattttaattttggtttttagtgtttgagaaacaaatcaaaactgcaacattatatacagaactatcttcccttttttttttaactaacttgaaatttatgcaaaacagttcaccaaggtgtcattaaaagatgtcattaaattcgaaagtcggttcatgaaagatgtcgtcatcatcgtaacatgatgccaccacgcagtcagcactaagcaggctatttggctttggcaccttcattcaaaaataaaataaattttaaattcctggttcagtaaaaatgtggaccgttgttttgggggcagccaatcgcacgaatatggtggctacgccacaaagttacaaatgtacaactttgtcgggcttttccagattcattaacatcaataggcaagtaaactacaaaatgcaagttgcttaatcaataatgttgtaaagcttttacagcatcttttataccataaaatgtcaacatcatggagtttactccaattaagttctcgtacactttgatttgaataatcagtacaaaacataaccaaaccggattagatgtggttttaactattgcatacatttccggccaatggattaggattactgaaagaacattaaaaacatatatgtatgacgacgaaaacaatttcttagggcttaggttatatatatttcgcagaaatgtataccaaaatgttggagaatcgtgaaaaagaatatacctaataaaccgtactaaaaaggctgaacatctgagattcagcagagcatcaaaagataaaagagaatatgctcattaatcataggtcgactgttttctccaccctccaactttaatttttgaaatctcttgtttttatgtgcccttgataattattaatcaccttaacattaacaacttgttaatgcctgttaatccaaaagtaaagcaatcaaagaactatattataagattaataatgtaatgattcgaaacattacaataaagtataacgtaacaagcttagatatggtgggtaaaatatacgaagtaaaataaatggtcccaagtatatgaatgaatacatgtatttacagatatctctctcccctatctccttatgatttgtcattttcctcacccataatcctataaaataatcaagaacctccgagggagagagacatacacacagacagagtaagacatatataacatatatagagagagaagacctaaacaaagagacatatg

SEQ ID NO: 18696 - DNA, 3003 bp, Unknown
  misc_feature (1)..( 3003): 2750-1469P.txt file - cDNA_ID_1819051; gDNA_ID_1620618; Annot_ID_46916
ttacaacaacctctacgaattcatatcatttatttccttgtctagattcatataccaccaataattagctaggaccatttgttatagtagctttttggatatcttgaccattttgttataatgtttttgtatatatatatataaatacataagaaaatattatacaaaacacttaattcagttcttttatgtataaggaccgtagtgttatatctctaatatttatataaatcgtagatgaacacggagtaacattttttgataaacatgtttaggagatatctgtactttgcaattaaattatgatgaatgatttattggtagtgactaaattatagaggtccccaatggaaaaaagaagcagcgaaccagtcacaccgtcgttgtaatctacaactaaaaaaatgcttgatttatttttccttatcaatatgttttcaaaatgaaaacgtgtacatataaaaaaaatggtcctaagagacatattaattttgattggtccacctggaaaaccggcaagggatggccatggccacgtgggatttgtggtccatgctgggatcaacgttcctcaatgtgccacgtgttttgatcatccagcgtgacagcctgtgttttcaacttttcatcaccaagcttcaaaatcttttttactctttttatttttatgcttaaaaataatttagaaattgatatggtcgaagagtaataataacttctcttgtcaaaagggagtaattatataatatgaaaatggatttttgtcaatacataaatttttattttctaaattaactgttttgtttttttcaacatgatttctctgttttctatttgattcaacggcgcatttttttaaaatgaaaattgtttgtagctcaatattaaagatattatcgtcaaaaattgttagacaaaaaaaaaaaaaacccagcccacaatcattatatgatatatggccactgataatacaactatctgtaactgatttaaacttaaaaattattctacaataagggttttgattcgtcggcccaaatttaccatatgggccttaagaagcctggttaaaatatatggccactggataatacaactatctttctttctttttttctttagtaatatatggcatcagtattagtgtcaatgatttatagatgtgaataaagtgaaatttttggaaagctaattgataactttgatgaccaatatataacaaataagtttgtctattgcagtactttaattcattgcttgcgtaagaagtgagtgggatcacaatttaaagaacgtcacttgattcaactactactaaaataaaacaatcagaaaaaaaaaatattaacagaggaaaataaaatatcctggagtagttgaatcatcttgctaagcacctaattttgataaaacttgcggtggcacagtaagtttgggcacctaaacaactaattgattggctaatcacaatatacacgttttttttttcacatgtggttttatattgaacccaccgaattctcttgatccttctaacaaaatttaatctcaaccacaaaaataaaataataatatatataagaaactgtaatgtacaattgtgattagcaatgggtcatctcatctaattatccagataatattgtctatatttttccaattaatttggtcgtatgtaactaaataatgcattaggttgagctaaataaagtattagataaccttacctactaacaattttcaatgatttttttcagtttctatatttctgctttgtatttttgtgtaaaattgggtttacagaccaggggatttcgaacagggtgatgtgttggacacaaaatttattccattcatgtgcgagttattattcattgaagtatattaaacttttgttttattttacttttttctattaattttaattaaaaatttgatgtgaaagaaaaaaacggtattttattgtgaatagtaaaagtcatgagcaaaatcatcaacttaggagtgttgaaaaaaggctaaagaagagtaaattagaggagagtcaaagattgtgtgtcactagtgttaatgctagtaaacatcagctcttttttttcttctctcttaatttttcaaacatttgatttctataaaccttcttaataatttcttccgtaaaataatatgattagtttttttttttgtaaacaagtgcccacttgcttgaccttcccaaccaaaaaaaacgtaacaatttccatcatcttctccataaagttcttacctttaagtgtgtttaatggagatttatcctctactcatctctctctctctattctgttccatttattaagctttcttcacgctttttaagataattaacagtcacgggttctaaaagctaaagggttttgcttcgaattcaagtgtctcccttcactttctctctctctattgctgctctgtttctgctgtcaattccctaagaaagtcctgatttttagggtgatcgagagaagttgaagaatcatgtttattgagtttccttttttgatccatagggtcatctaattttgctaattttattgtcatctccttcaggtaatttgcgatttctctttactctgtttttgacttgtacttagattccttttctttaacagtaataaacttcataaagatttcatttttcttcttatgggtatttggaatgatgaatgtagattaggttgattgttttgaggatgatgtggataatctttttctggatattattacaatttagggtcttgagattgtttgtaataagctccgtactttggtcccttattttcaattcagtctttaagatttcggtaacccttttatatttgatgcaatctccctataataataccttcttcaattgctgttttgccatttgcatattatttaactttctttgttggatcagtctgattctttcttaccaattattgtcttaatccttgattaagaaaaaacaaaaaaacaaaagacatg

SEQ ID NO: 18697 - DNA, 3000 bp, Unknown
  misc_feature (1)..( 3000): 2750-1469P.txt file - cDNA_ID_1819051; gDNA_ID_2926212; Annot_ID_142027
caacaacctctacgaattcatatcatttatttccttgtctagattcatataccaccaataattagctaggaccatttgttatagtagctttttggatatcttgaccattttgttataatgtttttgtatatatatatataaatacataagaaaatattatacaaaacacttaattcagttcttttatgtataaggaccgtagtgttatatctctaatatttatataaatcgtagatgaacacggagtaacattttttgataaacatgtttaggagatatctgtactttgcaattaaattatgatgaatgatttattggtagtgactaaattatagaggtccccaatggaaaaaagaagcagcgaaccagtcacaccgtcgttgtaatctacaactaaaaaaatgcttgatttatttttccttatcaatatgttttcaaaatgaaaacgtgtacatataaaaaaaatggtcctaagagacatattaattttgattggtccacctggaaaaccggcaagggatggccatggccacgtgggatttgtggtccatgctgggatcaacgttcctcaatgtgccacgtgttttgatcatccagcgtgacagcctgtgttttcaacttttcatcaccaagcttcaaaatcttttttactctttttatttttatgcttaaaaataatttagaaattgatatggtcgaagagtaataataacttctcttgtcaaaagggagtaattatataatatgaaaatggatttttgtcaatacataaatttttattttctaaattaactgttttgtttttttcaacatgatttctctgttttctatttgattcaacggcgcatttttttaaaatgaaaattgtttgtagctcaatattaaagatattatcgtcaaaaattgttagacaaaaaaaaaaaaaacccagcccacaatcattatatgatatatggccactgataatacaactatctgtaactgatttaaacttaaaaattattctacaataagggttttgattcgtcggcccaaatttaccatatgggccttaagaagcctggttaaaatatatggccactggataatacaactatctttctttctttttttctttagtaatatatggcatcagtattagtgtcaatgatttatagatgtgaataaagtgaaatttttggaaagctaattgataactttgatgaccaatatataacaaataagtttgtctattgcagtactttaattcattgcttgcgtaagaagtgagtgggatcacaatttaaagaacgtcacttgattcaactactactaaaataaaacaatcagaaaaaaaaaatattaacagaggaaaataaaatatcctggagtagttgaatcatcttgctaagcacctaattttgataaaacttgcggtggcacagtaagtttgggcacctaaacaactaattgattggctaatcacaatatacacgttttttttttcacatgtggttttatattgaacccaccgaattctcttgatccttctaacaaaatttaatctcaaccacaaaaataaaataataatatatataagaaactgtaatgtacaattgtgattagcaatgggtcatctcatctaattatccagataatattgtctatatttttccaattaatttggtcgtatgtaactaaataatgcattaggttgagctaaataaagtattagataaccttacctactaacaattttcaatgatttttttcagtttctatatttctgctttgtatttttgtgtaaaattgggtttacagaccaggggatttcgaacagggtgatgtgttggacacaaaatttattccattcatgtgcgagttattattcattgaagtatattaaacttttgttttattttacttttttctattaattttaattaaaaatttgatgtgaaagaaaaaaacggtattttattgtgaatagtaaaagtcatgagcaaaatcatcaacttaggagtgttgaaaaaaggctaaagaagagtaaattagaggagagtcaaagattgtgtgtcactagtgttaatgctagtaaacatcagctcttttttttcttctctcttaatttttcaaacatttgatttctataaaccttcttaataatttcttccgtaaaataatatgattagtttttttttttgtaaacaagtgcccacttgcttgaccttcccaaccaaaaaaaacgtaacaatttccatcatcttctccataaagttcttacctttaagtgtgtttaatggagatttatcctctactcatctctctctctctattctgttccatttattaagctttcttcacgctttttaagataattaacagtcacgggttctaaaagctaaagggttttgcttcgaattcaagtgtctcccttcactttctctctctctattgctgctctgtttctgctgtcaattccctaagaaagtcctgatttttagggtgatcgagagaagttgaagaatcatgtttattgagtttccttttttgatccatagggtcatctaattttgctaattttattgtcatctccttcaggtaatttgcgatttctctttactctgtttttgacttgtacttagattccttttctttaacagtaataaacttcataaagatttcatttttcttcttatgggtatttggaatgatgaatgtagattaggttgattgttttgaggatgatgtggataatctttttctggatattattacaatttagggtcttgagattgtttgtaataagctccgtactttggtcccttattttcaattcagtctttaagatttcggtaacccttttatatttgatgcaatctccctataataataccttcttcaattgctgttttgccatttgcatattatttaactttctttgttggatcagtctgattctttcttaccaattattgtcttaatccttgattaagaaaaaacaaaaaaacaaaagacatg

SEQ ID NO: 18698 - DNA, 3003 bp, Unknown
  misc_feature (1)..( 3003): 2750-1469P.txt file - cDNA_ID_1819055; gDNA_ID_1620619; Annot_ID_46988
actttgcgattctatcgatgcagagatctggtagtggctggtttgagactttgttaaacaatcatactaacataagctccaacggggagatattttctgtgaaagataggagggctaatgtttccaccattttcgagactcttgacaaagtctataatctagactggttgagtagtgcctctaagaacgagtgcacttccgctgttggcttcaagtggatgcttaatcaggtaaagtgattgttattcacggacactgtgacatatctttagtctttcttactcatatgttttcgactcgtctctgtttccatttgagtgcttgaacaaagagattgctatattccatccttatctgttggtcactgttgcttataactaactacttgtgaatttaaagtgataagatcttgttctgttttctagataagagcagcaacgttttcgttttacaaaagatgtgtgttgagaataggacaatttctcaataatgtgtttgcttttgctatatactttgtaaagttgataaacacgttgcagggattggtcttagagaataggacttcttttcttccctcagtgctcttcacttataagggagtttccgagtcaatgtcatttgaaactaacctgttctatttaggtagcttctttctggttgttgatgttcaaaaaagttgcctgaataaaagtttaggttgaaatagtctgtgatttgatgttggaggaacggaagatagctgatgttcccttcttatttgatccataaacctcggttctatgtagcagtaattgaactgataaatgatcacagttattttatctgatgatgaattattaacattgcagggtctaatgaaacatcatgaagaaatagtagaatacttcaaaacccgaggcgtctctgcgattttcctattcagaaaaaacctattgcgccgcatgatatcagtactcgcaaactcttatgacagagatgctaagctactaaacgggactcacaagtctcacacccattcggccaaagaagctgagatattagcaggttacaaaccaatgatcaacacaacacttttaataaatgagctgagacagattcaagaaatgactttgaaagctttgacttacttcaataccactcgacatatccttgtctactacgaagatgttgtcaagaacctcacggtaattattacatatttttttattgaactagttccagttactgattgtttattatcttatatgtgtttttgaatgaagcagagactagacgatgtacaggagtttctaaaggtaccaaaacgtaagttaaagagtaggcaagtgaagattcatggaggttcattgtcaaaacatgtacagaattgggaagaggtcatgaccacacttaaaggaaccaatttcgaaaatttcttacaccaagaattttaatttttttttgtatatatcagaccaaacaaacccttgtaggaaagttttgtttcacttgccttttttcttttttgctgtttgctgtagggtttggcattaattctcttaaatatgaagaagatttaaacaaaatttcgttgaaaattgtttcttcccctgaagagattttttatctaaatttcttaaaagcagaagaatcacaaaattatagtgaaaccgaaagaaaccagagcgatttagtttgatttattttgttcaattcaacatcaataacaccaaaccggtaaaaaccggaaggctaattcgagattgattgatttaaaccggacaaaaccactcaagccgcgtgaccgagtttccaacacattgcagattccagtcccaaaaagaaaagagagttaaaaatgcaaaaacggtgaaggggaagagaagcgaaattgggggattgggaatagcaacgttttgcaaatggtctcttctttgtagctgcaattgcaaagaacactgagagagagagagagtgtgtgtgtgacctttgagagatggaggaaaaacgacgcgattctgctggaaccctagcttttgctggtagctctggagattctccggcatctgagccgatgccggcgccacggcgacgcggcggaggtttgaaaaggaaagcgaatgctcttgggggttctaatttcttctcttctgcgccgtcgaagaggatgttgacgcgtgagaaggcgatgcttgcttctttttctccggtacataatgggcctttaactagagctcgtcaggcgccgagtattatgccctcggcggcggatggggttaagtcggaggttttgaatgtagcggtgggtgcggatggagagaagcccaaggaggaggaagagaggaataaggcgatccgtgagtgggaggctttggaggctaagatcgaagctgattttgaagcaattagatctcgtgacagtaatgttcatgtggtgcctaatcattgcggttcgttcgttcttcttcttcttcctgtttttggttgagactaaatgcaaaatattgatttcgttttacatttgttactgttttgctttgcaaattttgaaactttatgtggagagactttccaaagtaggcaaagtaaagaactttaggtagtctaggatttatgtatcacttcgtctggaaacaaggagagatttggaattgggtttggttctagaaatcatcatatggcggatcaaagtagaatgtgcatgctcattttatctagtagaatctcattggaaaaaacttaggctatgaactgatgctcctagtccttttcttgtggtaatatgatatctaagttagattttgagttgttggtattgttgatttttcacaacttctcaccctcgcatttatgataaaaaggagttgtttttaatttgggttcctgtacttcaaattctttgaaggttggttttcatgggaaaaaattcacccgcttgaggaacgttcattgccctctttcttcaatggcaagttggagggtcgcacttctgaggtatatagggaaatacggaattggatcatg

SEQ ID NO: 18699 - DNA, 3003 bp, Unknown; identical to SEQ ID NO: 18698
  misc_feature (1)..( 3003): 2750-1469P.txt file - cDNA_ID_1819055; gDNA_ID_2926207; Annot_ID_141792

SEQ ID NO: 18700 - DNA, 3003 bp, Unknown
  misc_feature (1)..( 3003): 2750-1469P.txt file - cDNA_ID_1819067; gDNA_ID_1620619; Annot_ID_46984
taaaagtcaatatttgctctagaccctccaattttccgtaaaaatctccataaaagtctctgtccctccttgccaaccaaaaactacaaacacacatcatccttcgactatcttattcatagctatcaccacccaaaaaagaaatcaccctaatcaaaaaaaaaaaggcaaggagagattttatcattattctattttcatattttttgaaaaaactcaagcaattgacttttgtgataaagatttgaagaaagagatgaggaacgaaacgggtggtaccatggtcgttgatctccaaaccgatccatataacaacattcacagtcgccataatctgagctacgaccttagcgagggtcccaaacctaggcctaaatttggtaatatctcgaaaactgaccacgacgagatattccctcccgacgatcccatcattatcaacagcaacgtgactcaccagcggtttagcagcgtctcggcctcgaccatgagcagcggtccggccagcggagaaggttctccttgcgtaatgtcgccttgggcccgcgtgtcgcctccttggggtgcagatttcaacgaagacaatgtcctcgagaccaacggtctcattggatctattgttagaaaagaagggcatatatactcgctagccgcttctggtgaccttctctacacgggctcggattcgaagaacattagggtttggaagaatttgaaggaacacgctgggtttaaatccagtagtgggctaatcaaggccattgtgatattcggagaccgaatctttaccggccatcaagacgggaagatccggatttggaaggtttcgaagagaaaaccaggaaaacataagcgggttggaacattgccaacatttaaatcaatggtcaagagctccgtcaaccctaagcatttcatggaggtacgccgcaacagaaactctgtgaagacgaagcataacgacgcagtgtctagtcttagcttggacgtggagcttggattgttgtactcgagttcttgggacacgacaatcaaagtgtggagaatcgcggattcaaaatgtttggaatcgatacatgcacacgatgacgcgataaactctgtaatgtccggttttgatgacttggtgttcacgggatccgcagatggtactgttaaagtgtggaaacgtgagttgcaaggcaaaggaacaaaacatacgttagctcaagttttgctcaagcaagaaaatgcggtcacggcgttggccgtaaaatcacaatcttccatcgtatattgcggttcttcggacgggctagtgaactattgggagcgttcaaagcggtcattcacaggcggaatactcaaaggccacaaatccgcagtgctttgtctaggtatagcggggaacttgctgttgagtggttccgccgacaagaacatatgcgtatggaggcgggacccgtctgacaagtcccatcagtgtctctctgttttgacgggacacatggggccggtcaagtgcctagccgtggaggaggaacgggcttgtcatcagggagcaaaagcctcagtggccgagggagaccggaagtggattatatacagcggaagtttggacaagtcggtgaaagtgtggcgcgtgtcggagagaatggccacgtggaaggagatggacgagccagcagcatcttcagagcggaagagctcttcgtctccgcatgaaggaagtggcgcgtggagttcacgcaatgtggaaaaataagagtggaggagcatagtgtgattatttacgagagtgtcacgtcgtcacgagagccatattcacgccgggaaagagacagaggattgatttcatttttatgactaagtcaacggagaggtttgtgccacgctagctggtgtgagaatcaaagtcgggttaatggttttcacgtaatgagttttttggttatttttttctttaaaaaaaatgtttgaaacgaaattgaattatttatttattttccataaatttgtaagataacaagaacaaagaccgaatcaaacatatatatttgttttctttagtggtctatgtcgtggttgcaactttataacttggaattttggatgagtcgttttcctcttcattagaattagtctttctatattattataatataggatgttgatattttttaattgattttccaacctggaaatatccacccaaagttgttagaaattactaatctttgtgaatttactgttaccatttaaacctaatctatctttatgagcaaaaaaaaaaaagtcttattcaatcacttaaccgaaaacatttccacaaccgggatcatcatatatgtctctgcgcctctctttgataaatacttaaatagggtcaacacctccggttttctattaaccgtgtaattcgggttatgcgaacattattgcaggaccgaagatatatttacgaaattgccctctctctttgactccatcaacgcctttcgcaacgcatcgttttcaactcccctaacccgcgttgacggcaagaattttcccggaaaataactcatttttccttttgattgcagagaaaataaaaaacaaagagaaagtcttcccctttttttgtcaagtcctcgtcttttactagtgtatacgatccaacccatctttctgtctttcttctttttgtttacttcttctgcaaattcccttttcccggaaaatttatttgctgatttttcttccttccatcgccactttcctggaaaaaaaaactaaatttcgtctctttctttaagctaaaggagctttctgtgatcaattttttctatatttctgtagttgcgttcttatttcacgcgctttgtgatttgattatttaagccactaatggcttaggatctgtatattatcacttcatgaattctcgttttctcggataagttgttaagtttctaaattagggaattttaggaattagggcttttttgggtttgtatgtgtgcttgattgggtaagaagatg

SEQ ID NO: 18701 - DNA, 3003 bp, Unknown; identical to SEQ ID NO: 18700
  misc_feature (1)..( 3003): 2750-1469P.txt file - cDNA_ID_1819067; gDNA_ID_2926207; Annot_ID_141788

SEQ ID NO: 18702 - DNA, 3000 bp, Unknown; identical to SEQ ID NO: 2973
  misc_feature (1)..( 3000): 2750-1469P.txt file - cDNA_ID_1819079; gDNA_ID_1620619; Annot_ID_46980

SEQ ID NO: 18703 - DNA, 3000 bp, Unknown; identical to SEQ ID NO: 2973
  misc_feature (1)..( 3000): 2750-1469P.txt file - cDNA_ID_1819079; gDNA_ID_2926207; Annot_ID_141784

SEQ ID NO: 18704 - DNA, 3003 bp, Unknown
  misc_feature (1)..( 3003): 2750-1469P.txt file - cDNA_ID_1819102; gDNA_ID_1620619; Annot_ID_46971
ctagaacgttccggtctaggccaagagacgtacgtacccgaaggtcttcaaactttgccactacaacagaatttggctgtatcacgtatagagacggaggaagttattattggtgcggtcgataatctgtttcgcaacacgggaataagccctagtgatataggtatattggtggtgaattcaagcacttttaatccaacaccttcgctatcaagtatcttagtgaataagtttaaacttagggataatataaagagcttgaatcttggtgggatggggtgtagcgctggagtcatcgctatcgatgcggctaagagcttgttacaagttcatagaaacacttatgctcttgtggtgagcacggagaacatcactcaaaacttgtacatgggtaacaacaaatcaatgttggttacaaactgtttgttccgtataggtggggccgcgattttgctttctaaccggtctatagatcgtaaacgcgcaaaatacgagcttgttcacaccgtgcgggtccataccggagcagatgaccgatcctatgaatgtgcaactcaagaagaggatgaagatggcatagttggggtttccttgtcaaagaatctaccaatggtagctgcaagaaccctaaagatcaatatcgcaactttgggtccgcttgttcttcccataagcgagaagtttcacttctttgtgaggttcgttaaaaagaagtttctcaaccccaagctaaagcattacattccggatttcaagctcgcattcgagcatttctgtatccatgcgggtggtagagcgctaattgatgagatggagaagaatcttcatctaactccactagacgttgaggcttcaagaatgacattacacaggtttggtaatacctcttcgagctccatttggtacgagttggcttacacagaagccaaaggaaggatgacgaaaggagataggatttggcagattgcgttggggtcaggttttaagtgtaatagttcagtttgggtggctcttcgtaacgtcaagccttctactaataatccttgggaacagtgtctacacaaatatccagttgagatcgatatagatttaaaagagtgagtgattctatttatcgttattaagttatgatacgaattaagaagatagagacgtatagactggttttatatatcgactatcgtactttaatttggtcggtccaaatatgtacaactaatctatccgttctctatgtattgttctcttttaagatttcttgttttttttttctttggttgttatgatgcttaattcctctcgtcaactgtttaagaataagatttgatgcgtggtagtggacttgttttcacacttcgtatatatatgaccttgtttacttttctacaaagaagttttatcacacatatttagacagggaaaacaagaggaatatatataaatgtaaaacttgccttcgtgtagaagagaaaatgattttcttaatttgatccgtaaaaatgaaggcaagtaaactggagtgcttgtacttgtagcatttaaacaaactcgagtgtgcaataattccacaagcatgttactttaaagatgggaagatgatatttagcagatcgatcttgcgcgtgagatgacgtaactgttctcggtaagatttgtctttacatgaaacagcttgagaagcccatatctaaatatctctttaatcgtgtgccaatcaattttcttatgtttggtttgtctatatagatatatgaccattgtattaatcatcacaaacagaacagttggaagtagatatattaattcatacccaaatctttcaacaaatttttaagtccaacaaaatgtcaatatcacaagttgcaattgatacctaggatttttcattaatcaatataaaaaccaaaaacaatctgtaaaccctacagcctaaatattgtatttattatcaaaacctatataaaaccctcaagtcataaaaccttaattaatattattaaataaatataaatagatttgaatcaagatcacgtcatgtttgtttgattttatttcgcttcatatcattgaagaaaatcataaaaccacatgagatgaatatcttcgacaacgaatacaatcagcgtaatatacggcttggatgatatgactatagatctttcagtatctatttaaagaaaaaatgacgaaccaaaataaacttcattcgtttgttaattaagagattattattttttcttagataaacgaaagtcggtggatagaaaaatattaaatgctcaaattattatggttggtttagtcttctgaattcgtagaaaattgagatgagctaagcaaaaatgttctttatcctcgtgagctgctccaagaagtggttgatgatgtaatggacaaactcgtttcgtggatcttatcattctaggctatggaccaatatggtgcagtcgacacgttcggggctttgtctgcattttgtggtctcgttattctgagttgtgatcatcattaataagtgagttgtaatgcattacaaaatcggtttgtagttattcatcctttccaaatcaaaagtgacatattgacaattttgaggcaagctttttgtttttataataatactaattagattacataatcttcaatttatattatttttaaaattagaaaagagcatttttaaagcaaaaattacattgaatcataaagaaatattggtttaatttatagagatgaacatgttgataattgaaacaaatttatttaattattttttgtatgcactcaactctgtttggcttcaatcatataagtataaaatataattaaaatgtttttattaaaatattagatttcatgattcttgttttagtatataaaaaaaattgatatctccatatcgctagtgaatagtgcagtatctctttacgcgctatttcaagaccaaaccttttctctcttctagagtgaaactgtggaagcaactctcacagagcagcaatg

SEQ ID NO: 18705 - DNA, 3003 bp, Unknown; identical to SEQ ID NO: 18704
  misc_feature (1)..( 3003): 2750-1469P.txt file - cDNA_ID_1819102; gDNA_ID_2926207; Annot_ID_141775

SEQ ID NO: 18706 - DNA, 3003 bp, Unknown
  misc_feature (1)..( 3003): 2750-1469P.txt file - cDNA_ID_1819110; gDNA_ID_1620619; Annot_ID_46969
aaaatagtgacacacgaatgaaaaagctcacaaacaaacataagagtgtttaaatcgagtattcgagtatgtataaaaagcctcgagtttcatgatatcaagcgtcgagattgcttccttcgacatcaacgacgaacctataacgcacatcgttcttctcgagtctctcaaacgcagtgttaacataatccatcttcacaacttcgataatcgaactcaaacccttttctttacagaactcaagcatctcctctgtctccttcatgctccctatgaagctccccgttatcactttcctccctaatcaaaccatcatcatcatcattcccaattagtaatcctctaaatcacaatcattaagaaagggttaacttttttaataagggactcaccaagcataagcagaggagtgagaaactgtaatggattgttgataactcccatgagaatgagtttaccatcaagcttaagcagagacaaatatggctcaagtgcatgatgaacaggcaccgtgtcaattacgtaatccaacgaatcagccaattcgctcatcttcgcttggtcggatccgatcacgtaatcatcagctccaagatcttgcaatgcctcttctctcttcttgtttgatgagcttatgacagtcacatggtgacccattgctttggctattttcacacccatgtgaccgactccacctaaccctagtatacctcctcttaggcctggttgtttcagaccaaagtggctcagtggactgtacacagtcacaccagcgcacagtagcggcgcagcctgctcaaccgccattccttctggaatcttgaccacaaacctgaacacaagaaattgaccctttagccaaacataccctaccctgttccccaagatacctaaaccaaaacctaaagatccggtttgaagcttgattttctattagataaattcaaattcatatgcatctctttgattttagtataaggatatttatgagtagttagtatatgccaaaatcgttagttgaacaacaccaagattatgtgttgaaattcaatcataaacttggtgggatttttgtatattatgattgaatttcatcacatactttatactaatttttttaaaatcattgatcaaatagcacaaagattattatcactggatttcaagatcaccgcaatcaaataaaacctgtattaattaatttacgaagatcaagataatcataaaagttaagaaagaaaaagagttgtacttttggtgaacgacggtggctttagcgaagccgccttgtgtaggttgaccattgatgtaaacatcattgtagctccaaatcttctttggacaatactgttccagatctctctcgcaggggctacaacctccgcaacatccaacgaggcaaccaactccaactatgtcccctacggtgaacttgctcacatctgatcccacctccactacttcccctaccacttcatgcctgacaacatatcactcgatctcagattctattgtactctatatgtcattttcatcagaattgatcaagaacaagaaagaagagattattatacccaggaaccatggggtaattagacatgccaagatcatttttagtttgatgaagatcggtgtggcagattccacagcaaatgattcttatgttcacatcctctggtccagtctctctgtaatcaaaacacacaaaagatgatgaaactgaaataaatcaaaacaaaacacaaagatgtaaaagaagaggaaactaattaaaaacctaagagtgtaagtgtaaggagagaggatcccagatgggtctctggcagcccagcctgttgttttcctctctgcctccattattcccattttttgatgattctttcttctttcttatcttgatctgctgctttcacgcttttgctgtttatgtgtgtgtattactatatatatatatagagaaagttggaaacgtaacgtatgcgtatgtgtgatgaaataattggtgtttctgcatagcacacatttgatggctataattgagtgtaaatttgtgtatattattgacaaaattagtcaaaagcttaaaatcttttttagtcgttgaaagatccttctagaaaaagacattttttttcttcttcttttcatacgatggctcatggctgtgtagtttattagaattttaggtgaaaaaaatattagaagccaacaaaacttaaatgaaatttatttgcattcataattcattttaccagtttataacaacaacgtaatccaaaaagtaaaatgagaaagaatggaatttgtgtactttgaaaggaagaaaaaccactattgacgtggacacgtcggctaaaggagggtccacgggggttggtgaacaaacaatgtggggtctaatcgtgtgtttgctttggtttaaaatcatggttggccacgtgttgattcttgacctctctctgacatgaaactgtagcattgacggcccagatcagctgcgagaatacttcccacaaccatggaaattttacggcccagatcaacaaagaatcgatttgctctttactatttcgaagaacaaagagtgacagttatgaataatagaaaagaaggacaaagagtgtgtgaatggcttcacattaaaacaaaagcccattatgaatgacccattcacatttcacacccagtttgaaaaatcgaccgtccaattaagtaacattcaaaaacccaaaagataaacctctaattcacgaatcacaacagcagcatgagccgtttcatcacgacgttatctcagagtttcttggaaataatttgttgtagcggacttgtggctgtaaatggggccaatgcttaaatttacttgtctcgtctcttctacacgtcttctcttccgaccacacccttcattcaattcaacgtctcctctctggctctctctctcaaatatataaacaccaataatgtctccaatttgagatttttaactgaacccaagtcatg

SEQ ID NO: 18707 - DNA, 3003 bp, Unknown
  misc_feature (1)..( 3003): 2750-1469P.txt file - cDNA_ID_1819110; gDNA_ID_2926207; Annot_ID_141773
aaatagtgacacacgaatgaaaaagctcacaaacaaacataagagtgtttaaatcgagtattcgagtatgtataaaaagcctcgagtttcatgatatcaagcgtcgagattgcttccttcgacatcaacgacgaacctataacgcacatcgttcttctcgagtctctcaaacgcagtgttaacataatccatcttcacaacttcgataatcgaactcaaacccttttctttacagaactcaagcatctcctctgtctccttcatgctccctatgaagctccccgttatcactttcctccctaatcaaaccatcatcatcatcattcccaattagtaatcctctaaatcacaatcattaagaaagggttaacttttttaataagggactcaccaagcataagcagaggagtgagaaactgtaatggattgttgataactcccatgagaatgagtttaccatcaagcttaagcagagacaaatatggctcaagtgcatgatgaacaggcaccgtgtcaattacgtaatccaacgaatcagccaattcgctcatcttcgcttggtcggatccgatcacgtaatcatcagctccaagatcttgcaatgcctcttctctcttcttgtttgatgagcttatgacagtcacatggtgacccattgctttggctattttcacacccatgtgaccgactccacctaaccctagtatacctcctcttaggcctggttgtttcagaccaaagtggctcagtggactgtacacagtcacaccagcgcacagtagcggcgcagcctgctcaaccgccattccttctggaatcttgaccacaaacctgaacacaagaaattgaccctttagccaaacataccctaccctgttccccaagatacctaaaccaaaacctaaagatccggtttgaagcttgattttctattagataaattcaaattcatatgcatctctttgattttagtataaggatatttatgagtagttagtatatgccaaaatcgttagttgaacaacaccaagattatgtgttgaaattcaatcataaacttggtgggatttttgtatattatgattgaatttcatcacatactttatactaatttttttaaaatcattgatcaaatagcacaaagattattatcactggatttcaagatcaccgcaatcaaataaaacctgtattaattaatttacgaagatcaagataatcataaaagttaagaaagaaaaagagttgtacttttggtgaacgacggtggctttagcgaagccgccttgtgtaggttgaccattgatgtaaacatcattgtagctccaaatcttctttggacaatactgttccagatctctctcgcaggggctacaacctccgcaacatccaacgaggcaaccaactccaactatgtcccctacggtgaacttgctcacatctgatcccacctccactacttcccctaccacttcatgcctgacaacatatcactcgatctcagattctattgtactctatatgtcattttcatcagaattgatcaagaacaagaaagaagagattattatacccaggaaccatggggtaattagacatgccaagatcatttttagtttgatgaagatcggtgtggcagattccacagcaaatgattcttatgttcacatcctctggtccagtctctctgtaatcaaaacacacaaaagatgatgaaactgaaataaatcaaaacaaaacacaaagatgtaaaagaagaggaaactaattaaaaacctaagagtgtaagtgtaaggagagaggatcccagatgggtctctggcagcccagcctgttgttttcctctctgcctccattattcccatttttttgatgattctttcttctttcttatcttgatctgctgctttcacgcttttgctgtttatgtgtgtgtattactatatatatatatagagaaagttggaaacgtaacgtatgcgtatgtgtgatgaaataattggtgtttctgcatagcacacatttgatggctataattgagtgtaaatttgtgtatattattgacaaaattagtcaaaagcttaaaatcttttttagtcgttgaaagatccttctagaaaaagacattttttttcttcttcttttcatacgatggctcatggctgtgtagtttattagaattttaggtgaaaaaaatattagaagccaacaaaacttaaatgaaatttatttgcattcataattcattttaccagtttataacaacaacgtaatccaaaaagtaaaatgagaaagaatggaatttgtgtactttgaaaggaagaaaaaccactattgacgtggacacgtcggctaaaggagggtccacgggggttggtgaacaaacaatgtggggtctaatcgtgtgtttgctttggtttaaaatcatggttggccacgtgttgattcttgacctctctctgacatgaaactgtagcattgacggcccagatcagctgcgagaatacttcccacaaccatggaaattttacggcccagatcaacaaagaatcgatttgctctttactatttcgaagaacaaagagtgacagttatgaataatagaaaagaaggacaaagagtgtgtgaatggcttcacattaaaacaaaagcccattatgaatgacccattcacatttcacacccagtttgaaaaatcgaccgtccaattaagtaacattcaaaaacccaaaagataaacctctaattcacgaatcacaacagcagcatgagccgtttcatcacgacgttatctcagagtttcttggaaataatttgttgtagcggacttgtggctgtaaatggggccaatgcttaaatttacttgtctcgtctcttctacacgtcttctcttccgaccacacccttcattcaattcaacgtctcctctctggctctctctctcaaatatataaacaccaataatgtctccaatttgagatttttaactgaacccaagtcatg

SEQ ID NO: 18708 - DNA, 3000 bp, Unknown; identical to SEQ ID NO: 3008
  misc_feature (1)..( 3000): 2750-1469P.txt file - cDNA_ID_1819116; gDNA_ID_1620620; Annot_ID_47024

SEQ ID NO: 18709 - DNA, 3000 bp, Unknown; identical to SEQ ID NO: 3008
  misc_feature (1)..( 3000): 2750-1469P.txt file - cDNA_ID_1819116; gDNA_ID_1620620; Annot_ID_162275

SEQ ID NO: 18710 - DNA, 3000 bp, Unknown; identical to SEQ ID NO: 3008
  misc_feature (1)..( 3000): 2750-1469P.txt file - cDNA_ID_1819116; gDNA_ID_2926190; Annot_ID_140987

SEQ ID NO: 18711 - DNA, 3000 bp, Unknown; identical to SEQ ID NO: 3008
  misc_feature (1)..( 3000): 2750-1469P.txt file - cDNA_ID_1819116; gDNA_ID_2926190; Annot_ID_200959

SEQ ID NO: 18712 - DNA, 3003 bp, Unknown
  misc_feature (1)..( 3003): 2750-1469P.txt file - cDNA_ID_1819120; gDNA_ID_1620620; Annot_ID_47023
ctgaagcatacagacagattaaatatgtgaaaaaacattctcaaaataagtaaagatgaagttcgtctccaagttcacatttacctattggcgtattgaacaaatccgcaacgttttcctgcgggtattttcacatgaactagttcaccaaattgaccaaaaactgacttcaaatcatcttctgttacactttgatccacagctccaacaaaaatctggaatagagaacataacgcttcaatttcaacaatatatcccacagagaaaaaggcttaggcaacgtcaaagaaaaaaaaggcttagggaaaccaaaacaagttacgcactgttgtgttagttggatcactttctcctgaatttccttgagtgttctgatatgaagctgcaataaaacagtcaagagaaggtaaggaaaaaaacctcaaacatctatttatttaattaagctgacagtgcaaggacacagacactaacacaaacgcacacacacgacaatagcagtagcagaacttatccaaatcaagacccaaaattatcaacatataaagcaaatgccatacataggttacagctcgaagataaaggtaaagtgattctgaagttagttgctaattaatacaaaaaagcacattaaagatatactaggggaagtgcctgcaagatccaacttcgagaaattagagaatcggacctaaattctctagggtatcacaagtaacctaaattccttccaaggtctgacagtcttaccattgtaatcaacttttccgaaagacgaaatgtaacactaaaaaaggttgcaagtataaatttagaggcacaacgtaactgaaagaaggaaaaaaattgcagcactaactactggaaaaagatgaattgagaggtatgaaaaagatatcaaaacactctttaaggattcaaactggacaaaataaagcgaagagtaatgaactatgtaacatgaaaagaaataaaagatagggctaaaaattaaaaggaaagacttatgcttgataagtaagaaactggaaaataatttgcaaatggagtaaaagctttgtaattaacttcttctgaaaacataaccaactgacctaaatgaggccacgcaaggtggaatcattttcagctgaaatcagttccaggcccccgaaagagagcctcttgttctcctgcttaaagacaacatgagtttttttcttataagttttaggatgttttgcgatattaaattctttgaagagctgaaaggcaagaagcgggagaaaagggtagacagattctccagtaatcagaaagatagcagtaaaggagtaccccaaagaaaagacaatcaactaacatagacagtgtaagacaaagtgagtcatatcatcactcaacttattcataagtgatcagatatcaggctccttaatatcaaaacatacctggttgcattgtaagaggcttcttgttggcagcaggaccagtacgcataggccttgatgagcagtattgaccattcatttcagtcatggcacgaatctgctcactttcatccgcaaacctgacaaatccataacccttggaccgtccagtagtcctatcattcacaactttagctcccttgacagaggaatacacagctttaaacgtttcagtaagcatgtggtcggtaacatcaggtgccaagtctccaacaaaaactgtgtgctcaggcccttcagcctggcgtctctctccagctccaagctgagcccagttcaacctgaaggcctgctcactgctcggcatcggagcaccattgtaagtctgtaaattcctctcagctgtagcatggttcacaaactcaataaagccataaccttctgaatatccgttctgtttattgcgaataactttagctgctgtagcctgcaaccacaaaggatgaaactttcaatacttgtagaagaaaaacgagagactaaaaacagaaatcaacaggattttcaaaattacctcgccagtaagaccaaagacgttcatgagatagttctcatccatccatggctgcaagtcaccgatccacagggaccggatctcaccagctgatcctggattctgagatccaccaccaccatactgctgctgctgtggttgaccagaagacggtgcagactgctgattccatcctgcaggcggctgaccttgttgttgctgctggtgctgcatcatccacgactgctgctgctggaggtaagcttgttggtcggaaggaatctgccctggccctgttgcagcaccgttggaagctggaggtggctgctgcatcatgacgacgataacctagcaaaaggtacgactgtcgtagatgcaattaaagggttgagctcgaggacgtaagggcaaaagagagagagagagaaagattcgctgtcgctgtttcttttttatagtcaaaagttggttctaatatggcccaatataaaagtttgagctcggcccattataagagcactcgaacaacccggttaagtaagtctagggttgaccaaaaaaatcgatacgaaccggtcgggattggtttgggattgagatgcctgatttcgaactctcagcgtcgccgatatgttttgtcctgttaaaccctaaaactaaaaccccgcgaagagagaagagttctctgtagtgttcttttgatggcggaatcaatatcatcagacttggaagatcaaggtacgataatagcttgacatgtgcagactcttttagcaatatctgtttggttttttccaacaaaaaaaaaactaaccattagaattttttggaattaattgttggaatttttgagtcaattaataaaattttagctgaaatttgtctggctttacctttgaatgaagacttgtatcacttatttgtaattgccttgaaagtttttgtctttgagtagcttttaattctcttgaacagtgtggactggtggagaagtagtttcttactatctgattgaatactttgtttgatatatcaggaatg

SEQ ID NO: 18713 - DNA, 3003 bp, Unknown; identical to SEQ ID NO: 18712
  misc_feature (1)..( 3003): 2750-1469P.txt file - cDNA_ID_1819120; gDNA_ID_2926190; Annot_ID_140986

SEQ ID NO: 18714 - DNA, 3000 bp, Unknown; identical to SEQ ID NO: 3010
  misc_feature (1)..( 3000): 2750-1469P.txt file - cDNA_ID_1819124; gDNA_ID_1620620; Annot_ID_47022

SEQ ID NO: 18715 - DNA, 3000 bp, Unknown; identical to SEQ ID NO: 3010
  misc_feature (1)..( 3000): 2750-1469P.txt file - cDNA_ID_1819124; gDNA_ID_2926190; Annot_ID_140985

SEQ ID NO: 18716 - DNA, 3000 bp, Unknown; identical to SEQ ID NO: 3018
  misc_feature (1)..( 3000): 2750-1469P.txt file - cDNA_ID_1819128; gDNA_ID_1620620; Annot_ID_47021

SEQ ID NO: 18717 - DNA, 3000 bp, Unknown; identical to SEQ ID NO: 3018
  misc_feature (1)..( 3000): 2750-1469P.txt file - cDNA_ID_1819128; gDNA_ID_2926190; Annot_ID_140984

SEQ ID NO: 18718 - DNA, 3000 bp, Unknown; identical to SEQ ID NO: 3017
  misc_feature (1)..( 3000): 2750-1469P.txt file - cDNA_ID_1819132; gDNA_ID_1620620; Annot_ID_47020

SEQ ID NO: 18719 - DNA, 3000 bp, Unknown; identical to SEQ ID NO: 3017
  misc_feature (1)..( 3000): 2750-1469P.txt file - cDNA_ID_1819132; gDNA_ID_2926190; Annot_ID_140983

SEQ ID NO: 18720 - DNA, 3003 bp, Unknown
  misc_feature (1)..( 3003): 2750-1469P.txt file - cDNA_ID_1819136; gDNA_ID_1620620; Annot_ID_47019
gttgctcgtaggtgtttcagcttataaatacattttctaaacttatatccttttaaacgtcttaaaattattatttccttgtgtcattgatccttactgcaaacagtttatgactttgaggacttgattttatgaacttcgaagttgtgaatgaacaaagtcaagaattatttctgtttctgtgttagcaagtcaagaaatccgtatgcaaattttccatttaatatgtcgctcaagttcaaggcaaaacatttatcgtttttcttttgcctttatttccttgtcaagttctcaagaaggaagaggaggagaagaaagccagagtaggcaccggacgcaaaatcaccattggtaattaacattagagcccagaaaatttgtttcatttatgaattggtagcttaatgttcggtctccttgtgtaaaggtaaagttgatggtccagatttgacaagctttgttcgccaatttccaccagattcaaaaggtattacattttctctgccaatagattaattgagtcaccatagatgctgatgactaacttcttaggaatcccttgtgtaaatttgatagagattatgatggatatgcgtttatatttttgtggtgtttgacccatgaaatggtgtccattggctgatgattataatagttttgtgaaagaaacatcttttgaatgttccccatataaccattatgattgcggtagcttaaaagggcaacaaaattgttctcatgcaccattatatatcgtttaagtcatttgttgattcaagggctgaggttactacagttgctagatttcttataaccttaaaagagattatggttcgaccataaagtcgtggaagtaagactgacagttaagtttatttcctttttttgttaatgctttaaggtggtgaaccagaggaagctagtgaagaagcagataaatcaaggtgagtcatcatgattcataatatctccgcactaatcatatatgtgttaaatcttcttacattctattttttcctggatgcaaagcacaacatctttcagaagactaacataaccacatgttctcacattgctttacagggccaaggaacatgaacccgagatagtttctgcagaaccacccgaaccaaagtaagtctagccaacttgacattgttaatcctaaagttcagattctagctcacggatacgaaacatgactcgttctttctgatagttacagactgctactatgctgaaactgttctctatgaacataagttatgtattgtgtttggtatgctttaaattaaactaatgttaatgttgatgttgatgatgatgcaggacaacagagccatcaggatctggatcatcatttaggcccgggacatggcagccaccatcctaaacacatctctcttcacgcagatgacaaaccaacatactattcaattattttgtttgttgtactctacacaaccgattggtttgagccttacagatgagccataagaccagagagcttttcaagaccctaaaattgtgtcctttcacgctgtcattgaggacttagaagagtcaaaatgagaagccatcttcttatactttgttttgtttagggtgtttgtctcttggcataatgcttgagacttttagcctgccttgtccttcatagctgaagaggagcctagctaccttttgtttctcttcgttgacttgaataaaacagtttgattgaataacagttattcattttcatgtcatgatggtagtggatataagaaaaaacaaatacatagaataattattttaatgtttcagaggagaaatcctacttggcttgtgccagactcataacccaatcaaaacttcgtattaccaaaataagtgtagttctaaattttattctggtttaggctgtagttataaattactcattttagtttgtgaatataaaattactttctgcaaaagaaaatattctcatctttcgacgaaaagccaattattcgaatgttctcacgttggtctgtagctgtaaactttatagtttatataataaggtgttctactgttcttatataatttgcaagaacaaataatattaaatgcaaataaaaaatagtcaacggtccaaagtggatcataagccgtccgttcggtcgtctgaacttcatccaacggttaaaagaaatatacctgacgtggccttgggccattgtatattagtagtgagtgtgcccttggaaggttctgtaaaatgttttattcgcctctatcagaagcttgacgaaatctcttctccgtctctctctctctttccctcgtccattccacgatcttcttccaatctcaaatctcccattttctagtgtttcattttgatccttcttccttcctctggagatttctcaaatctcttcaactattttgatttgccgccatgtatcgacgcgccacttccggcgtgcgttctgcctccgcaaggctttcttcttccctctccaggatcgcctctagcgagacagcttcggtttcggctccatctgcgtcgtcgcttcgcaatcagacgaaccgatctaagagtttctcctcggctctccgctcctttcgagtttgctctgcttccacgcggtggagccatggtgggagctggggatcgcctgctagccttcgcgctcaagctaggaattccactccggttatggagaaatttgaacggaaatacgcaaccatgggtatgtctgtttgctttctctgacgttctaagaatgattgctcttaacttgtgtgacaagaatctgtgtttaccgcatatctgcttagatcgatttttcgctttaaaatgatgatctactgattctgatatgttctgattcaaagtaaaactagctagatgaacatttgatttgctcttgcattttggtttatgatttgtagatttagtctactaaatttcttttttgtatattctaaaaggacaagcaaattcatgtgttatgtgtcaattgaattatg

SEQ ID NO: 18721 - DNA, 3003 bp, Unknown; identical to SEQ ID NO: 18720
  misc_feature (1)..( 3003): 2750-1469P.txt file - cDNA_ID_1819136; gDNA_ID_2926190; Annot_ID_140982

SEQ ID NO: 18722 - DNA, 3000 bp, Unknown; identical to SEQ ID NO: 3003
  misc_feature (1)..( 3000): 2750-1469P.txt file - cDNA_ID_1819156; gDNA_ID_1620620; Annot_ID_47013

SEQ ID NO: 18723 - DNA, 3000 bp, Unknown; identical to SEQ ID NO: 3003
  misc_feature (1)..( 3000): 2750-1469P.txt file - cDNA_ID_1819156; gDNA_ID_2926190; Annot_ID_140976

SEQ ID NO: 18724 - DNA, 3003 bp, Unknown
  misc_feature (1)..( 3003): 2750-1469P.txt file - cDNA_ID_1819160; gDNA_ID_1620620; Annot_ID_47012
ctaaatcggttgacaagtcggaattttccggtacaccggcgtttatggccccagaagttgctcgtggtgaagaacagaggtttccggctgatgtgtgggctttgggatgtacgatgatcgagatgatgactggatcaagcccttggccggagttaaacgacgtcgttgctgcaatgtataagattggattttcaggcgagtcgccggcgattcccgcgtggatatcggataaagctaaagactttctgaagaattgtttaaaggaagatcaaaaacagagatggactgtggaagaattacttaaacatccatttcttgatgacgacgaagaatctcagacaagtgattgtttgaagaacaagacttcttctccaagcactgtgttggatcaacgattttgggattcatgcgaaagctccaaaagtcacttagtttcgattgatcatgaagacccttttgctgaatactcggaatctttggattcaccggctgatcggatcgagaaactcgccggagatgagttttcaagcttacttgattgggatacggaagacgatggcggatggattcaagtgagaggcgagaaacataaagaaaccgagaaacgcgacggcgacgaagacgtgatttgcgttgaagcaacgtcatcgtcgcaaacgattgaagaagttgaagattggatttcgaatcaagacagcttgttctcggaatattcctctgacgacatcattaataatttctactctaatgttgctattcaaggaaatttaattgcatttcattattgtactgatgaaggtgaaaatgtatccataaagaatatgtttcgtactaataacaaacatttgtttttcaaattgcaagctcatgttaaattcactaaccaagtctgatgaaacaatgtccatgtgttcaaacttcaaaataaaagaatctatgtacattagtacattacctaaatatttccaatgcaacatatgcgttaggttatgtgctaacgatcactattgtatggactctagaagacaattcaaattgcatatttcaaagttggaaacacaagtctttgtgttcttgttagaggttacgtcaatctataagataagattgactatagacgaagtcaaaactgtactttgtccaagatttatttacacacgaagtcatgtcaatacaattttgtgtgtgtttacctaaaccgcataagaccccgttatgttaacgcagacgactctctgggagtacataatcatagtcgtaaattaattactaagcaccaaaatacatatttgaacaagtaaataaaatgatatctaataactttagtcaactttcaccgtctgaaatctaaaaacacacatacaccgacactgataatttcgtcggtcttgagagttgatagttctactctatagacatgattattggagcagaacattcctactttgacaccgatacctaacaaaacaaattagtttatatcaataccgtacaatttattaggtaccgtttgtagaaatttgttgaaacattaattatatttttcttcccgtacttatccaaatacaacaatttaagaataccacttaatagaatgatatcctttggtcgacaatagctctaaatcactttcacttagtataaatgtattatgtatagtacaattttttttgattattttatatttaagtatttgtcttcttttaaatcattaaaacattgatatgaactgttgtaagctaatactattacaaaataaaataaaaccattgtttcttaccatcattctcattgccactatctttaatatttcataaaagcataacatataataaagtttacctacaaaatgaaaactgatcacaggtagaaataagttcgttgtgacttaaaagttgatgctgatgattgatgagtcagtgatgacgtcctggtgacattcatcaaacgcataacataccaaagttacttgtcatctctttttgtctatcttttagttttagtatgggtttgtgaattggtgatagtagtaagtggtgaatgcccaaatttgaccacttcatcgcataataaacttatataaaacaatctgataaaaatattcacaattactgcaatcaaattctatgatgaaaatggttattaagtttacctgcagaaacacatgctatgatgttctccaattcaaaataaatcaattcaaccgatccaaaaacctacataaatgttttgaatttatgtatgatgtaaatgtaatagtgtcttgttaaaactagagcatgttactaaatcattatatagaaatgagtcagatagaagaagtattaaaaagagttgacttgagaaaaaggatgggaacttgggaagagttattgttggcaaacacactcaataatagcaaatatcatataaaccttttatttttgtccttttctgttttgctcatctttcatgccttgcattagatggctggagttggtgtattacatataaaccgtaagcccttatatccattctccaatatttaatttcatctcaaattcaaactggtactgaaaatttattatttctgttgttatttctctaagagacttatctatatatatatctcctatgcatgatatactatatagaactttcaatatttttttttttttgatcaaagattattttcttttctttaacttgtgttttattaatcactttctatccgttgtaaatcatatatattaagagcatgagtctaaaatactcacttttggtgactagtaactttgctgtaccttcattttttttaaaaagagctacaagactctgtaagagtgaaacgaagcccaatcccattatctgttatgaaaagttcataaaagcccaattaatatacaaattcactacacgaggagaaacgacgtcgttagtggagtggtaagtgttgacaaagtgacgagtgacgacgaccttttgaattaacaatcgaagcagtgactgagtttgatatcaatg

SEQ ID NO: 18725 - DNA, 3003 bp, Unknown; identical to SEQ ID NO: 18724
  misc_feature (1)..( 3003): 2750-1469P.txt file - cDNA_ID_1819160; gDNA_ID_1620620; Annot_ID_162263

SEQ ID NO: 18726 - DNA, 3003 bp, Unknown; identical to SEQ ID NO: 18724
  misc_feature (1)..( 3003): 2750-1469P.txt file - cDNA_ID_1819160; gDNA_ID_2926190; Annot_ID_140975

SEQ ID NO: 18727 - DNA, 3003 bp, Unknown; identical to SEQ ID NO: 18724
  misc_feature (1)..( 3003): 2750-1469P.txt file - cDNA_ID_1819160; gDNA_ID_2926190; Annot_ID_200947

SEQ ID NO: 18728 - DNA, 3003 bp, Unknown
  misc_feature (1)..( 3003): 2750-1469P.txt file - cDNA_ID_1819170; gDNA_ID_1620620; Annot_ID_47009
aatattattattatattaacgaaattttctttttgactttttctgttcaacattaatttgtaaatttatgttgtctttatagataatatttacatggtcgtgtttattcatgggacgggggtgtggtcgtagcaactactacgaggctcaatttgggcaaatgactaccatcgttcgttcggtcgtttttttgcgaaactatgatataatttttaaatacatatattgagaaatatttagaccattgctttttgttcgttattttatgagacaaaactacaaaataaacaaaaaaaaaaccaaacaaggcaagaaacacaagttaagattcggaatctaagaaaaggatatagttcttgaaccacataatagtggtccattatttatttggcagtctctacgactacgatcgtacgtccctccttccatcaccgtttgttttatttattgtttcttttctttttttactttaaacaaccatttatcatgttttaagacctcgacatgtaattcgaattagtattgcattaagatttaaagagttacggcggtggatcggtggtagtcagtgcaagtaacggatcataattgcggttgaccaagcctctttcactggcctctttgtaaccatgaaagctgagatgctattggtacaccactaagtcccaaattcccaataatcgtgcgtcagtaaacatcaatttcgagaggacaagtatcaaaatgcgatatctgctgttacaaatattcaactcagttacaaagcccttaacaatgtattgatttctaattttctataaagtaactttgtgaatacacctaagtttatcaatgaagaataaaattgtttaaaataatcgacaaaataacattatacatgaattttacaacaagtgtttgagcatagtagctaagttgttttcttggggtactctcttggtccgaaaatggtggaaccaaccctcacattggtgcttcccatctcaatctgcagaaacatagtcaaagatcatcttccacatatatgtggttcctcggatgaaagaaagaacacattcaaatgattttcgatattgagttgattgcattttcgatattagaagagagacaaagatattaccgctagctcgaagtcaccagacatgcccatggacagttcaaattgatcctcagccattccaagtgccttgcatacatcagctctacagtttgaaagtgtctgtcccggtttatggggaaaagaataaaccttggtaagtaaaacttgtaggaataacccgagaacacgtaaaacaagtatccaatcaagtagtagaataccctgaagttctctggggtagacgtataatcaggcatcccaatagtcattaatccggagaataccagatttggacagtgatgtttcacatgtcttgctagctctacaacgctagaaggttcgattccagatttagctgcatccataatcaatcagtcagccaactgaagaggctggacaaggaaatcagcatagaggtaaaatactcacaaacttctccgcttgtgttcacttggaccaaaacctttagtggatgtctcccaagatttgaaacagctcgatctagatgatttgctacctgtgaaatcaatcccaagtgattgtataaccaaaataacctcctagtaaagtgaattgtgcaagttaaacgccacaacaacctctaatcgctagttataataccttttctccatccacaccatgaaccattgccaaatttgggactccagctgcaaacattggattaaacgactttcactttcactaaacccctaattcaatattaaagatggggataaaagtcagactcaatagcgttttggctttgttgctctgtaaatgccccacgaaatgccactctatatcttccggaagctgtatatcaatcaaacaaagtgaaggagaagctccattagcatcatcaaaagcacaaaatatatcacattcccagaaaatggagagacacatagtagttagtgattgaaggataaacattcggattttgaaatgaaatcgattatctagtgaagataacaaggattggagagaggaacctgtggagctttatcgatgatttcttgaacgtaattctcgccgaagcaacggtgacctgcgtcgtagatttggcggataagtgagacgggtttagtcttggagactggaaggaccctgacccgctcggcatctcttcctacttgctccgccgccttacgagctctaagaatcacagagcggagagcacttgcgacggttgcctccaccgcaggagctgccatcgccaatcgccactaacgcctgtcgtcaatttgggcttcttcgggagtaatgtttttgtcacgtaaattagtttatggcctttaattggataattcacggtccacacgttcaatactaattgcgattatttatctcttcacttttaatcaaaatttccaaggcagagacacatgtaagggttgatgtatatagtcatcaattcacgagattattggaatctttattgcataaacaatatcaaaattgtgtttttatatataccctttcaaaacgttatgggattcaaaattacacccacacccaccacttattgattggacataacatcattcaatgtaaaattacacccacctcttattcatgttttaattttcacttctgtatatatttttcgaatttcatgtattctgtttgtacttttttgggtcttatgttaagcccatttgtgggtttgtaaaagtctttgacaatatccaataaatcagtgaaaaaaaaaagaaaaaaaaaattattatcactgtaaacttcaaatcaattcaacttgtgctttacatgggtcttcgctggaccaatatgttttgtgggcctttcaagcccaacaatagttatctaccctagctcaaaaagagttatcttattctcattctctctctctctgccgcagctatcaatttactggagaagagatg

SEQ ID NO: 18729 - DNA, 3003 bp, Unknown; identical to SEQ ID NO: 18728
  misc_feature (1)..( 3003): 2750-1469P.txt file - cDNA_ID_1819170; gDNA_ID_2926190; Annot_ID_140972

SEQ ID NO: 18730 - DNA, 3000 bp, Unknown; identical to SEQ ID NO: 2992
  misc_feature (1)..( 3000): 2750-1469P.txt file - cDNA_ID_1819177; gDNA_ID_1620620; Annot_ID_47007

SEQ ID NO: 18731 - skipped

SEQ ID NO: 18732 - DNA, 3003 bp, Unknown; identical to SEQ ID NO: 15863
  misc_feature (1)..( 3003): 2750-1469P.txt file - cDNA_ID_1819196; gDNA_ID_1620620; Annot_ID_47001

SEQ ID NO: 18733 - DNA, 3003 bp, Unknown; identical to SEQ ID NO: 15863
  misc_feature (1)..( 3003): 2750-1469P.txt file - cDNA_ID_1819196; gDNA_ID_2926189; Annot_ID_140964

SEQ ID NO: 18734 - DNA, 3000 bp, Unknown; identical to SEQ ID NO: 2989
  misc_feature (1)..( 3000): 2750-1469P.txt file - cDNA_ID_1819200; gDNA_ID_1620620; Annot_ID_47000

SEQ ID NO: 18735 - DNA, 3000 bp, Unknown; identical to SEQ ID NO: 2989
  misc_feature (1)..( 3000): 2750-1469P.txt file - cDNA_ID_1819200; gDNA_ID_2926189; Annot_ID_140963

SEQ ID NO: 18736 - DNA, 3000 bp, Unknown; identical to SEQ ID NO: 2985
  misc_feature (1)..( 3000): 2750-1469P.txt file - cDNA_ID_1819223; gDNA_ID_1620620; Annot_ID_46991

SEQ ID NO: 18737 - DNA, 3000 bp, Unknown; identical to SEQ ID NO: 2998
  misc_feature (1)..( 3000): 2750-1469P.txt file - cDNA_ID_1819223; gDNA_ID_1620702; Annot_ID_165127

SEQ ID NO: 18738 - DNA, 3000 bp, Unknown; identical to SEQ ID NO: 2998
  misc_feature (1)..( 3000): 2750-1469P.txt file - cDNA_ID_1819223; gDNA_ID_1620620; Annot_ID_162237

SEQ ID NO: 18739 - DNA, 3000 bp, Unknown; identical to SEQ ID NO: 2985
  misc_feature (1)..( 3000): 2750-1469P.txt file - cDNA_ID_1819223; gDNA_ID_2926189; Annot_ID_140954

SEQ ID NO: 18740 - DNA, 3000 bp, Unknown; identical to SEQ ID NO: 2998
  misc_feature (1)..( 3000): 2750-1469P.txt file - cDNA_ID_1819223; gDNA_ID_2926189; Annot_ID_200900

SEQ ID NO: 18741 - DNA, 3003 bp, Unknown
  misc_feature (1)..( 3003): 2750-1469P.txt file - cDNA_ID_1819231; gDNA_ID_1620621; Annot_ID_47045
tctcctgaagtagattttgtgatacctgaaacgcattagcttttttgtaaagctcatcttgaataacggatatatcatgcatagctagctccaacaatggtttctctttctgcaactcctctcgtaaatcctccagcaattctttttggaccgatatttcccgctcaagcgcaaaatttttagcctcaacaactctgagctttactctctcactttcaacttcagtgtgcgcatccctcaagctttgcatatatgacaacacacttttcctctgttcctcgagttcctccaattgtttttccaatagtagctctttttcttccatttgctccctggaaaataccaaagcttcccgagaagaaataagctcgaatcttacatcagtcagaagctttttcactttcatgaagtcctccatggtttcattggcttctcctaaacgtttcacggtttcctctttaagcttattcacttcatcctgggctatcagccactcttctgtctgtttcttcaagttggcttctgtttctctaagcttttcttgttcaagtttcttcgtagccttagaaatctctaattcttcttccttctcctcaagagctctctgaagtgcatatatttcaccttcttgtctcttgacaacttcgttggctttgcttaagagttgtgacttgctttcaaattcagaaatagccatagaaacctccttgcttctgtttgcaatctcttgacgcatcttctctagctcttcctctttcaaagtcaaggacgattgcaaagcagcacgttcctcgtctctttcccttagcttatgctttaactcttctatctccctggcttgagaagctaactccacatttgcccgcttcagctcctcttgtagactctcatgcttcaacgaagcttcagagattgttttctcacgtttttctaactcctcctttgcccggttaagtttatttttgtcagagagaagcttcctctcagcatcgtgcaggtcctcttcccttttcaacaaggccactagcgcagcctcaaggtcagactcaagcacgccaaggtttgaataggggagatcatcatcgtcaggataaaccgagtgttgattggtttgtctctccaatctgtgtgtccgagcaaataatttatcgaaaagaacatttgcagactcagctgagccattgtcgttgatgttgggtcttgtattgtgcaagactgattgaacactcagtaaaagatgtctctttctccttgtaatgctcgggaatgcgacaagactcttctgcttatggtttactactcttgtcaaacaatactgcataagaaaaaatcatatggccgacatcaaaatcaaaatcaaaagtttgattattttggacagacactaatcaatatggatgcaagcaaacttattcaaattaaaggaacagtattgaaatttgcaatctttttaagccagaacaaggaacaatcagaacaaggccagcaaaagtcaaaaattcaagtttgataaagttaagagtaagtaaagtgttgtgaatcagcagcgatatataaatgaaaatataggggataatatagagaaaggtaaggaaacaaacatcgcagggagagggagaggagaaggaagcaagattcaagcgaatggcctgagagaaacccatcctgagagcataattatgcaatcgccatggagcttaaagacggaacaaaacccaaatccactggatcaaatttaacaagtgggcgttttggagaagaatgcttacgagaacaaatccaaggaagaagaagaagaatctagctagggaatggatattgttacaaaattcttttaccaaaaaaaaggatacaaaataataaatagaggctcgcgttggcttgcgagttgtggtcgccagtaaactcgaaagtcctttttgcccttattcataagatgcatgtcggcattgtccaaatacacggccaagggatctatttgtaaaaataatggactcttcttaattacgtacgtggtaacggttttctagtatgacaattctctttctttcgcgtagtcggctagtcgcgtggttagaaatgcttacacactaaagagtatgttatattaaactggaatataaatttaagaaactgaataaaagtcatcaggcccatgacattggcccaatagacccaatgaaaaaccaatccatcagctagttttcttaacatatcaacccaacgaggttgtatcttgttacatttgcaagtgaacttttttatcattaaaaaatgtaacaatggtatttttggtttagtgttcctaaaatatttgtttcccacataagattttatctacaccaaatagtccaattgtataatataatccatcttcacaaaagcattttaaaggatatcctaccttctaaattccggcgaaaaatatcttaaatctgaaaaagtgatttatcgtgaatagtgtaatgttagcaaaatcttaaacttcaaaaaatcgtaaaacataaagaattaagtgtgacggattaattaagatatcgaaaccaacacagtaatcctcatctatgacttggaaaaactcataagtggcaagtggagttcgagtttggtcattattgtgaaacaccaaacctaatccacttacaaattcattaaaaactacaaatttgtgtggtagtttttttttttttttgggaaatttatgtggtagttaattagttaacaaacaattatatataaatacaaattttgtttggagttaggtccgcttcagcctgcttaagcgattctaagcttagtcgtataatcgtattagcaaaagctcgaacagtttacttctttaccctggaaagtcttatcatcatcagttcgtgtcgtttgactttttaaactttgcaaggaagggttttgtggtggtttgggagaattaggcaattgttggtgatccgatttttctgggtttggttgggttccttttttattttttaataaaaaaaaaaaatg

SEQ ID NO: 18742 - DNA, 3000 bp, Unknown
  misc_feature (1)..( 3000): 2750-1469P.txt file - cDNA_ID_1819231; gDNA_ID_2926201; Annot_ID_141528
cctgaagtagattttgtgatacctgaaacgcattagcttttttgtaaagctcatcttgaataacggatatatcatgcatagctagctccaacaatggtttctctttctgcaactcctctcgtaaatcctccagcaattctttttggaccgatatttcccgctcaagcgcaaaatttttagcctcaacaactctgagctttactctctcactttcaacttcagtgtgcgcatccctcaagctttgcatatatgacaacacacttttcctctgttcctcgagttcctccaattgtttttccaatagtagctctttttcttccatttgctccctggaaaataccaaagcttcccgagaagaaataagctcgaatcttacatcagtcagaagctttttcactttcatgaagtcctccatggtttcattggcttctcctaaacgtttcacggtttcctctttaagcttattcacttcatcctgggctatcagccactcttctgtctgtttcttcaagttggcttctgtttctctaagcttttcttgttcaagtttcttcgtagccttagaaatctctaattcttcttccttctcctcaagagctctctgaagtgcatatatttcaccttcttgtctcttgacaacttcgttggctttgcttaagagttgtgacttgctttcaaattcagaaatagccatagaaacctccttgcttctgtttgcaatctcttgacgcatcttctctagctcttcctctttcaaagtcaaggacgattgcaaagcagcacgttcctcgtctctttcccttagcttatgctttaactcttctatctccctggcttgagaagctaactccacatttgcccgcttcagctcctcttgtagactctcatgcttcaacgaagcttcagagattgttttctcacgtttttctaactcctcctttgcccggttaagtttatttttgtcagagagaagcttcctctcagcatcgtgcaggtcctcttcccttttcaacaaggccactagcgcagcctcaaggtcagactcaagcacgccaaggtttgaataggggagatcatcatcgtcaggataaaccgagtgttgattggtttgtctctccaatctgtgtgtccgagcaaataatttatcgaaaagaacatttgcagactcagctgagccattgtcgttgatgttgggtcttgtattgtgcaagactgattgaacactcagtaaaagatgtctctttctccttgtaatgctcgggaatgcgacaagactcttctgcttatggtttactactcttgtcaaacaatactgcataagaaaaaatcatatggccgacatcaaaatcaaaatcaaaagtttgattattttggacagacactaatcaatatggatgcaagcaaacttattcaaattaaaggaacagtattgaaatttgcaatctttttaagccagaacaaggaacaatcagaacaaggccagcaaaagtcaaaaattcaagtttgataaagttaagagtaagtaaagtgttgtgaatcagcagcgatatataaatgaaaatataggggataatatagagaaaggtaaggaaacaaacatcgcagggagagggagaggagaaggaagcaagattcaagcgaatggcctgagagaaacccatcctgagagcataattatgcaatcgccatggagcttaaagacggaacaaaacccaaatccactggatcaaatttaacaagtgggcgttttggagaagaatgcttacgagaacaaatccaaggaagaagaagaagaatctagctagggaatggatattgttacaaaattcttttaccaaaaaaaaggatacaaaataataaatagaggctcgcgttggcttgcgagttgtggtcgccagtaaactcgaaagtcctttttgcccttattcataagatgcatgtcggcattgtccaaatacacggccaagggatctatttgtaaaaataatggactcttcttaattacgtacgtggtaacggttttctagtatgacaattctctttctttcgcgtagtcggctagtcgcgtggttagaaatgcttacacactaaagagtatgttatattaaactggaatataaatttaagaaactgaataaaagtcatcaggcccatgacattggcccaatagacccaatgaaaaaccaatccatcagctagttttcttaacatatcaacccaacgaggttgtatcttgttacatttgcaagtgaacttttttatcattaaaaaatgtaacaatggtatttttggtttagtgttcctaaaatatttgtttcccacataagattttatctacaccaaatagtccaattgtataatataatccatcttcacaaaagcattttaaaggatatcctaccttctaaattccggcgaaaaatatcttaaatctgaaaaagtgatttatcgtgaatagtgtaatgttagcaaaatcttaaacttcaaaaaatcgtaaaacataaagaattaagtgtgacggattaattaagatatcgaaaccaacacagtaatcctcatctatgacttggaaaaactcataagtggcaagtggagttcgagtttggtcattattgtgaaacaccaaacctaatccacttacaaattcattaaaaactacaaatttgtgtggtagtttttttttttttttgggaaatttatgtggtagttaattagttaacaaacaattatatataaatacaaattttgtttggagttaggtccgcttcagcctgcttaagcgattctaagcttagtcgtataatcgtattagcaaaagctcgaacagtttacttctttaccctggaaagtcttatcatcatcagttcgtgtcgtttgactttttaaactttgcaaggaagggttttgtggtggtttgggagaattaggcaattgttggtgatccgatttttctgggtttggttgggttccttttttattttttaataaaaaaaaaaaatg

SEQ ID NO: 18743 - DNA, 3000 bp, Unknown; identical to SEQ ID NO: 3043
  misc_feature (1)..( 3000): 2750-1469P.txt file - cDNA_ID_1819239; gDNA_ID_1620621; Annot_ID_47043

SEQ ID NO: 18744 - DNA, 3003 bp, Unknown
  misc_feature (1)..( 3003): 2750-1469P.txt file - cDNA_ID_1819239; gDNA_ID_2926201; Annot_ID_141530
aggagctgaagcgggcaaatgtggagttagcttctcaagccagggagatagaagagttaaagcataagctaagggaaagagacgaggaacgtgctgctttgcaatcgtccttgactttgaaagaggaagagctagagaagatgcgtcaagagattgcaaacagaagcaaggaggtttctatggctatttctgaatttgaaagcaagtcacaactcttaagcaaagccaacgaagttgtcaagagacaagaaggtgaaatatatgcacttcagagagctcttgaggagaaggaagaagaattagagatttctaaggctacgaagaaacttgaacaagaaaagcttagagaaacagaagccaacttgaagaaacagacagaagagtggctgatagcccaggatgaagtgaataagcttaaagaggaaaccgtgaaacgtttaggagaagccaatgaaaccatggaggacttcatgaaagtgaaaaagcttctgactgatgtaagattcgagcttatttcttctcgggaagctttggtattttccagggagcaaatggaagaaaaagagctactattggaaaaacaattggaggaactcgaggaacagaggaaaagtgtgttgtcatatatgcaaagcttgagggatgcgcacactgaagttgaaagtgagagagtaaagctcagagttgttgaggctaaaaattttgcgcttgagcgggaaatatcggtccaaaaagaattgctggaggatttacgagaggagttgcagaaagagaaaccattgttggagctagctatgcatgatatatccgttattcaagatgagctttacaaaaaagctaatgcgtttcaggtatcacaaaatctacttcaggagaaagagtcaagtttggtggaggccaaactagagattcagcatctgaagtccgaacaggcttctctagaactattactgcaagaaaaggatgaagaactcgctgaagctcgaaataaattgggagaagtgaaccaggaggtaacagagctaaaggcacttatgatcagtagagaagatcagcttatggaggcaactgagatgctgaaggagaaagatgtccaccttcacagaatagaaggtgagttgggcagttccaagctgaaagtcactgaagctgaaatggtggtggaaagaattgcagaattgacgaacagactgcttatgtcaaccaccaacggtcaaaatcagaatgcaatgaggattaacaatgagataagcattgactcaatgcagcaaccactagagaaacctcatgatgattacggaatggagaacaaacggctggtgatggagttaagcttcaccagagaaaatctacggatgaaagaaatggaagttctagcggtgcagagggctttgacatttaaagacgaagagatcaacgtggtcatgggaagattagaagccaaggagcaggaactcaagaaattgaaagaagaaacgatcaatgacagtgaagatttgaaagtgctatatgccttggcacaagagagagtcggggaaaaaacaatgggtgatctggccatagagatgcttcagcttgaggcagctaaccttgaagttgaagctgcgaccagtgcattacagaagcttgcaaaaatgagcacggaactgttaactcaagctgacatgagcattgaggccgacacaactcacactgtaatgccagagagagggtattcagaaggaagtaatgagtgtcttggtgaggtaaaaacagaagttgtcaggctctggtccttgacagagaaactcctggagaacgcaggaatcgttgctggtacatctacatgcatggaaggtgtaattttataaagctttgattaactttataagcctaatctgtatgattcttttgtggatatgtagaattactggcggttaaatatgtttacttgtcactgtgagcaagtctattggagagtcttaatcaagaactctttgcattttataataataaatattaaataatttaaagtttagagtttttattgaatctttacaattttttattgtccaatggtggtggagactttaagaggatttcttcaaaaaaaataaagattttaaaataaaatattataaagttttttatttgacaaaacttaataattattagaaataataaaattgtaaacatgcatcatgacataaaagcaaaaaaatatatagaaatgaaaatttgaaaaaggataatatttaagcttgattcggaccaaaattttgccatatatatactctgatactcaatcaaatcatatttcaatcgttcatgctaagtacaaaagtcgggttttgatacttaataattactacaaatattaaaattgtatacatacatcatgatataaaagcaaaaagaaaatatacaaatcaaaaaacttaaataacgactagatttaagcattattaaaacaatgcataatcctttttttatatagttttttctcagccagtcacaaagcaacacaactaaagtctttaacaaatgttaaaactctaagcttaggatcaatccttagcctaatatcttgttttcatttatttttattacattggaggtggtctaagtgatctcaaaactaagtgatttttaatgatttgtatttgtttattacgtagataaaattcagccgagagtggctgccaccacaaggttcttgccaagggtaatctctcgtttaggtgtcgttgatagaaaaaggtttgcgacgtaccctgggacttatgcctacaacagcatgtatacacagatagtaggccgttagagtgtaactgataggatcacccctactagcatcgccaaataccaaccttgcccctaaatttccttctctatttttttgagtaacttttttataaattttcaaactcgctcccgcttctgagtctttttccgtacgaaagagagagagatacgtctatgcgattctagggtttttccggcgaaatttctcagccaaagatg

SEQ ID NO: 18745 - DNA, 3003 bp, Unknown
  misc_feature (1)..( 3003): 2750-1469P.txt file - cDNA_ID_1819243; gDNA_ID_1620621; Annot_ID_47040
tgaagaacacatttaatctcggagcctacttgaacgactctcttaaaacatcacatggtatatgcagcgtccattacaagtaataatgaacataaccaaaccaaaagaggcaagcttgcatgattttgatgtccatggcatttcctcaacttaaagcaagaggagaagacccattattgaacagtcaacaagagcacagagaacccaaattcgaactacaagtagggaacaagggagttagcaaagatacagatgaccttcattaatcttaaaaagtatcagcttgagaacataggccacaatgagaatgaagagagggactaaagaggccccatgctctgtctggtgtcagcgctacatggtccaggacaagtatggacttccccaccccccggagacagaaaaccagcgtgtaattctgatcaggaaactgaatccagaaaggtgttcctccttcaggcatttggaccacagaacggcatgagctactaggtaagcttaagcttgctcttccagtttcgtgcaatacgaacatagcctggatcaatacgacttcttcttttaatactacttgagccacaaccatctgaagaacttgatgaatacagagacaaccgatgccacaaaatgtaactaatacaaaagccctaggtacctgcagtaacagaaaagataatatattccaagcaaagacagtgtgttttgcagtagtctccagcactttgatgcagatggtactttgagacagtatgtgaggaaaagattttggtgatcaattgttttcaacattaactgatttaacacaaatctttcattggcgacatcatagaatagcgattagggtatgaatttgatcacaagtgtctaaacatagataataagattatgacatgaaacatgacacaactagatacatgaaaggattaaaagtttctctccaccagattggaattcgtcaatgagttcttgtttgattgccaacaggtcctttgtgcataccctccaaataatttttcagtttctcccaactttgcaacgtagattcccaatcctggaacatggaaaaggcaaacaattcaaagtctttacttcttaaaatctaaatgagctcaatgtaatccaaaaaggattttacctcaaggttttccctaaactcttcgttgtcaataggaaaaaaatactcagctggaacaaaaaaaaaaaaacccaattcttaacaacaacaacaacaacaggaacaacatcaaaaggctaaagaaaaaaaggagagaaaagaaatcaatgttcgtgacatacaggctttgtatcctccataacctgctgaacctgtgcctagccatttgcacaccatcaaacccttttccggcaatcctgctgctgcctcaaccaatgaagaggacatggtggagaaagttctatctttagattggccagacctcttagtgctataggatctcgttccgcggccaaactgtaaacatccatcaaaaataaatcaatcactggaaagaacaagaccaggaaacattcatatgattcatgtcttcggctcaccttcgcgcacacggatccgaggttccttcatatcatcatcgtcatcatcgtcttgctcctccagccgaaaattagggcttttttgctccttccctcttttaataatatttcgatcgattgggaatttttattatttttgtactactgaacgaacccattcaataactttgctaggtgaccggcccaagcccatacgtttatactattgttcttttctttttctctgttttgtgcaaaatatttatatcattcttacgaaaattgatatgaggtacacatttttaatttttttcatatcattttacttttagtttttcaaattttaaaaaccaaatcgtttctctattttttattattattattttattgctctaatttttgtttggtgagtatcaaaataattgaatgttcttcgaattatttaataagctttattgaaataatgaactttcctaaagaataaaattaattttgtaaacaattaataaataatctgtgttgctatgaatgaattacagcttggacgcggatgaagatcgtatatggctggtagatgttaagatttattattaaggaggagcaagaagagtgaaggcactgcgtcatttgctgtttttactgtgctattttctatgataattatgtttgatagaagaatttgatatttttttatttatttcttgtcaataaaccttaaacatattaactgaaaattctacgattttttaattaatcatagtttatttgctttctacattgttatattaataagattatatatatatatataaatgaattcaaattaaatatttttcctttttcttttgtcattgtagattttattaaaaacatgttggtggaattacataaaattagaatatttttttatttgtttatttcattaatattgttgacaaaaatagttaattaagtaattttataagtttctatcttaaattaatgtcagattcagcagttaccatttgaattctaaattattcaacgagattccacaaaaaatcacaaaaacaaatagtgagattcagcggttaccatttacacaaattgttgaattcattaaagttagagtcaccgtgtttagtacttggttcattaattatatagttctatagaggatcatgaaagttatgtataatctaatgcatatatgtaattagtgaaaacaccaaaaaaaacagaaaatatggtttagagggattgacatggcataaaaagcaatgttggatcgctgaattattttttcttggttcggtaggactcggtccaatgttggatttgcgaatcgctgaaataaagagttttggttcggtgggacttggtattggttgggctaattcagcgtgaataaaaaggcccaaacgtatttaaatattgggccgggtctgtgggaaaaaggcccaaacgtaaaccgaatcgtagattgaaatg

SEQ ID NO: 18746 - DNA, 3000 bp, Unknown
  misc_feature (1)..( 3000): 2750-1469P.txt file - cDNA_ID_1819243; gDNA_ID_2926201; Annot_ID_141533
agaacacatttaatctcggagcctacttgaacgactctcttaaaacatcacatggtatatgcagcgtccattacaagtaataatgaacataaccaaaccaaaagaggcaagcttgcatgattttgatgtccatggcatttcctcaacttaaagcaagaggagaagacccattattgaacagtcaacaagagcacagagaacccaaattcgaactacaagtagggaacaagggagttagcaaagatacagatgaccttcattaatcttaaaaagtatcagcttgagaacataggccacaatgagaatgaagagagggactaaagaggccccatgctctgtctggtgtcagcgctacatggtccaggacaagtatggacttccccaccccccggagacagaaaaccagcgtgtaattctgatcaggaaactgaatccagaaaggtgttcctccttcaggcatttggaccacagaacggcatgagctactaggtaagcttaagcttgctcttccagtttcgtgcaatacgaacatagcctggatcaatacgacttcttcttttaatactacttgagccacaaccatctgaagaacttgatgaatacagagacaaccgatgccacaaaatgtaactaatacaaaagccctaggtacctgcagtaacagaaaagataatatattccaagcaaagacagtgtgttttgcagtagtctccagcactttgatgcagatggtactttgagacagtatgtgaggaaaagattttggtgatcaattgttttcaacattaactgatttaacacaaatctttcattggcgacatcatagaatagcgattagggtatgaatttgatcacaagtgtctaaacatagataataagattatgacatgaaacatgacacaactagatacatgaaaggattaaaagtttctctccaccagattggaattcgtcaatgagttcttgtttgattgccaacaggtcctttgtgcataccctccaaataatttttcagtttctcccaactttgcaacgtagattcccaatcctggaacatggaaaaggcaaacaattcaaagtctttacttcttaaaatctaaatgagctcaatgtaatccaaaaaggattttacctcaaggttttccctaaactcttcgttgtcaataggaaaaaaatactcagctggaacaaaaaaaaaaaaacccaattcttaacaacaacaacaacaacaggaacaacatcaaaaggctaaagaaaaaaaggagagaaaagaaatcaatgttcgtgacatacaggctttgtatcctccataacctgctgaacctgtgcctagccatttgcacaccatcaaacccttttccggcaatcctgctgctgcctcaaccaatgaagaggacatggtggagaaagttctatctttagattggccagacctcttagtgctataggatctcgttccgcggccaaactgtaaacatccatcaaaaataaatcaatcactggaaagaacaagaccaggaaacattcatatgattcatgtcttcggctcaccttcgcgcacacggatccgaggttccttcatatcatcatcgtcatcatcgtcttgctcctccagccgaaaattagggcttttttgctccttccctcttttaataatatttcgatcgattgggaatttttattatttttgtactactgaacgaacccattcaataactttgctaggtgaccggcccaagcccatacgtttatactattgttcttttctttttctctgttttgtgcaaaatatttatatcattcttacgaaaattgatatgaggtacacatttttaatttttttcatatcattttacttttagtttttcaaattttaaaaaccaaatcgtttctctattttttattattattattttattgctctaatttttgtttggtgagtatcaaaataattgaatgttcttcgaattatttaataagctttattgaaataatgaactttcctaaagaataaaattaattttgtaaacaattaataaataatctgtgttgctatgaatgaattacagcttggacgcggatgaagatcgtatatggctggtagatgttaagatttattattaaggaggagcaagaagagtgaaggcactgcgtcatttgctgtttttactgtgctattttctatgataattatgtttgatagaagaatttgatatttttttatttatttcttgtcaataaaccttaaacatattaactgaaaattctacgattttttaattaatcatagtttatttgctttctacattgttatattaataagattatatatatatatataaatgaattcaaattaaatatttttcctttttcttttgtcattgtagattttattaaaaacatgttggtggaattacataaaattagaatatttttttatttgtttatttcattaatattgttgacaaaaatagttaattaagtaattttataagtttctatcttaaattaatgtcagattcagcagttaccatttgaattctaaattattcaacgagattccacaaaaaatcacaaaaacaaatagtgagattcagcggttaccatttacacaaattgttgaattcattaaagttagagtcaccgtgtttagtacttggttcattaattatatagttctatagaggatcatgaaagttatgtataatctaatgcatatatgtaattagtgaaaacaccaaaaaaaacagaaaatatggtttagagggattgacatggcataaaaagcaatgttggatcgctgaattattttttcttggttcggtaggactcggtccaatgttggatttgcgaatcgctgaaataaagagttttggttcggtgggacttggtattggttgggctaattcagcgtgaataaaaaggcccaaacgtatttaaatattgggccgggtctgtgggaaaaaggcccaaacgtaaaccgaatcgtagattgaaatg

SEQ ID NO: 18747 - DNA, 3003 bp, Unknown
  misc_feature (1)..( 3003): 2750-1469P.txt file - cDNA_ID_1819251; gDNA_ID_1620621; Annot_ID_47038
agttttgacaacatagtgctttgttttgatgctctataatgtgttttatctgccatcattcagcttcggttcatccgccatatctcaaactactgcatgttaatggtgaagcataagagcaagacaccccgtgtttcttctttcaaacaactcaaactgtaagaacttttggtgttaaaatgtttttagcatttcattatccggaatctccatagtaatacatgtttttggaccaatcaggttctcaaccacaccggaaacccggaaaaagaacgtaataagggaagttgaagaagacggtgttgttgactccatccctcggagccaaccaagctttctagcaactgtattgggaggtttgctctcttacaagtcgacgccaagtcaacgaggtactaaatacagaaacgtgactgcaagtagagtttttaacaaactcattgcaaggtttcgtttcaagtgtaattccgagaaggatgtgtggaacagaaaaaaactcatatccgaaacctaaaaaaaagcactccttttctatcatttgattcttgtagagattttgatttcctaatcttggtgtttatatacaaacttggatgttgtgtgtgtgcaaaatgaataaggcattgtgtatttacgtttgtagtggatataattgcaaccttaccgtcttagccattttaaccttatctggtacagcgttcgcgtttgcgtttgcgtttgcgtttgtgtttgcgtttgtggccaaaacgcaatcatttactttttaattgattttccgctccattgattttaatctgacgaccacagcctttagcttatttgtgtggcgaagagaagagataacattcctaagcaaatctcttctctctcccattcgtctccaaagagattacagttttgagcatttctcatctctcgaagctcttctctgtgtgtgtggcgatggctgctaattcgataatggcttcctccaaacccctaatctccctgtcatccaaccaacaaccaaaccgagtccaaattcccaaattcgccaaacttccccaaattcccaaatccctcacttcctccaccgatctccgtagcaaagcactatcactctcctccgccaccgccaaatccttagctttaatcgccgctttcgctcctccgtcgatggcggaggcgatggagaaagcacagctcttcgatttcaatctcacgcttccgatcatcgttgttgagtttctcttcttgatgttcgctctcgacaaggtctattactctccgcttggtaacttcatggatcaaagagacgcttccatcaaagagaagctcgcgagtgttaaggacacttcgactgaagtaaaggagctcgatgagcaagccgccgccgtgatgagagcagctagggctgagatcgccgccgcgcttaacaagatgaagaaggagactcaggtataaaagaaacaacaatgcactcagagtgaagaaattggtaaatggattgtgtattttttttgcaggttgaagtcgaggagaagctagcggagggaaggaagaaggtggaggaagagctaaaagaagctttggcgagcttggagagtcagaaagaagaaaccattaaagctttggattctcagattgctgctcttagtgaagacattgtcaagaaggttcttccttcttaaattatatttttgttaactgtgtaattctctgtctctctatctcaaaacttatttacaagaaattactgtaaatctcttcttcttcttcttctctgtttcttggattgttcgtcgttcaaagaagaacaatttttattttgtaagtttataaataattagctctcttctgtcattttagatgattaaagtacaagtatgtatatcgaggaattagttgttacggataaaatcttcatgcgagtcttatcgtcactagatttatgtctatttgaatcgattgaacaaaaacgcaaatggcaggagttgcttgtgtaaagagtagagagaaattgagttttcagagccaaacactccagctttgtccgaaagtgttcatagaaagttaagttgactcttccataacgagctcaggtccaacaacgaagcccaaacctcagttactctatcttattattgggccctaaaacgaaatgggccctaaagctaacgcgggtcggtgtttgattaaaacaaatgacggggcctccacgccttgttccttcttcttcttcttctcacgctcacggttctctttctcttctctgtctttttcagcttctgaagttacttgtttcagttcccgatgatcaattcttagtttttttggcttgttttcttcgtctctctttcatcaggcctttggagttttgtgttaccattttcgctcgcgtcattactggtgttagggttttcttcaaaagcttcttaatccgtcgaaattgctcttttctctccctcattgtcggttactttctttgacccttctcttatgcttcgtaagctgtgatttttttctctggtttcattgcaactctagttcaatttcagtttgatttcttcgcttaaatattttgttctatgagatctgagagttgtctttattgttggcttatttcaatcaaaacattggctggttaactttgattgactcatgattgattctatctagcattaattggttttctttgtatttggttactgttacttgttcttctacttctccacgattctacttctccacgatactgtctctgtcccttgttcgtatcgctaacttattcccatagtgggcacgtctctggtttctgacttttctcttcaattccatgtattgcgttttaccatgatgtttagtttcggaatcatttcttgctttctctatctgcttgtaagaatagttaacaagtgagaggaaagtcctttttgttgcttaaatagtttgatttctgttgttgagtttatgcgatatcccaactggtgaaactgtgtttattggttcagacagagataaatg

SEQ ID NO: 18748 - DNA, 3003 bp, Unknown; identical to SEQ ID NO: 18747
  misc_feature (1)..( 3003): 2750-1469P.txt file - cDNA_ID_1819251; gDNA_ID_1620621; Annot_ID_162314

SEQ ID NO: 18749 - DNA, 3000 bp, Unknown
  misc_feature (1)..( 3000): 2750-1469P.txt file - cDNA_ID_1819251; gDNA_ID_2926201; Annot_ID_141535
tttgacaacatagtgctttgttttgatgctctataatgtgttttatctgccatcattcagcttcggttcatccgccatatctcaaactactgcatgttaatggtgaagcataagagcaagacaccccgtgtttcttctttcaaacaactcaaactgtaagaacttttggtgttaaaatgtttttagcatttcattatccggaatctccatagtaatacatgtttttggaccaatcaggttctcaaccacaccggaaacccggaaaaagaacgtaataagggaagttgaagaagacggtgttgttgactccatccctcggagccaaccaagctttctagcaactgtattgggaggtttgctctcttacaagtcgacgccaagtcaacgaggtactaaatacagaaacgtgactgcaagtagagtttttaacaaactcattgcaaggtttcgtttcaagtgtaattccgagaaggatgtgtggaacagaaaaaaactcatatccgaaacctaaaaaaaagcactccttttctatcatttgattcttgtagagattttgatttcctaatcttggtgtttatatacaaacttggatgttgtgtgtgtgcaaaatgaataaggcattgtgtatttacgtttgtagtggatataattgcaaccttaccgtcttagccattttaaccttatctggtacagcgttcgcgtttgcgtttgcgtttgcgtttgtgtttgcgtttgtggccaaaacgcaatcatttactttttaattgattttccgctccattgattttaatctgacgaccacagcctttagcttatttgtgtggcgaagagaagagataacattcctaagcaaatctcttctctctcccattcgtctccaaagagattacagttttgagcatttctcatctctcgaagctcttctctgtgtgtgtggcgatggctgctaattcgataatggcttcctccaaacccctaatctccctgtcatccaaccaacaaccaaaccgagtccaaattcccaaattcgccaaacttccccaaattcccaaatccctcacttcctccaccgatctccgtagcaaagcactatcactctcctccgccaccgccaaatccttagctttaatcgccgctttcgctcctccgtcgatggcggaggcgatggagaaagcacagctcttcgatttcaatctcacgcttccgatcatcgttgttgagtttctcttcttgatgttcgctctcgacaaggtctattactctccgcttggtaacttcatggatcaaagagacgcttccatcaaagagaagctcgcgagtgttaaggacacttcgactgaagtaaaggagctcgatgagcaagccgccgccgtgatgagagcagctagggctgagatcgccgccgcgcttaacaagatgaagaaggagactcaggtataaaagaaacaacaatgcactcagagtgaagaaattggtaaatggattgtgtattttttttgcaggttgaagtcgaggagaagctagcggagggaaggaagaaggtggaggaagagctaaaagaagctttggcgagcttggagagtcagaaagaagaaaccattaaagctttggattctcagattgctgctcttagtgaagacattgtcaagaaggttcttccttcttaaattatatttttgttaactgtgtaattctctgtctctctatctcaaaacttatttacaagaaattactgtaaatctcttcttcttcttcttctctgtttcttggattgttcgtcgttcaaagaagaacaatttttattttgtaagtttataaataattagctctcttctgtcattttagatgattaaagtacaagtatgtatatcgaggaattagttgttacggataaaatcttcatgcgagtcttatcgtcactagatttatgtctatttgaatcgattgaacaaaaacgcaaatggcaggagttgcttgtgtaaagagtagagagaaattgagttttcagagccaaacactccagctttgtccgaaagtgttcatagaaagttaagttgactcttccataacgagctcaggtccaacaacgaagcccaaacctcagttactctatcttattattgggccctaaaacgaaatgggccctaaagctaacgcgggtcggtgtttgattaaaacaaatgacggggcctccacgccttgttccttcttcttcttcttctcacgctcacggttctctttctcttctctgtctttttcagcttctgaagttacttgtttcagttcccgatgatcaattcttagtttttttggcttgttttcttcgtctctctttcatcaggcctttggagttttgtgttaccattttcgctcgcgtcattactggtgttagggttttcttcaaaagcttcttaatccgtcgaaattgctcttttctctccctcattgtcggttactttctttgacccttctcttatgcttcgtaagctgtgatttttttctctggtttcattgcaactctagttcaatttcagtttgatttcttcgcttaaatattttgttctatgagatctgagagttgtctttattgttggcttatttcaatcaaaacattggctggttaactttgattgactcatgattgattctatctagcattaattggttttctttgtatttggttactgttacttgttcttctacttctccacgattctacttctccacgatactgtctctgtcccttgttcgtatcgctaacttattcccatagtgggcacgtctctggtttctgacttttctcttcaattccatgtattgcgttttaccatgatgtttagtttcggaatcatttcttgctttctctatctgcttgtaagaatagttaacaagtgagaggaaagtcctttttgttgcttaaatagtttgatttctgttgttgagtttatgcgatatcccaactggtgaaactgtgtttattggttcagacagagataaatg

SEQ ID NO: 18750 - DNA, 3000 bp, Unknown; identical to SEQ ID NO: 18749
  misc_feature (1)..( 3000): 2750-1469P.txt file - cDNA_ID_1819251; gDNA_ID_2926201; Annot_ID_201880

SEQ ID NO: 18751 - DNA, 3003 bp, Unknown
  misc_feature (1)..( 3003): 2750-1469P.txt file - cDNA_ID_1819255; gDNA_ID_1620621; Annot_ID_47036
ttttatgcttttctgctttaaatacatcttataaattttatttttatattcaagatccaccttatctacactgtataacaagttctcacctacttttaatttcaaattttgatcaaaacataacattattacaaacgattatatcataaattccgctcattatataatgagcaaaacttgcaaaataaatttatggaaggatttacggctgctaacttgtgttagatgtgcgtctttaattcatacttttggcaatatgacaatcaacatattttaaaaaaaaaaattaagcatgtactaaaagaatgataaagtgcatctatactaagaaataagaagatgcatatttcgtcaagagacacatgattcaacgaatttagacatccaacatcaaaccaacacgaatattagtaatagacaagtttggttaatgttggaacggacaacgtcccatatttttgtttacattctatgtttccaatagaaaatttggtttcgcacggaaaaggtggaatttaagaatcattgtatacaatactataaatgtgatacttaaactgataactgtaagtaatactcctagcaaactctgatttttcagcttgtcataacttttgttaaccttttaagagacaaaactatcactagacatttatagcttgactcactatacaagtattgacttcatcagttgcaattttgtggggaagagttggatcaaattatgaataagggctattaagtacggtttgcctatcctgaggtactttgctctatatgggaaggaacatagttattactttttataaacataaattttgacaactgttgtttttattgtaaccaacaaattgaggatctttatagcttatagtttctttggattgattacgtaaactaattgaaacgactagtacctcctcccctatttgactaggatacaatcatacaacgtaacaggttgaattgccgacatatgattttattaaaaccagtgtttaaaaactgatattagactatctggtcgaaccaaattcatttataaacaaaataaagcaacacaattaccatgaagactagaaaaatacgataagtaaagctataaaaatatggtgttgtttcaatttttaattatcttgttttactcttaatattagataatgatattttagctgtatgcttgacattgacatatgttttgtttccatttaagaataaagcactgttggtacaaggttatatgctgtgtcttaactcttaacacaatattataacttaatccacaacctttattaagaactaatttcgtaagatatggatttggattacgaaagtgactgttgagtatgaagtctatatcatatattaatatgaaattaggttggtctcttcatgttttttagatcaaccaagcagaagagagtagagggggaaatatcaacgtgaatgtcacgtgaacggagtcgtgcgtgcgtgactactcgtggcgtaatgtcgggtcgaccactgaagtaatgggctttaaaagttgaaggaccatatccatatggctcttgtgggaaccactttacacttagtcttgctcgtgggatcgatctgttttttgtttcttccttttgctcaaaattgatctggttttgctattattatatcatgactactagcaaaacttacatttttacttatcccatcaacattttcagatcaatttttttgtaaacaagattaaagtgaaattggactaacaatgattttcaaattaggtgtgtatgccctgaaactcagtatctgcttcatcccgcgatcttccaaatataagaaaaaaacggtcacctaatttaccgacaacaaacctaatccactaagacattattcaagatctagaaacgaaaagtcatgagatataaagatgcacgtgggaggacaagggaaaggacagaaactgtttggttgggagacaaataagtgttacgaaaggggaagtgaataagtctctctttaaactcaaaacactgagaaaagagtttgagtgtttttgtgacagatttggcttactgtcttgtctccgtcaagttgtaaataccaaagtcttatcatgttttttctctgtctcctctactacaattttaagaattgtaccacaaaccgatccattcattcatcatccaagcttcttgattcaaactggcaacatgttaactcgttatagatgatagtttggtgagttctataaaattgcgattaaagttatttctcttacaatttttcttggaacattttatatatgtataacttgtacatgaacgtagctcaaaagctaagaaaaaggtagcgccataatcattatgatgaataaaataaaccccagtttctctgaaagtgttggtttttaccacaccatattctagaagttaatttattggggttctaccacaccatatgcaccatgtgattcatgttattgttctaattctaaaactttcactgcgattttaattataatggttcactaatcactatgaaaacattagatgaaaattactaacacgtgattcttccagaaatcccgaatctctcagttacacaaaaagtaatatttttgtcatgacccagctttttccaatgccgtacataagcatggggacaggcaactaaaaaagctacaccaatcaaggccttagttcataatcgaacaatcacgtttagcccaaactttaaatgggcttaaaataatgtgggccttgacccacaaatagaaaaacacgtgacattccctctttgataatgattgcaaaaaaacagaggtgtgtttactcaaacgtttcccgtgtcctctacggtcagtatcattctttcggtgacgctaatttctccggtggttggaggagaacaaagtctcaaagagacggcgaacgaagacgaagacgaggagcgtggagagagtagacggcgaacgaagacgaagacgaggagcgtggagagagtctacctctctcgacgatg

SEQ ID NO: 18752 - DNA, 3000 bp, Unknown
  misc_feature (1)..( 3000): 2750-1469P.txt file - cDNA_ID_1819255; gDNA_ID_2926201; Annot_ID_141537
tatgcttttctgctttaaatacatcttataaattttatttttatattcaagatccaccttatctacactgtataacaagttctcacctacttttaatttcaaattttgatcaaaacataacattattacaaacgattatatcataaattccgctcattatataatgagcaaaacttgcaaaataaatttatggaaggatttacggctgctaacttgtgttagatgtgcgtctttaattcatacttttggcaatatgacaatcaacatattttaaaaaaaaaaattaagcatgtactaaaagaatgataaagtgcatctatactaagaaataagaagatgcatatttcgtcaagagacacatgattcaacgaatttagacatccaacatcaaaccaacacgaatattagtaatagacaagtttggttaatgttggaacggacaacgtcccatatttttgtttacattctatgtttccaatagaaaatttggtttcgcacggaaaaggtggaatttaagaatcattgtatacaatactataaatgtgatacttaaactgataactgtaagtaatactcctagcaaactctgatttttcagcttgtcataacttttgttaaccttttaagagacaaaactatcactagacatttatagcttgactcactatacaagtattgacttcatcagttgcaattttgtggggaagagttggatcaaattatgaataagggctattaagtacggtttgcctatcctgaggtactttgctctatatgggaaggaacatagttattactttttataaacataaattttgacaactgttgtttttattgtaaccaacaaattgaggatctttatagcttatagtttctttggattgattacgtaaactaattgaaacgactagtacctcctcccctatttgactaggatacaatcatacaacgtaacaggttgaattgccgacatatgattttattaaaaccagtgtttaaaaactgatattagactatctggtcgaaccaaattcatttataaacaaaataaagcaacacaattaccatgaagactagaaaaatacgataagtaaagctataaaaatatggtgttgtttcaatttttaattatcttgttttactcttaatattagataatgatattttagctgtatgcttgacattgacatatgttttgtttccatttaagaataaagcactgttggtacaaggttatatgctgtgtcttaactcttaacacaatattataacttaatccacaacctttattaagaactaatttcgtaagatatggatttggattacgaaagtgactgttgagtatgaagtctatatcatatattaatatgaaattaggttggtctcttcatgttttttagatcaaccaagcagaagagagtagagggggaaatatcaacgtgaatgtcacgtgaacggagtcgtgcgtgcgtgactactcgtggcgtaatgtcgggtcgaccactgaagtaatgggctttaaaagttgaaggaccatatccatatggctcttgtgggaaccactttacacttagtcttgctcgtgggatcgatctgttttttgtttcttccttttgctcaaaattgatctggttttgctattattatatcatgactactagcaaaacttacatttttacttatcccatcaacattttcagatcaatttttttgtaaacaagattaaagtgaaattggactaacaatgattttcaaattaggtgtgtatgccctgaaactcagtatctgcttcatcccgcgatcttccaaatataagaaaaaaacggtcacctaatttaccgacaacaaacctaatccactaagacattattcaagatctagaaacgaaaagtcatgagatataaagatgcacgtgggaggacaagggaaaggacagaaactgtttggttgggagacaaataagtgttacgaaaggggaagtgaataagtctctctttaaactcaaaacactgagaaaagagtttgagtgtttttgtgacagatttggcttactgtcttgtctccgtcaagttgtaaataccaaagtcttatcatgttttttctctgtctcctctactacaattttaagaattgtaccacaaaccgatccattcattcatcatccaagcttcttgattcaaactggcaacatgttaactcgttatagatgatagtttggtgagttctataaaattgcgattaaagttatttctcttacaatttttcttggaacattttatatatgtataacttgtacatgaacgtagctcaaaagctaagaaaaaggtagcgccataatcattatgatgaataaaataaaccccagtttctctgaaagtgttggtttttaccacaccatattctagaagttaatttattggggttctaccacaccatatgcaccatgtgattcatgttattgttctaattctaaaactttcactgcgattttaattataatggttcactaatcactatgaaaacattagatgaaaattactaacacgtgattcttccagaaatcccgaatctctcagttacacaaaaagtaatatttttgtcatgacccagctttttccaatgccgtacataagcatggggacaggcaactaaaaaagctacaccaatcaaggccttagttcataatcgaacaatcacgtttagcccaaactttaaatgggcttaaaataatgtgggccttgacccacaaatagaaaaacacgtgacattccctctttgataatgattgcaaaaaaacagaggtgtgtttactcaaacgtttcccgtgtcctctacggtcagtatcattctttcggtgacgctaatttctccggtggttggaggagaacaaagtctcaaagagacggcgaacgaagacgaagacgaggagcgtggagagagtagacggcgaacgaagacgaagacgaggagcgtggagagagtctacctctctcgacgatg

SEQ ID NO: 18753 - DNA, 3000 bp, Unknown; identical to SEQ ID NO: 3029
  misc_feature (1)..( 3000): 2750-1469P.txt file - cDNA_ID_1819259; gDNA_ID_1620621; Annot_ID_47035

SEQ ID NO: 18754 - DNA, 3003 bp, Unknown
  misc_feature (1)..( 3003): 2750-1469P.txt file - cDNA_ID_1819259; gDNA_ID_2926201; Annot_ID_141538
atctataacgagttaacatgttgccagtttgaatcaagaagcttggatgatgaatgaatggatcggtttgtggtacaattcttaaaattgtagtagaggagacagagaaaaaacatgataagactttggtatttacaacttgacggagacaagacagtaagccaaatctgtcacaaaaacactcaaactcttttctcagtgttttgagtttaaagagagacttattcacttcccctttcgtaacacttatttgtctcccaaccaaacagtttctgtcctttcccttgtcctcccacgtgcatctttatatctcatgacttttcgtttctagatcttgaataatgtcttagtggattaggtttgttgtcggtaaattaggtgaccgtttttttcttatatttggaagatcgcgggatgaagcagatactgagtttcagggcatacacacctaatttgaaaatcattgttagtccaatttcactttaatcttgtttacaaaaaaattgatctgaaaatgttgatgggataagtaaaaatgtaagttttgctagtagtcatgatataataatagcaaaaccagatcaattttgagcaaaaggaagaaacaaaaaacagatcgatcccacgagcaagactaagtgtaaagtggttcccacaagagccatatggatatggtccttcaacttttaaagcccattacttcagtggtcgacccgacattacgccacgagtagtcacgcacgcacgactccgttcacgtgacattcacgttgatatttccccctctactctcttctgcttggttgatctaaaaaacatgaagagaccaacctaatttcatattaatatatgatatagacttcatactcaacagtcactttcgtaatccaaatccatatcttacgaaattagttcttaataaaggttgtggattaagttataatattgtgttaagagttaagacacagcatataaccttgtaccaacagtgctttattcttaaatggaaacaaaacatatgtcaatgtcaagcatacagctaaaatatcattatctaatattaagagtaaaacaagataattaaaaattgaaacaacaccatatttttatagctttacttatcgtatttttctagtcttcatggtaattgtgttgctttattttgtttataaatgaatttggttcgaccagatagtctaatatcagtttttaaacactggttttaataaaatcatatgtcggcaattcaacctgttacgttgtatgattgtatcctagtcaaataggggaggaggtactagtcgtttcaattagtttacgtaatcaatccaaagaaactataagctataaagatcctcaatttgttggttacaataaaaacaacagttgtcaaaatttatgtttataaaaagtaataactatgttccttcccatatagagcaaagtacctcaggataggcaaaccgtacttaatagcccttattcataatttgatccaactcttccccacaaaattgcaactgatgaagtcaatacttgtatagtgagtcaagctataaatgtctagtgatagttttgtctcttaaaaggttaacaaaagttatgacaagctgaaaaatcagagtttgctaggagtattacttacagttatcagtttaagtatcacatttatagtattgtatacaatgattcttaaattccaccttttccgtgcgaaaccaaattttctattggaaacatagaatgtaaacaaaaatatgggacgttgtccgttccaacattaaccaaacttgtctattactaatattcgtgttggtttgatgttggatgtctaaattcgttgaatcatgtgtctcttgacgaaatatgcatcttcttatttcttagtatagatgcactttatcattcttttagtacatgcttaatttttttttttaaaatatgttgattgtcatattgccaaaagtatgaattaaagacgcacatctaacacaagttagcagccgtaaatccttccataaatttattttgcaagttttgctcattatataatgagcggaatttatgatataatcgtttgtaataatgttatgttttgatcaaaatttgaaattaaaagtaggtgagaacttgttatacagtgtagataaggtggatcttgaatataaaaataaaatttataagatgtatttaaagcagaaaagcataaaactttagataaaataatgtaaaaatgtgttagcatcaatgttgggatattggccgacccgaacttaatcaatgtcggaagccattacttctctcccaaaagacctttttccttcggagaactaggaacttcctcactacctttcgcttaacgtgaaagccataaatttcatatattcataaaaatcagaaaatctaaaactgtttagtatcacctgtttttggtatagactattggttttgtgttacttcctaaactatatgatttcgtacttcattggatcttatagagatgaatattcgtaaaaagataagttatctggtgaaacgttacttcagtcatgttgggtctagatttacatactactatgaaacattttaagataataattatcctagccaactatatgttctatattatgggccaagaagatatagaactaaaagttcagaatttaacgatataaattactagtatattctaatacttgaatgattactgttttagttgtttagaataaatagtagcgtgttggttaagataccatctatccacatctatatttgtgtgggttacataaaatgtacataatattatatacatatatatgtatatttttgataaagccatatattactccttgacctctgcccccatttccttttactataaataggaatactcatgatcctctaattcagcaatcaacaccaacgaacacaaccttttccaaagccaataataaaagaacaaaagcttttagtttcatcaaagacgaagctgccttagaaatg

SEQ ID NO: 18755 - DNA, 3000 bp, Unknown; identical to SEQ ID NO: 3027
  misc_feature (1)..( 3000): 2750-1469P.txt file - cDNA_ID_1819263; gDNA_ID_1620621; Annot_ID_47031

SEQ ID NO: 18756 - DNA, 3003 bp, Unknown
  misc_feature (1)..( 3003): 2750-1469P.txt file - cDNA_ID_1819267; gDNA_ID_1620622; Annot_ID_47074
gataggattgagctcattcaatggttgagaaagctaaattcattcatctcacaataaacacgaaatatttcgatgtttacacatcttctaattaaactgttttatcagttaaaagtagtaatattggcttattgacaaaaaaaaaaagtagtaatattggctttagttacttttatctgaaacaaaatgtacaattgggccttagatgagtaataaacaatagaacttgggcccaaccctccaccgggatgtttaataactgtgtcttttagtgtggttattaattaaaaaattaaccccttttggtgtgagccaaagaaagaaaaatagattaaagtctttcatatacatcaattaaaaaatgttcgatcaattaaaacgagccatgatgaactaatcatatacatcatcatccatcgtgaaaagctagctgttagttaataattacttaataataagaaagaaaaagaaaatgattgttattacttattagtactgctatatactactccatatggaatagtaactgctattatctggcgttctagagttgacatttaaatgtcatagttttatttagatgtggaaaatctagtaagagtaatagagtaggaagtgattaggaagcaaccgaacaagaagcatattttatgaccggtgtggttagcccttgtgggagacaagattacctcaatttttggctaatcttgattttcctcctccattttattattacttattttctttctttttattattatttttatcagcatctttctctttaattatttttcttaaaattaaacattacaccaaagtgttgctgttaatttctcatatttaaatgtgaatagatatatactatatactaatatacatgtgtgtatcctatatgagaccataagccaatgacagtaggtattagctaatgacaagtgacttccaataacttattaagaagtagaatctttacagatttgatgtttacatggatcttctagaaaactgatttctttaatctctctaatgtcatctgcaactatttaacatacacacacacaaaataaaataaaattggaagagctaatgataatgatttgtattagaaagttgtcctttattttccaatgcattgcatcgaacatatgttgatgttcttttaaaatcgtaaaatctagttctgtattcttttattctaggtttatcaaggctttgtcacaagacaatgagaatacaacttttctctaattttcttcatatactaaataaattatcgtagatttgtagaaggttcttaggctagattcaaaaagtcatttaggatctctttctagatcttgcattttttttagtaaatcttatgctggtgatacttttattaaaccttatgattctaatttggaaaacaaaactaactgataacctattttacattaataaaaacgatgcataattgtaataatgttttatttttttatgttaataagctagccaaaacatattattgatccgaagtacgctattttctataagaaaaggagaggcacggaaatgaacacgctgtgtggttaatccaagaaatcatacaaaattaattcataaactataataaaatcattgggatcttattttgcacccaccaagcttgtaggctgaagatgcggatggaacccaacttcaagaaattcttgccttttgttttatggcttttttttgtcttgtcatagttatataaatgtattttgctaaatttaaacggacaatcaaataaataaataatatataatttgtagttaacaactaaattcaatgactaatatcatgtaacaatagacttgtgacagcagttttctttgttgacttcaaagtttaattcgagcgtacgatacatttggtcggtgataaatatcgtgctatgagtttaatttgttgacttgaaagttttataaacattgtgaaccattgtaacatgtgtttcttgattatacatattcctaaaattaatttcatatggtaagagtgtaaaattatccaagtaatggtgtaaattttaaaagtcttttttttttttttttttcatcaattttaaaagtctttctctgacgttaaaaatagtcttgtcttaggtttgaataatatcggcattagccattattggtcgttactatgggatacttaattttgctaaatctttcagaacctgtacgagataagcgaaaaagccatgaaccacggtcacgcgtgtctcgcacttcccaactttcaccatgcatgctctcactaaagcctgtctttttttttctttcttttacatattttaaaatcataataccataatttgcactaattcttatggtaaatccgttttatgagatactcaacttagttgtccattccttaagacacagattaaggaaagtattcaattctttttgaagttatggtaataactcaaattcttctttcctgccttgaatacttggtacaatatcacaaacatatctctaaattaattacatgatctgcagaatcatttacataaacactttcacatttttatccatttaaaaaaaaaaatattatgatcctctttccttttcaattaattatcactaaactaaaaaatattattcccacagtcaaaagaaaccaaactaatttaaaaaaggtggcgcgtgattatcacgctcaaatgaccgatcggttccactgaattttctcagagattctcctctgaaaatgttttttgtttttttcttatgtcaaaaagaaaatttaccagaaatgattaaaatttgaaaagagaattccataaatgagttaattcgccagtcttgaagatcattacagagttttcagaaaccatatgtagtcttagattctcttttgccaaagaagaaaattttactctgccatacaactttttgtctctttctctactaataataataatccgaactttgtttgttcttctacttcaattcataatctttgacggcgatg

SEQ ID NO: 18757 - DNA, 3003 bp, Unknown
  misc_feature (1)..( 3003): 2750-1469P.txt file - cDNA_ID_1819267; gDNA_ID_1620622; Annot_ID_162370
attgagctcattcaatggttgagaaagctaaattcattcatctcacaataaacacgaaatatttcgatgtttacacatcttctaattaaactgttttatcagttaaaagtagtaatattggcttattgacaaaaaaaaaaagtagtaatattggctttagttacttttatctgaaacaaaatgtacaattgggccttagatgagtaataaacaatagaacttgggcccaaccctccaccgggatgtttaataactgtgtcttttagtgtggttattaattaaaaaattaaccccttttggtgtgagccaaagaaagaaaaatagattaaagtctttcatatacatcaattaaaaaatgttcgatcaattaaaacgagccatgatgaactaatcatatacatcatcatccatcgtgaaaagctagctgttagttaataattacttaataataagaaagaaaaagaaaatgattgttattacttattagtactgctatatactactccatatggaatagtaactgctattatctggcgttctagagttgacatttaaatgtcatagttttatttagatgtggaaaatctagtaagagtaatagagtaggaagtgattaggaagcaaccgaacaagaagcatattttatgaccggtgtggttagcccttgtgggagacaagattacctcaatttttggctaatcttgattttcctcctccattttattattacttattttctttctttttattattatttttatcagcatctttctctttaattatttttcttaaaattaaacattacaccaaagtgttgctgttaatttctcatatttaaatgtgaatagatatatactatatactaatatacatgtgtgtatcctatatgagaccataagccaatgacagtaggtattagctaatgacaagtgacttccaataacttattaagaagtagaatctttacagatttgatgtttacatggatcttctagaaaactgatttctttaatctctctaatgtcatctgcaactatttaacatacacacacacaaaataaaataaaattggaagagctaatgataatgatttgtattagaaagttgtcctttattttccaatgcattgcatcgaacatatgttgatgttcttttaaaatcgtaaaatctagttctgtattcttttattctaggtttatcaaggctttgtcacaagacaatgagaatacaacttttctctaattttcttcatatactaaataaattatcgtagatttgtagaaggttcttaggctagattcaaaaagtcatttaggatctctttctagatcttgcattttttttagtaaatcttatgctggtgatacttttattaaaccttatgattctaatttggaaaacaaaactaactgataacctattttacattaataaaaacgatgcataattgtaataatgttttatttttttatgttaataagctagccaaaacatattattgatccgaagtacgctattttctataagaaaaggagaggcacggaaatgaacacgctgtgtggttaatccaagaaatcatacaaaattaattcataaactataataaaatcattgggatcttattttgcacccaccaagcttgtaggctgaagatgcggatggaacccaacttcaagaaattcttgccttttgttttatggcttttttttgtcttgtcatagttatataaatgtattttgctaaatttaaacggacaatcaaataaataaataatatataatttgtagttaacaactaaattcaatgactaatatcatgtaacaatagacttgtgacagcagttttctttgttgacttcaaagtttaattcgagcgtacgatacatttggtcggtgataaatatcgtgctatgagtttaatttgttgacttgaaagttttataaacattgtgaaccattgtaacatgtgtttcttgattatacatattcctaaaattaatttcatatggtaagagtgtaaaattatccaagtaatggtgtaaattttaaaagtcttttttttttttttttttcatcaattttaaaagtctttctctgacgttaaaaatagtcttgtcttaggtttgaataatatcggcattagccattattggtcgttactatgggatacttaattttgctaaatctttcagaacctgtacgagataagcgaaaaagccatgaaccacggtcacgcgtgtctcgcacttcccaactttcaccatgcatgctctcactaaagcctgtctttttttttctttcttttacatattttaaaatcataataccataatttgcactaattcttatggtaaatccgttttatgagatactcaacttagttgtccattccttaagacacagattaaggaaagtattcaattctttttgaagttatggtaataactcaaattcttctttcctgccttgaatacttggtacaatatcacaaacatatctctaaattaattacatgatctgcagaatcatttacataaacactttcacatttttatccatttaaaaaaaaaaatattatgatcctctttccttttcaattaattatcactaaactaaaaaatattattcccacagtcaaaagaaaccaaactaatttaaaaaaggtggcgcgtgattatcacgctcaaatgaccgatcggttccactgaattttctcagagattctcctctgaaaatgttttttgtttttttcttatgtcaaaaagaaaatttaccagaaatgattaaaatttgaaaagagaattccataaatgagttaattcgccagtcttgaagatcattacagagttttcagaaaccatatgtagtcttagattctcttttgccaaagaagaaaattttactctgccatacaactttttgtctctttctctactaataataataatccgaactttgtttgttcttctacttcaattcataatctttgacggcgatgactatg

SEQ ID NO: 18758 - DNA, 3000 bp, Unknown; identical to SEQ ID NO: 3078
  misc_feature (1)..( 3000): 2750-1469P.txt file - cDNA_ID_1819267; gDNA_ID_1620623; Annot_ID_162405

SEQ ID NO: 18759 - DNA, 3000 bp, Unknown
  misc_feature (1)..( 3000): 2750-1469P.txt file - cDNA_ID_1819267; gDNA_ID_2926201; Annot_ID_141503
aggattgagctcattcaatggttgagaaagctaaattcattcatctcacaataaacacgaaatatttcgatgtttacacatcttctaattaaactgttttatcagttaaaagtagtaatattggcttattgacaaaaaaaaaaagtagtaatattggctttagttacttttatctgaaacaaaatgtacaattgggccttagatgagtaataaacaatagaacttgggcccaaccctccaccgggatgtttaataactgtgtcttttagtgtggttattaattaaaaaattaaccccttttggtgtgagccaaagaaagaaaaatagattaaagtctttcatatacatcaattaaaaaatgttcgatcaattaaaacgagccatgatgaactaatcatatacatcatcatccatcgtgaaaagctagctgttagttaataattacttaataataagaaagaaaaagaaaatgattgttattacttattagtactgctatatactactccatatggaatagtaactgctattatctggcgttctagagttgacatttaaatgtcatagttttatttagatgtggaaaatctagtaagagtaatagagtaggaagtgattaggaagcaaccgaacaagaagcatattttatgaccggtgtggttagcccttgtgggagacaagattacctcaatttttggctaatcttgattttcctcctccattttattattacttattttctttctttttattattatttttatcagcatctttctctttaattatttttcttaaaattaaacattacaccaaagtgttgctgttaatttctcatatttaaatgtgaatagatatatactatatactaatatacatgtgtgtatcctatatgagaccataagccaatgacagtaggtattagctaatgacaagtgacttccaataacttattaagaagtagaatctttacagatttgatgtttacatggatcttctagaaaactgatttctttaatctctctaatgtcatctgcaactatttaacatacacacacacaaaataaaataaaattggaagagctaatgataatgatttgtattagaaagttgtcctttattttccaatgcattgcatcgaacatatgttgatgttcttttaaaatcgtaaaatctagttctgtattcttttattctaggtttatcaaggctttgtcacaagacaatgagaatacaacttttctctaattttcttcatatactaaataaattatcgtagatttgtagaaggttcttaggctagattcaaaaagtcatttaggatctctttctagatcttgcattttttttagtaaatcttatgctggtgatacttttattaaaccttatgattctaatttggaaaacaaaactaactgataacctattttacattaataaaaacgatgcataattgtaataatgttttatttttttatgttaataagctagccaaaacatattattgatccgaagtacgctattttctataagaaaaggagaggcacggaaatgaacacgctgtgtggttaatccaagaaatcatacaaaattaattcataaactataataaaatcattgggatcttattttgcacccaccaagcttgtaggctgaagatgcggatggaacccaacttcaagaaattcttgccttttgttttatggcttttttttgtcttgtcatagttatataaatgtattttgctaaatttaaacggacaatcaaataaataaataatatataatttgtagttaacaactaaattcaatgactaatatcatgtaacaatagacttgtgacagcagttttctttgttgacttcaaagtttaattcgagcgtacgatacatttggtcggtgataaatatcgtgctatgagtttaatttgttgacttgaaagttttataaacattgtgaaccattgtaacatgtgtttcttgattatacatattcctaaaattaatttcatatggtaagagtgtaaaattatccaagtaatggtgtaaattttaaaagtcttttttttttttttttttcatcaattttaaaagtctttctctgacgttaaaaatagtcttgtcttaggtttgaataatatcggcattagccattattggtcgttactatgggatacttaattttgctaaatctttcagaacctgtacgagataagcgaaaaagccatgaaccacggtcacgcgtgtctcgcacttcccaactttcaccatgcatgctctcactaaagcctgtctttttttttctttcttttacatattttaaaatcataataccataatttgcactaattcttatggtaaatccgttttatgagatactcaacttagttgtccattccttaagacacagattaaggaaagtattcaattctttttgaagttatggtaataactcaaattcttctttcctgccttgaatacttggtacaatatcacaaacatatctctaaattaattacatgatctgcagaatcatttacataaacactttcacatttttatccatttaaaaaaaaaaatattatgatcctctttccttttcaattaattatcactaaactaaaaaatattattcccacagtcaaaagaaaccaaactaatttaaaaaaggtggcgcgtgattatcacgctcaaatgaccgatcggttccactgaattttctcagagattctcctctgaaaatgttttttgtttttttcttatgtcaaaaagaaaatttaccagaaatgattaaaatttgaaaagagaattccataaatgagttaattcgccagtcttgaagatcattacagagttttcagaaaccatatgtagtcttagattctcttttgccaaagaagaaaattttactctgccatacaactttttgtctctttctctactaataataataatccgaactttgtttgttcttctacttcaattcataatctttgacggcgatg

SEQ ID NO: 18760 - DNA, 3000 bp, Unknown; identical to SEQ ID NO: 3078
  misc_feature (1)..( 3000): 2750-1469P.txt file - cDNA_ID_1819267; gDNA_ID_2926201; Annot_ID_201842

SEQ ID NO: 18761 - DNA, 3000 bp, Unknown; identical to SEQ ID NO: 3066
  misc_feature (1)..( 3000): 2750-1469P.txt file - cDNA_ID_1819285; gDNA_ID_1620622; Annot_ID_47068

SEQ ID NO: 18762 - DNA, 3003 bp, Unknown
  misc_feature (1)..( 3003): 2750-1469P.txt file - cDNA_ID_1819285; gDNA_ID_2926201; Annot_ID_141509
catacaaaaacaaaaaaatataattagtgtattttaaattatttgtgttttaatatattttttattttatcttttaaaacatgttttttatttgagttattattatgaattcagtattataaagtcatatcttcatttcaatttttttttgaatataatgttatataatatttctaaacacaagtagataacgttggtcaatatttggttaagataaatggtggaaaaatattcagaaatgttcaaaaatgttcgaccattttttttatttcaaaatgtacgtcagtaactatcgattttttttgaccatatacaatttgcgacccccgcctttcgacgacttgcttttggtcaaacagcagtaagataggcgtatgtctcatgcttacatggtattgaaccgataatatgtgtgtgtatatatagagagacagactatactttttaatcattcaaaactagaaatcaccaaacacacatctcttttgcacgctcaaaccactatggatacttccctcttttctttatttgttccaatccttgttttcgtttttattgctctttttaagaaatcaaagaaaccaaaacatgtaaaagctcctgcaccaagtggtgcgtggcccatcatcggtcatcttcaccttctcagtggcaaggaacagcttctttaccgaaccttaggaaaaatggctgaccagtacggtccagccatgtcgctacgacttgggagcagtgaaacatttgttgtgagcagttttgaggtggctaaagattgttttactgtgaacgacaaagccttggcttcacgtcctattactgcagccgcaaagcacatgggttacgattgtgctgttttcgggtttgcgccttatagcgctttctggcgtgagatgcgtaaaatcgcaaccctcgagctactttctaaccggcggcttcagatgctcaagcatgtccgtgtttctgagatctcaatgggtaattaaaaaaaaaaaaaaacgtatataataataattttcgatattgttaattttgttatgatgcgatattgacatattgtcacatgcatgcatgcagttatgcaagatttgtattccttgtgggtcaagaaaggtggttcagaaccagtaatggttgatctaaagagctggttagaggatatgagtctgaacatgatggtgagaatggtggccggaaagcgatactttggaggcggctcgttatcccctgaagatgccgaagaggcaaggcaatgcagaaagggcgtcgcaaatttctttcacctcgtcggtatattcaccgtgtccgatgcttttccgaaactagggtggtttgattttcaaggacatgagaaggagatgaagcaaacaggaagagaattagatgtgatccttgaaagatggattgaaaaccatcgacaacaacgaaaagtttcaggaacgaaacacaatgattcagacttcgtcgacgttatgctgtcgcttgcagaacaaggcaaattctcgcatcttcaacatgatgcaattactagcattaaatctacctgcctggtacatctttaactacacaaattttgatgttttttagatgaactagatatataaacctaaccaaattaactgggattttgtccaaaaattattgttttctaaaatacaaagttagttatataaacaagtttaggtggaaagacgtaaatgataacatgtttattttgtaagaaattacttcaaccttaaattgatgggattaggcgaatcctgattagatgatacttataagtatattgttttaatgtatgtcatataatgataataaattgaataacaggcactgattcttggaggaagtgagacttcaccatcaacccttacatgggccatttctcttcttctaaacaataaggacatgttaaagaaagcacaagatgagatcgacatccacgtcggcagagacaggaacgtcgaggattcagacatagaaaatctggtgtatattcaagcgattatcaaagaaacattgagattgtatccagctggtcctctcttaggccatcgagaggcgatagaagattgcacggtcgctggttacaacgttcgtcgcggcacaagaatgttagtgaatgtatggaaaatccaaagagatccgagggtttatatggagccaaacgaatttcgaccagagaggtttatcacaggagaagcaaaagagttcgatgtaagaggacaaaactttgagctgatgccatttggttcgggaagaagatcatgcccaggctcttcattggccatgcaagtgcttcatttaggtcttgctcgtttccttcaatcatttgacgtgaaaactgttatggatatgcctgttgatatgactgagagccctggcttaaccattcctaaagccacgcctcttgagattctgatcagtccacgtcttaaggaagggctttatgtgtgatctctgttccagaaacatatactatatgacttcaatatggtaattgaaggtgcattttaatttgtttttttaattttattttgaataaaacgtacgtttgttacgttgtgtacttttttaaaataaataaatgtggaaccaaatgtattctttaaaatatatgtattatttgatttcatctattgtgtaaaactttgtataatataatatatttgatttgacggcaaaaaaaacacaaacaaactgcattttcaattttgaactttgtaaattaacagaagcggaaatattttggggaaaaaaaaaaagaaaaaacagaaacggaagtaaataagctttttaggcatcgatcgaattttccaggaaaccccgagagaggggaagaagaaactgacgaagacgaagtcgaacccttaaaaatccggtagagcatccgattctccgttgctcgaaacctctcaatcgattttttaaaaatttatttgcgatgcattgagccgccgtcaaaagagagagagagagagagagagagagagagagagagagatg

SEQ ID NO: 18763 - DNA, 3000 bp, Unknown; identical to SEQ ID NO: 3065
  misc_feature (1)..( 3000): 2750-1469P.txt file - cDNA_ID_1819293; gDNA_ID_1620622; Annot_ID_47065

SEQ ID NO: 18764 - DNA, 3003 bp, Unknown
  misc_feature (1)..( 3003): 2750-1469P.txt file - cDNA_ID_1819293; gDNA_ID_2926201; Annot_ID_141512
tgtaaatgtctgaatgttccatttgagaaatgtcctcatcatgtgacacaagtttattaggctactcaagttagcttagaattaagaagctagaacatgtgaaaataaatagaaaacaaaaaagaggaaacaaaaactaataacagaacgagaagttgaaaccttttggatccaattaaatgaatatcgatgtaattccaaaatgttagttcatgtgttaatgtttgaagatctagtacatatgaataacatttgaaatcatttttgtttcatgcaattacataactacaagggttttcatcacatattgctaattaattttgagtttagaatccaaaacatttaaccgaaaatctaataattttaaaaagggtgatttactcatctataagactaactaaaaaaatacgtactaaattatttacaagagacaattgataactagagtatgaattagttgtttagacttacccatgtgtcaaagtcatattgacaaatggctcggttataactgatttatataccaataattgcatacaagtttgtttcttaaataaatcaagcaatattcataagattgcatgtgtattttctgcgaaactattagtacgaattcgtggatatgcaaatttaatgactatgcaaagtaggtgagaatgtaatagcgattagaatagctagggtttagcctaccaaccatggtaatccagtttcctaattatcgttagtttttgaatcccattcatgcttttatctatttttcaaccaatcatgtctttttaccaacaaagcatttccagtctaagcaatatggtaggtaactcggtacgataaacagaaagataatttattattcatctataaacgaataattggttctcacattactcatacagaggaaaaaaagggatatacaaaccctctctaaattatatagttttgaattcactgttgtttatcaacaacatatataactctcttacccaattcttattattgttcatacttcatagacattaacatgtacgtatagtgattgctacaatgaatggtatgtacagatattgagacagacagtagaaagggatgaatcgagtatttattaaagagaaaggaaagggccaatctatgcctagtttcaattatgaaactcaacccatgaactgatttaaatactttacctatcggataagacttttaagggtctaaaatattttccaactatttttcatttgcaacaaaccttaaagtaatatgctaaagagatcttttccaaaggtggaatgatttttttgatctaaaacggcccatcaaccaatcttcggtccattatcctgacatgattatttgggctacatttttttaagtcttttgcagtaaattgttgaaccaacaaaaataaagagttggagttggacctagtagctgatctgctgatgtgttggtgatggtcgtcgtgggttcctgtcttataaccctagaaaccaagccacttcatcattctcaaattcaatgctttactaaataatattattatcgaaatcaaaatactaatttagacgtatataaatctagaagcaaaccttaggtgaggtcgaaacagagatgaccttttgcgtgcactttaattaatatcttattacataaaatgtcacactttgagtaaactttacattattctctcatccataataaataaataaagcatactgggttttaggtcaggctgacgtcagcagtttctttgtgtttcattttttttttttttgtaatctaacgctccagatttgttgtcttctccacgagccctttgttgttgttggtaatggagattttcgctctaagtcattgtggcttcttcttctttatttagaaaccaattcatcaactccttcgttatttctaaatctctttgccactacctcttgttgctgcaattgaattggctcaaatcttcttcacttggtcgacgtaaagacgactttgacttggtttttaacttcacttctccgtcgaaaactatcccttctcttccgatcgaatcaatcggctctctctccacacaaaccaaggtaagggttaaccctctccggtgattatgctctgataaatttacttgctcggccattagtgttcagaaacttggtgatttatgcatgtttttttttgttcaaagaccgtagatttcggaattaggattgtaaaaattgaacctttacatcagtgtttttacaaagttataagctttacttggaaatcagtggttttttgggtcaaccaaagttgaaagatttgaagaagaatgaaactagttcgatttatatatcattttattgcttcttaagaaagtgtcgtccttggttctttatgaatttccaattgcagccaaatatgtcatgttattcacctaatttttgtattttccaattgcagccaaatatcttctcctgttactggagacaaacctgcatacatttctgtcatctctgttaaggtattacatttagtttacttgtttacttaatgtagctgcttattacatttttttcttcaagtctatattcttctttcaatagcattaaaagttatgtgtatcctcagattagatcttgctgactcgcaagtttttggattatttagcggtttaataagaattatatcttccttgaaattgtgcctaggtagtggaatcgttgttagcctactgtagctcagataggtgatggatcatttccgttcaattgaataatttgactatttaaggtttgcacttagttttgtctacagaatcaattcatcctttttcacagtcaagatattattctcattatcactattgtagacttcttggacttccatacattcatcagtcaacttttcgatggtgcgtttttatcacagtggcacaattatttaagaggctccatctccactgcaccactgagaagtttcgtgtggacatgtctaagcttagaattggtttggttgaaaactgaggagatg

SEQ ID NO: 18765 - DNA, 3000 bp, Unknown; identical to SEQ ID NO: 3051
  misc_feature (1)..( 3000): 2750-1469P.txt file - cDNA_ID_1819297; gDNA_ID_1620622; Annot_ID_47062

SEQ ID NO: 18766 - DNA, 3000 bp, Unknown; identical to SEQ ID NO: 3051
  misc_feature (1)..( 3000): 2750-1469P.txt file - cDNA_ID_1819297; gDNA_ID_1620622; Annot_ID_162353

SEQ ID NO: 18767 - DNA, 3003 bp, Unknown
  misc_feature (1)..( 3003): 2750-1469P.txt file - cDNA_ID_1819297; gDNA_ID_2926201; Annot_ID_141515
gaagaaagatgtcgattccgttagagccagtccgaagactcctctctcgtggagcggcggatctggaagtggtggcggctctgcttctccttccgccgatggattcgaggataacagtcgccaagctagctgctctacatctacaggatctggatctaaggtaactttctcttttccctatcgtgattttcaacttttgcctctcgatttagtcttctctctctatcttctttctctcaattacgaatccggtagctccggagagatggcaaatccgtcatctcgctggataatccgattccgatctggccgataaatctggatttagccgttcgtaattgagaagatccttggccgtctctctgtttttcttcattttttttcctaaaatccataaagtttagcctgacgtcatctctcgcacgcttcaattctcactagaacgtatttagtctgttttcttcaacttctaacaaattcaccggaaaaaattcctccgccgtgattcgccgatgacaccgtcggccggagccatcctgcttctaggttaaattcatctaatctccaaaaagtcaaagccactttaagcttaatttccttgttttctgctcattttttgtaattagaaaactctactaatcttctgtaacaaagcttaataagagacctgtttttctcggtacgcattgaaccggatcttgcgtggccggttagatgtggatttttagaaatcggtcaactttaattttgtcttgaggaataattaaagctccttttagattttgggggtagtacagcttaacagctagttggtcaaacgcgtccgcgttttattgaacgttttgatgctcgagacggtagcgttttgtgggttgaaagttgaaacgagtaaaatgatcttgtcggagagattggtatcacgtgatctttaaaagagtgatgacgatagatgacaatgcccatgacacggaataatcatgatgtggcatcaaatcctcactataaaaattctttcccaattatatatttgagattttttaattttatgctctatttggtttcttcgatatatttttcttacttgtttgaaatttctgttgtgggaaaagaaactttttaccggtatgttaaaataagatcttgggtattgattataaaagtaaaacagttgtcgttatcttcagccatttaatagttgactaatcaaatgcgtttttgttttgcaggtttttcccacaaacgaaatcaccagttgtttctccaagagattgaagaagaggaaggtaaatataaagtctcctttttgaatttcaagtacacactccaaaattcaaattttattgagctgatggttttttattcttttaatatttggcagtcatcttttgagcttaaaaatgaagagaacttgaagttgaaggagagacttgaccttgaaaaggtagattttcgttgctattctctgttttattatcatggttttcattgtattcttaaaaaaacccaatatttttccacaggagattgcaagtctccgagcaacattcgatgaacaaaaccttaggaaccaaaagctgaagaggattaaggtaacatttagattctccctaaccatctttacagtaatcagatattccagatcccttctctctatttgctggtctcatcgactcttgtgttttcttgtttcagcttgacttaaactcaggccgtgtcacaaacaagaaacctgttgatttgattcgtaaatcacaactcgagcggctacagggatcaaaatcttgcaaaaccagtgactcgcaaaatcaggggagtttcttcgtcctccctgatctcaacatggcgccatccgaggaagagatattgtacggaactagctaaaaactggcctatatgaagatttgcgatcgaattatagtgaagggaagaagggagctagagatgtcaactaagaaaagtgaatgtaataagtggtgtaatgaaactctcccgtcacattctggttttccgtttccttctttttttggggtaaaatgctcaattacttcttgattttttcttaggaagagggtgaaaattaggtttttactttttactccctccctccctccctctctgttttctttaatttgatgtgttagaagaaaaaatttgttttaaatagatggtgttatcaatttttaatgcaaaattaactacttttttttttctttctttctctttgtaccgatttaaaagcttttgttggaaattgtaaagaggaaaaagtaggacaactaatagactttttatgttccaaacattttcttcttcactattctccatacattattatattaaaaccctagtttccgctcaactaatccaagacaagaagatctatcaatctctttggacattcatttttctactatttaatttgaatttttataatataaacttgggaggtgtaatgctattggtgggttgtcggcgtgttcatggaaaaagattcgtttttaaatgcccaataaatttgagaaaaaattgccaacttgtttatgagcttattttctttttcatggatcccaagtcttttgtgtatagagattaaaaaaaaatgacattccttcatgtaaaaaagaaaaaaatatctgggttttaaaaatatctacaatgagtttaatggtaaatatacttatcataatttggagaataaagacctaaagaagaaaattacactctagaacagaagttttgtaagcaaatcattgctcacaaaacttgtgaattacagaattacaggctcttgtaggttgagttattttatgcttcattttggttacaggctttatgttgacattaaaacaaagagattgaagtagagtccaaaaaaaaaaaaaatatatataaatataaaattcaagattaattaaaaaatattggtcttcagagagataaataactaggggaaagagaaaacagtcttctcttctccgatcccaaaaacgcaggaaaacaatg

SEQ ID NO: 18768 - DNA, 3003 bp, Unknown; identical to SEQ ID NO: 18767
  misc_feature (1)..( 3003): 2750-1469P.txt file - cDNA_ID_1819297; gDNA_ID_2926201; Annot_ID_201857

SEQ ID NO: 18769 - DNA, 3000 bp, Unknown; identical to SEQ ID NO: 3061
  misc_feature (1)..( 3000): 2750-1469P.txt file - cDNA_ID_1819305; gDNA_ID_1620622; Annot_ID_47060

SEQ ID NO: 18770 - DNA, 3003 bp, Unknown
  misc_feature (1)..( 3003): 2750-1469P.txt file - cDNA_ID_1819305; gDNA_ID_2926201; Annot_ID_141517
tcttcatgaacctcttcgttccatgcccgacaacaattgggcagactatatgcgcacaggtgttgtggcaattctgcagaaccgtgtgggtaagttagtagtttgtttggaacactggaaatggcatacccattaatggcattcttttcttgccagccctgaatttcatctacttgttatatgacaacaatcctctcaagatacttaagaaacctgtcttgttcatgtgtagcaccttccgaaaagcttcatgcgttgattctggctgagaatatgatgtcaatattgggtgaaaagtggcttctcggcggggtaaaattacccaatgttgatattccagctgataggtaaatacaacatctttgtattacactctcacttaacctacattttcctagtgacataaagattaatatcattctgatttcttttgtaggtgtcttctgttggtattagagtcatcgcatgttgaaatttctgtattgttaaatgatctcgcttacaagaagtatgaagctcctaaagataattcaactgctgaagacattctcttgaagcaacggtatctacccatcgtgttttcactggtagaaaagatcatcaaatatatatcatctgctggtgaaaacgaaggtataacttagaccttaatcatgttttattaatgtttccaatctactatcagtagtcagtactagcatattcgatcccttttctttcacctttctgttattctatgttattcctaaaatcagtactatataaacatcataagagcttttagttattgctcaaatgtctattaactccgctgataaacagtgtatacatgcgtgtcagccttttcccttcatgaaagaattgggatttacgtattgatctttgcagggactctatctgacgaagctgtcttccaaaaggtgattaaaatacttaatgagacagtaggagcggtgttcgaatatctcagagatgcaaaggtactatacatatatgataacatcaaactcttaggaatgtcttattgtgcttgaaaatgtttttcatgttaattctgtttcatacaggaacatggaattaagaaaggaactgaccttcttgcatctgtgcgagtgattggaaggtatagataatcactctttttgtttcttcttatatctctcgttcgatttatttttgtttaaaatgtataccggattgtgtttatgtaatcatcatttatcattcaaatttgtgtaaggacatggattgtatccttaccactttggcaggtactgaacctttttttgtgttttcaacagctatcttgcggaaactcctgttgcgtgcaaagagcaggtccaggatcttctggattatatgctttcagtgaagggcgaagatgaatccaggtttgaaggcatcctgacttgatatattggttcttttacaaagcttgtttgagtcatgcctcccaggataacttggtctgaactattttgttttgacagcccgtttttgtctacttgcttcttgctcccaatgctttgccaaataacaatgaacgcagaaggatgtaaactcttggcctattcaagaggcgatgtagctgtgagttactcggctttataccttctttatactgatgacaatatgtttgaacaaatctgatttacagctttcttatatctctcagtatgctgaaccaaaatgtatttcaagtgggtgtttatcttgtatataatcttataaggagctgactgatttttcaatacaggtcgttgaatgtctaataaaattgattgagcgctgtggtgagagtgttgatgaggatcgaagcatattcttggcttgtgatacaatcatgaatattcttttgaaggtactctcttccctaagataggacctgtttacattttgccaattgctaaaccctataatgacttcacgttttaaatgttgagaacagagggaagaaataagcccgccggaaatttcaacatttgccagtctattgaaagctttggcatattgggcaggtaaaaaaaaagatttttactgcttctgctgatctgcctactaatttcttgacaaaaatcgaagaccatgtttaatatgtcaatttctctgttccttttgtcacagatgggagtaatgaccattcggtagtaatgatggctgcaagcatatgctctctgatctttgatttcacatcagaagatgctttacaacttagcagaagctccctggatagtttggcccggctcgttacaagaagcttgtcctcaagtggccaggtataataatccgtgacttgtcatagagtctcttgtacttgttttggtagagagaattgcttgttagtgaactgttgcttaccgttgcaggatatgtctgataccgcggatcttcttgaaatcataagagcaggtttggtttcaacatctctctcacttttttttcctcggcttctctttactttttaaatcgataaacacaacaagttttcttcttgctctaattgtgcttgtatgattatggaacaggatactctcggtggataaatcgatttcccaccattatgaaacatcccgttgtgcaatagaaactattagatttggtctcaggctgtttcgagggagagaaatagtcaaaaaaggaaattttgttcagtttattagctccacgttgttgtattatatacacttgagattataattcatggtttctctatttatgatgcttccccaccaagaaatgagatacgatatatagatatttatgcaagtctaaaatttgacttgttatatagaggcaaatctaaaagataaggttccgattatgaaggattcaaatctttaaacgacgccgtgtttccatataacagtaaacagaaacaaacgcgtttttcgttggttggataaatcctccttataaataaacaaacctttaaggaaggttagttgtcaaaagaatctgcgaaaaataagagagagagagagagaaacaggatcattcattatg

SEQ ID NO: 18771 - DNA, 3003 bp, Unknown
  misc_feature (1)..( 3003): 2750-1469P.txt file - cDNA_ID_1819332; gDNA_ID_1620622; Annot_ID_47052
tttgaaactgatagaatttgtttgttttctttgtatttcttataagtttgatatcaaactaatttagcgttaaccattaataatccttataaaacaattcacggtacaatattttcgaaactgaagcaaattgttttcttttcatatttatattttttacttattagaactaaattagttccgacaaaacaaaaagaactaacttagttttgcccgtgatattttgacaaaatttcattttgatccttataataatacagtattttaaaaataaatcaacgtagctatccgaaattaaatatttgtaatcagcggaggcgaaaaggtctccagctccagctaaactccaagaggagagagagagaaagagattcaattatatgcagagagaaaaagaagccaattggttctctctctctctctctctctctctgattgattgatccagcgattcgtctggctggctcggtttccgcgggaaaaccttcttcttcgttgaccttacacgagttttgttgattcggcagggggatcgacgacggagatggcgattctgtacgccctcgtggctcgtggcacggtggttctttctgagttcaccgccacctctacgaatgcgagcaccatcgccaaacagatcctcgagaaggtccctggagacaacgacagcaacgtctcctactctcaggatcgttacgtcttccacgttaaacgcaccgatggcctcaccgttctctgtatggccgaagaaaccgccggaagtacgtcctcccctttcttttacttctatggctaattttgaggaagtttccaactttggtgacagtggaattcaaaagtctaatccttttttgctctgaacgatcgctctgttattgaattcgagacctttggtcttatattgtgatgtgaatgaatttgatttttttggacataacatcaacacaattatatccgagaagctgtgcattagagagatgtgaatgtctttctaactcaaaagtcaaaacttttttatgtcagggagaattccttttgcctttttggaggatattcaccagagattcgtacggacttatggcagggctgttcatacagcactagcttatgcaatgaatgaggaattctctagagttctcagtcagcagattgactattactctaatgatcctaatgccgataggattaatcgtattaagggtgaaatgaatcaggtttgatgagtttgtcttacaagttcagtcggattgtgaagttgtttagagacatggttctgagtcttggcttcactgtttgacaatacatcctggtttttctttttggttttggataggtgcggggtgtcatgatagaaaacattgacaaagtcctagatagaggtgaacgtttggagcttcttgtcgataaaaccgccaatatgcaggggaatacattccggttcagaaagcaagctcgtcgttttagaagcaacgtctggtggagaaactgcaagctcacgtatgtttcctaaaaccttagtaaacaattttcagtattatgattgcaagactgtatactaaaactagtttttggcctaagaacacatttaactatagcaaaaagtactttaatcaccccaagttccacatttgtaatgtcaagtgagaattttttaagaatcgaacatagttcctaattcctaaccctttttgtctcttgcagggtcctcttaatactactactactggtgatcatatacattgcagtggcctttctctgccacggacctactctaccatcttgcatttaagtgcatctgtctcttaaggaatccatcccgattctgcgcgttgccacgactttttatctcctcatctgattgtaaaccttgtgttttcctgagcattttcatgtggcttaaaaagcttatgtttccaactcacgtatatgaaaaagtatacttatttatagagcaatgtaaaagctcattgctttgcgaagtgtgtgaatctttgttgacatcatgttctataaattacatacatagtggaaaagtgaacaggcttgctttgtctgatatgttcatacaactctttgaatcttcatgttctttgtttatgtgacttcctctctcgtatatccacaccaacttctgaagtcggcagttgaatgatcttgtacgtcgttgaccctacaaattcttgtcattttacaattgaagccatttgttgatcataaatcgaatgtaaatattagaaaagaaagataggagaacaagatacaacaagtgtcataaattgtcgtccgaaaataaaatatgggtatcatctctagttaaggccagacgcacctcattcaccaacttgacatcttgtcatgccacctaataatagctaaataaattatagtaggtggatttaaccttttatttatataatagcagcatttcaaatataaaattttgtttttatcaacaccatgtttactaactaaaaggatggaatttatatccatatatgatcaaaatactaaaatgtttggttgaaccaaaaaaaataaaaagcgtcgactttacggtttaaatatcgttacagaaaaagaagaaaagaaaagacggctacatcacgcttactaaaaattctacagtccaattaaagtcataacaaaattaatactatatatttattaaaaaaaacatgattatttactttccttacaaaaaaaaacaaaagtgtaaatatttcctggtctaacgctttccctctgcgtgccccgttccttccctcgcggttactcttccgttttatgtttttttttctgagatggtcaattttcccgtcgtctctgaattttccctttttctcttcttcactccaccgccttccccgaatcacttcctctgcctgatctaattcaatctccttcctagctcaaagaagtcaatttacacgagcagatctctgcactcaaaactcctggatcttcatttctgggcttcaatttagagtttttttatattaaatg

SEQ ID NO: 18772 - DNA, 3003 bp, Unknown; identical to SEQ ID NO: 18771
  misc_feature (1)..( 3003): 2750-1469P.txt file - cDNA_ID_1819332; gDNA_ID_1620622; Annot_ID_162341

SEQ ID NO: 18773 - DNA, 3000 bp, Unknown
  misc_feature (1)..( 3000): 2750-1469P.txt file - cDNA_ID_1819332; gDNA_ID_2926201; Annot_ID_141524
gaaactgatagaatttgtttgttttctttgtatttcttataagtttgatatcaaactaatttagcgttaaccattaataatccttataaaacaattcacggtacaatattttcgaaactgaagcaaattgttttcttttcatatttatattttttacttattagaactaaattagttccgacaaaacaaaaagaactaacttagttttgcccgtgatattttgacaaaatttcattttgatccttataataatacagtattttaaaaataaatcaacgtagctatccgaaattaaatatttgtaatcagcggaggcgaaaaggtctccagctccagctaaactccaagaggagagagagagaaagagattcaattatatgcagagagaaaaagaagccaattggttctctctctctctctctctctctctgattgattgatccagcgattcgtctggctggctcggtttccgcgggaaaaccttcttcttcgttgaccttacacgagttttgttgattcggcagggggatcgacgacggagatggcgattctgtacgccctcgtggctcgtggcacggtggttctttctgagttcaccgccacctctacgaatgcgagcaccatcgccaaacagatcctcgagaaggtccctggagacaacgacagcaacgtctcctactctcaggatcgttacgtcttccacgttaaacgcaccgatggcctcaccgttctctgtatggccgaagaaaccgccggaagtacgtcctcccctttcttttacttctatggctaattttgaggaagtttccaactttggtgacagtggaattcaaaagtctaatccttttttgctctgaacgatcgctctgttattgaattcgagacctttggtcttatattgtgatgtgaatgaatttgatttttttggacataacatcaacacaattatatccgagaagctgtgcattagagagatgtgaatgtctttctaactcaaaagtcaaaacttttttatgtcagggagaattccttttgcctttttggaggatattcaccagagattcgtacggacttatggcagggctgttcatacagcactagcttatgcaatgaatgaggaattctctagagttctcagtcagcagattgactattactctaatgatcctaatgccgataggattaatcgtattaagggtgaaatgaatcaggtttgatgagtttgtcttacaagttcagtcggattgtgaagttgtttagagacatggttctgagtcttggcttcactgtttgacaatacatcctggtttttctttttggttttggataggtgcggggtgtcatgatagaaaacattgacaaagtcctagatagaggtgaacgtttggagcttcttgtcgataaaaccgccaatatgcaggggaatacattccggttcagaaagcaagctcgtcgttttagaagcaacgtctggtggagaaactgcaagctcacgtatgtttcctaaaaccttagtaaacaattttcagtattatgattgcaagactgtatactaaaactagtttttggcctaagaacacatttaactatagcaaaaagtactttaatcaccccaagttccacatttgtaatgtcaagtgagaattttttaagaatcgaacatagttcctaattcctaaccctttttgtctcttgcagggtcctcttaatactactactactggtgatcatatacattgcagtggcctttctctgccacggacctactctaccatcttgcatttaagtgcatctgtctcttaaggaatccatcccgattctgcgcgttgccacgactttttatctcctcatctgattgtaaaccttgtgttttcctgagcattttcatgtggcttaaaaagcttatgtttccaactcacgtatatgaaaaagtatacttatttatagagcaatgtaaaagctcattgctttgcgaagtgtgtgaatctttgttgacatcatgttctataaattacatacatagtggaaaagtgaacaggcttgctttgtctgatatgttcatacaactctttgaatcttcatgttctttgtttatgtgacttcctctctcgtatatccacaccaacttctgaagtcggcagttgaatgatcttgtacgtcgttgaccctacaaattcttgtcattttacaattgaagccatttgttgatcataaatcgaatgtaaatattagaaaagaaagataggagaacaagatacaacaagtgtcataaattgtcgtccgaaaataaaatatgggtatcatctctagttaaggccagacgcacctcattcaccaacttgacatcttgtcatgccacctaataatagctaaataaattatagtaggtggatttaaccttttatttatataatagcagcatttcaaatataaaattttgtttttatcaacaccatgtttactaactaaaaggatggaatttatatccatatatgatcaaaatactaaaatgtttggttgaaccaaaaaaaataaaaagcgtcgactttacggtttaaatatcgttacagaaaaagaagaaaagaaaagacggctacatcacgcttactaaaaattctacagtccaattaaagtcataacaaaattaatactatatatttattaaaaaaaacatgattatttactttccttacaaaaaaaaacaaaagtgtaaatatttcctggtctaacgctttccctctgcgtgccccgttccttccctcgcggttactcttccgttttatgtttttttttctgagatggtcaattttcccgtcgtctctgaattttccctttttctcttcttcactccaccgccttccccgaatcacttcctctgcctgatctaattcaatctccttcctagctcaaagaagtcaatttacacgagcagatctctgcactcaaaactcctggatcttcatttctgggcttcaatttagagtttttttatattaaatg

SEQ ID NO: 18774 - DNA, 3000 bp, Unknown; identical to SEQ ID NO: 18773
  misc_feature (1)..( 3000): 2750-1469P.txt file - cDNA_ID_1819332; gDNA_ID_2926201; Annot_ID_201868

SEQ ID NO: 18775 - DNA, 3000 bp, Unknown; identical to SEQ ID NO: 3046
  misc_feature (1)..( 3000): 2750-1469P.txt file - cDNA_ID_1819336; gDNA_ID_1620622; Annot_ID_47050

SEQ ID NO: 18776 - DNA, 3003 bp, Unknown
  misc_feature (1)..( 3003): 2750-1469P.txt file - cDNA_ID_1819336; gDNA_ID_2926201; Annot_ID_141526
cgacttcagaagttggtgtggatatacgagagaggaagtcacataaacaaagaacatgaagattcaaagagttgtatgaacatatcagacaaagcaagcctgttcacttttccactatgtatgtaatttatagaacatgatgtcaacaaagattcacacacttcgcaaagcaatgagcttttacattgctctataaataagtatactttttcatatacgtgagttggaaacataagctttttaagccacatgaaaatgctcaggaaaacacaaggtttacaatcagatgaggagataaaaagtcgtggcaacgcgcagaatcgggatggattccttaagagacagatgcacttaaatgcaagatggtagagtaggtccgtggcagagaaaggccactgcaatgtatatgatcaccagtagtagtagtattaagaggaccctgcaagagacaaaaagggttaggaattaggaactatgttcgattcttaaaaaattctcacttgacattacaaatgtggaacttggggtgattaaagtactttttgctatagttaaatgtgttcttaggccaaaaactagttttagtatacagtcttgcaatcataatactgaaaattgtttactaaggttttaggaaacatacgtgagcttgcagtttctccaccagacgttgcttctaaaacgacgagcttgctttctgaaccggaatgtattcccctgcatattggcggttttatcgacaagaagctccaaacgttcacctctatctaggactttgtcaatgttttctatcatgacaccccgcacctatccaaaaccaaaaagaaaaaccaggatgtattgtcaaacagtgaagccaagactcagaaccatgtctctaaacaacttcacaatccgactgaacttgtaagacaaactcatcaaacctgattcatttcacccttaatacgattaatcctatcggcattaggatcattagagtaatagtcaatctgctgactgagaactctagagaattcctcattcattgcataagctagtgctgtatgaacagccctgccataagtccgtacgaatctctggtgaatatcctccaaaaaggcaaaaggaattctccctgacataaaaaagttttgacttttgagttagaaagacattcacatctctctaatgcacagcttctcggatataattgtgttgatgttatgtccaaaaaaatcaaattcattcacatcacaatataagaccaaaggtctcgaattcaataacagagcgatcgttcagagcaaaaaaggattagacttttgaattccactgtcaccaaagttggaaacttcctcaaaattagccatagaagtaaaagaaaggggaggacgtacttccggcggtttcttcggccatacagagaacggtgaggccatcggtgcgtttaacgtggaagacgtaacgatcctgagagtaggagacgttgctgtcgttgtctccagggaccttctcgaggatctgtttggcgatggtgctcgcattcgtagaggtggcggtgaactcagaaagaaccaccgtgccacgagccacgagggcgtacagaatcgccatctccgtcgtcgatccccctgccgaatcaacaaaactcgtgtaaggtcaacgaagaagaaggttttcccgcggaaaccgagccagccagacgaatcgctggatcaatcaatcagagagagagagagagagagagagaaccaattggcttctttttctctctgcatataattgaatctctttctctctctctcctcttggagtttagctggagctggagaccttttcgcctccgctgattacaaatatttaatttcggatagctacgttgatttatttttaaaatactgtattattataaggatcaaaatgaaattttgtcaaaatatcacgggcaaaactaagttagttctttttgttttgtcggaactaatttagttctaataagtaaaaaatataaatatgaaaagaaaacaatttgcttcagtttcgaaaatattgtaccgtgaattgttttataaggattattaatggttaacgctaaattagtttgatatcaaacttataagaaatacaaagaaaacaaacaaattctatcagtttcaaacaaatagagaaatctgagcaaaaagatcgaataattgtaatttatccgtggaagaagatgtgattttaaagtgtaaatttttacgaatatgaaggataaaatgtagggatgtgttcaaatcatcattaaatcagtttttttttttttagtgtggtagtgacgtaccaaacaaaaccaaaaagcggtctatttccttctggtttgaaacgatttgggtcaaaattgggtttcgagtttgaataagatatgagtgaataatatactaactttagccaaagacaaaaaaaaaaaaggaaaattaaaggcagaaaaatgaaaatgacatccaatgagctgagcctaaaccaaacatagccagagataagccttacaaaatgtacaacagatataaaatcccaattcccaactctaaaccaagacgtggttcacgacccaaaccgaatctcacgggaaaaagtgggacatatacacatatatacacggtaagcttcgcgcctccgtcaaatcacgtgttgtttcttctcggcttttccgttaaagtaaacgtcacaacaccgccgttaatcaccgtggtctgtgggaattcaacccagaggcagagaagaccctgagagacgccatctggtccttcttttgcctccatctgtgtcctctctctctctcctcgatctcacgacgatcttcataaaccctacgctctgcttactcttccatcatcttttgctcagatttcgtaatttgtggtttctcgatcgggatattagtactcgatcgtgtctccgattgattctgatcggaatatcaaattcggattccggagagctggagatagagagagacttaggtaaagtttggtggagatg

SEQ ID NO: 18777 - DNA, 192 bp, Unknown; identical to SEQ ID NO: 3057
  misc_feature (1)..( 192): 2750-1469P.txt file - cDNA_ID_1819344; gDNA_ID_1620622; Annot_ID_47075

SEQ ID NO: 18778 - DNA, 3003 bp, Unknown
  misc_feature (1)..( 3003): 2750-1469P.txt file - cDNA_ID_1819344; gDNA_ID_1620623; Annot_ID_47086
ccgttgacaacaagcaaggcagagttgaaatggctcaatcatacgatcaggtaaacaaacacattcctattttcgtggatatatagttacattaagaacccatattaacttatctttctccacacattttcagagtgttaatgagaagtcaggtgagtcattccagacatatttagatattcaaccgctgaatcgaatgccgagggagagctttaagcctctggaacctatcaatgaggaaataagcactaggctaagcgttgggacagatcatgatgtagagatggatgcagcggataacatcattgtgctggattgacatcaaaaatcattattacttctttcatgattgtgttgatcgttggctgattttctttactaagataccttttgctgatttttttttttttgtttgtcaaagttaccttttgctgaattttaattactaagttaccttttgctaaatttgtttgcatacagcgtagttgtcttgagttgcagagtatcatatttgtccatttatagtttcttaggtataaagcgtatatgaaccaaaatataaccaaatatattatggaaactaattgaaactgaagttatgatcatcttgggttttttcatcggataagtattagtttaaactagattgaatctactactcttgatcaaacaagcacacacaacttgaaataactccaaacaccatgagttcatagaaaatgatttcccactaatatctttgttaatgccaaactttatcattgcatgtcttttgcattaaaaatacttcatgggtgatgatcatcttcttttaattgaaccaaagaaacgtcttttgagctctctcaaaacccaagacacacatatgcatatatttatataaactgttgatttctctaatttagatatacatggaaagaacattccctaaccatatcaattaggttggatttgatcgtatttattgttctataggatatattagtaaaattaagaaacaaaagaaatagaaatgggaaatacaaaaagagaaaaagagaggagctgcagaaaacagggaaaatggtgggaaagaagagacaaaagagaaaggctttaaatccacgcttactccaacttccaaacatatacctacttctccactcttttccactttactcttttatacctatacccatcttatattatattacatgtacaaaaatattgttttcagttaaatctgcatttattctacagttcaacgcgattactgtagaataattttaagccaacgactgtttggaactaatttttcagtttgatacgagagcaataacaaaatttcaaagaaggtttttttggggttaaatgtcaaaccaaaactcgttttagacagtaaaaaatatatacgattaaactatagtctaatacatatacaaattttactttgcatatacaatttaattcttagtaaatccaaataagaatctaaatagatgataatgatcaaaatctgtatagagatgcacatagtaacttcgtgaattctaagtattagactaaattctcatatacagcatgcagatatgtcatatgcatgcatacacatttttacgcatttcagtccgtacgtatcgtgtatatacggtaacgatggttggatatacatgtgcatgtttcaaagttatgtacaccgaagggacaagctaggctgtgatgctcctaattcaagcttccttcttacgaatgtcaacttttatttaattttctttattgtggcctggccgaataatcaaagatataataaatatttagaggcaattattgattagtgtcctttaattctccttaaattgtttggtttttggtcggttggttccgagattttattttctgtgttaaaatgttactaaccaataacggttgaccctaattataagttctccaacaagatgtgaacttatttgctaattataaacgtgaacgctaaacataaacggaagatttatttggtttgagtttggcgtctgcatttacatgtcgtagtaatataaatttacattaaaaattaatgtttctatattaaagatgtgaattatttcgttttttcatgcacataaacgcatatgtattgtgttgaaactagacgaggctataatgaagacaactgttgtttctttttatctgcaacaatagtgtatatttgaccgttaatgtaataagttcatgataaggttgggaggatagcttccccgtgatggaggtcgtagggtttgtatgattgtgtacagtcttttcatttcacctagctaaccctattgacgcattgtgcaagtgtaagacagttcatacttcgtactactcttcaattatatatatttacaccacattatcaaccaaaatatatgtatttcaatccaactgtatactagacttttcgaaactaatataagattaatgttgaattatgttttcttcacaaaattctagcattagtacatttgaggtgaaaaaacacaaaattcatcctaatgaacacataaagaaaataaaattttaaaactcttcttcgtcaccgaatatttacaaataaaatgatatgtgtgtgtgtgaacctaatttaaagcctatgccaatgagcacatataggcttttgctctctttttttttttttttttttttaattatcacaatagcataaaatatgcaaaacggaagtacctttacaatcatttgtattcgaatttaaataaaaatgataaaacaccaccaatagtaagcaaaagataattagtgttgaaactaatcatccgtaagcatatagagcacttcgatgaaaattagagtattaaataaaattaaaataaaccctcaaaactatctgaagagacacatagagtggctccttggcatatgattaagctcccttaatttatcttctcgtatatatataggcattacacatcttacttattacattcacacacacccacattttacattcaactcttatacaatatg

SEQ ID NO: 18779 - DNA, 192 bp, Unknown; identical to SEQ ID NO: 3057
  misc_feature (1)..( 192): 2750-1469P.txt file - cDNA_ID_1819344; gDNA_ID_1620622; Annot_ID_162371

SEQ ID NO: 18780 - DNA, 3003 bp, Unknown
  misc_feature (1)..( 3003): 2750-1469P.txt file - cDNA_ID_1819344; gDNA_ID_1620623; Annot_ID_162404
agcaaggcagagttgaaatggctcaatcatacgatcaggtaaacaaacacattcctattttcgtggatatatagttacattaagaacccatattaacttatctttctccacacattttcagagtgttaatgagaagtcaggtgagtcattccagacatatttagatattcaaccgctgaatcgaatgccgagggagagctttaagcctctggaacctatcaatgaggaaataagcactaggctaagcgttgggacagatcatgatgtagagatggatgcagcggataacatcattgtgctggattgacatcaaaaatcattattacttctttcatgattgtgttgatcgttggctgattttctttactaagataccttttgctgatttttttttttttgtttgtcaaagttaccttttgctgaattttaattactaagttaccttttgctaaatttgtttgcatacagcgtagttgtcttgagttgcagagtatcatatttgtccatttatagtttcttaggtataaagcgtatatgaaccaaaatataaccaaatatattatggaaactaattgaaactgaagttatgatcatcttgggttttttcatcggataagtattagtttaaactagattgaatctactactcttgatcaaacaagcacacacaacttgaaataactccaaacaccatgagttcatagaaaatgatttcccactaatatctttgttaatgccaaactttatcattgcatgtcttttgcattaaaaatacttcatgggtgatgatcatcttcttttaattgaaccaaagaaacgtcttttgagctctctcaaaacccaagacacacatatgcatatatttatataaactgttgatttctctaatttagatatacatggaaagaacattccctaaccatatcaattaggttggatttgatcgtatttattgttctataggatatattagtaaaattaagaaacaaaagaaatagaaatgggaaatacaaaaagagaaaaagagaggagctgcagaaaacagggaaaatggtgggaaagaagagacaaaagagaaaggctttaaatccacgcttactccaacttccaaacatatacctacttctccactcttttccactttactcttttatacctatacccatcttatattatattacatgtacaaaaatattgttttcagttaaatctgcatttattctacagttcaacgcgattactgtagaataattttaagccaacgactgtttggaactaatttttcagtttgatacgagagcaataacaaaatttcaaagaaggtttttttggggttaaatgtcaaaccaaaactcgttttagacagtaaaaaatatatacgattaaactatagtctaatacatatacaaattttactttgcatatacaatttaattcttagtaaatccaaataagaatctaaatagatgataatgatcaaaatctgtatagagatgcacatagtaacttcgtgaattctaagtattagactaaattctcatatacagcatgcagatatgtcatatgcatgcatacacatttttacgcatttcagtccgtacgtatcgtgtatatacggtaacgatggttggatatacatgtgcatgtttcaaagttatgtacaccgaagggacaagctaggctgtgatgctcctaattcaagcttccttcttacgaatgtcaacttttatttaattttctttattgtggcctggccgaataatcaaagatataataaatatttagaggcaattattgattagtgtcctttaattctccttaaattgtttggtttttggtcggttggttccgagattttattttctgtgttaaaatgttactaaccaataacggttgaccctaattataagttctccaacaagatgtgaacttatttgctaattataaacgtgaacgctaaacataaacggaagatttatttggtttgagtttggcgtctgcatttacatgtcgtagtaatataaatttacattaaaaattaatgtttctatattaaagatgtgaattatttcgttttttcatgcacataaacgcatatgtattgtgttgaaactagacgaggctataatgaagacaactgttgtttctttttatctgcaacaatagtgtatatttgaccgttaatgtaataagttcatgataaggttgggaggatagcttccccgtgatggaggtcgtagggtttgtatgattgtgtacagtcttttcatttcacctagctaaccctattgacgcattgtgcaagtgtaagacagttcatacttcgtactactcttcaattatatatatttacaccacattatcaaccaaaatatatgtatttcaatccaactgtatactagacttttcgaaactaatataagattaatgttgaattatgttttcttcacaaaattctagcattagtacatttgaggtgaaaaaacacaaaattcatcctaatgaacacataaagaaaataaaattttaaaactcttcttcgtcaccgaatatttacaaataaaatgatatgtgtgtgtgtgaacctaatttaaagcctatgccaatgagcacatataggcttttgctctctttttttttttttttttttttaattatcacaatagcataaaatatgcaaaacggaagtacctttacaatcatttgtattcgaatttaaataaaaatgataaaacaccaccaatagtaagcaaaagataattagtgttgaaactaatcatccgtaagcatatagagcacttcgatgaaaattagagtattaaataaaattaaaataaaccctcaaaactatctgaagagacacatagagtggctccttggcatatgattaagctcccttaatttatcttctcgtatatatataggcattacacatcttacttattacattcacacacacccacattttacattcaactcttatacaatatgcccatgttaatg

SEQ ID NO: 18781 - DNA, 3003 bp, Unknown; identical to SEQ ID NO: 18778
  misc_feature (1)..( 3003): 2750-1469P.txt file - cDNA_ID_1819344; gDNA_ID_2926201; Annot_ID_141502

SEQ ID NO: 18782 - DNA, 3003 bp, Unknown; identical to SEQ ID NO: 18780
  misc_feature (1)..( 3003): 2750-1469P.txt file - cDNA_ID_1819344; gDNA_ID_2926201; Annot_ID_201841

SEQ ID NO: 18783 - DNA, 3000 bp, Unknown; identical to SEQ ID NO: 3074
  misc_feature (1)..( 3000): 2750-1469P.txt file - cDNA_ID_1819356; gDNA_ID_1620623; Annot_ID_47083

SEQ ID NO: 18784 - DNA, 3000 bp, Unknown; identical to SEQ ID NO: 3074
  misc_feature (1)..( 3000): 2750-1469P.txt file - cDNA_ID_1819356; gDNA_ID_2926200; Annot_ID_141499

SEQ ID NO: 18785 - DNA, 3003 bp, Unknown
  misc_feature (1)..( 3003): 2750-1469P.txt file - cDNA_ID_1819360; gDNA_ID_1620623; Annot_ID_47082
tgtttcaggaaaaagagaagtggtgtcgttagaccactcacagtgttaacatctggactagcggtaactatttgcttttcagatggcaaaaacttattctgcttgaattccatgtcacctgtcaagaaacaatgagtagctccaatcagagattgcatgtaaacaactatacaagttgcattgtttaaagaagaggttaccgatagctcgtgatagatttaagcttccattgactcgccctgcatgtataaagccaccagctttcaatatcctttctttctcagcttcaagatctggtttgtgatctctagaaagattataagcctgtagacaaaggacacacgttttgacaaaaaaattaaagacgccaaaaagtcttaatcaaacacttcaaaatggtattttacctgattctttctggatatcacacaacgtgagtcacctgcatttgcaacaaatagctgcttgtctctaacaacagctacgcatgccgtgctcccagaattaggtccagcaaaatcagaatgaggaccctgttttgacaacaaaagcacaaaccttagatcaaactttactgttgcttagtgatagaagcagtaatgcaggtagggaatatttacttcctcaaacgcccaagcatcaggtttattagcactgtccccacttcttggtgaccatataagcccttcaatcatcccactgaacttattgattttgtcaccaagtactgctaactctcgccaccctctttgtccttgcatcatctcatccattctacaatagccacaacgacaagacttcaatgcagaacttcaaacaaaaatagactctttttgctgtaaacttacctgaaaaatgctttttgaagagaagtccctacgtctccagctgcatacgcctcatcactaagaacctgctggtgtagatacttggcacagaacttagaaacaactttacctacaatagtagccaaaatcatttgagattccatgtacaacaagaacatgaatcaccaaaaaggttcagctatatcagtctacaagctcttaaaccaagttttaagccggagaaaatacaccaagaagacaaatgtttccttttttacctccatgaccatcatagacacccaagaaggaagtgttatcatcgagatcaagtattgcagcatgctaccaaagttataaaaaaaaaacattctttgaatcagtaaggaaacaaaatctgacaaaaagaagaaaggtttaaactttttgatgataatcactcacagcatcttccatggacgcacgccaaccttgcatagaggataaaccatatctgagtttatgattttcgccatcttctgagaacttgtctgtttttggagtacttagatatatacccatctctctctgcaacgaaaaaattagacatttcttcatgaatcaaaaaaagaaactattcttgattacaaaaacaaaatcaaaagagaattttgacaatggacccctgtgatcttaatcttttagagctaattaagaaatcaatctacaaacagaaaccaaaacagagagggctgaatcgataagagttttaaacataccaagatttgaaaacgtcaaaaggaagtaggtgatgaagttgtacgagaagcttggtttcctcacatatctggctggagaaaggaaagacctttggtaggagacagttttgattagaggaagacgaagaagaagaaagttttgatttgggatcaaattcagattgtcgtagccccaaaaagaagaagaagagaaaaagtctgttttgttttgccttagaaaagcaacgaaagttcttaagattttgttcgtgttctcttacttgccagcacaacacactatttttacttaacactaatacaataatgtattacctgactctttatgatttgttttagctgtattgcaattttcaactgtattatatgtttcaaagtcttatggagtaaattgatatatcaaacacacatacatgtcttgtgtcttcattaaattctgaaaagttaaatacatagtagattgtaagactatttgtggatggatatatatatatatatatatatatatatattttcttaaagatcataatgtcaaagtttcctaaaatttcagttgtatgaacggtaacttactatttttcctccacacaagggtccaaggagacatgtgcaagtaataaatgcaacacacataggaagacacacggctaccatcttccaccatggcaacaatgcgatatttggcaagatttgacggactccatacattactctactaccaaatcaaaagtattggtctcaagtacacctaaatcactttgcaattagccagaccactgtttcacaactaaacacgtcttcacccaaaaaatcggtctacaaacttgggacaggtaaactttagtaaaacattcatgaaaatagtgagtatacttggatccatatctcaggtctaatccaaacactctttgtgagtctatgacaagggtatatataacctcattttggagtccctaatagcataatctccttccagattgattcatccacctctttttagacgtgatgatttactccgtgttatcgtattatcaatcatttagattactactaccaaagagggctcgagaaataatatcgtatagttgcaactttgttgcatgataagctttgactagtcttcatcaaatccatagcttttgcaccgctcagcttttccgtacagcatttttgtcaaatgccatttttacttcttttcaaaattagtgaatataatatggaaaacgtgttctccctgtgacctatggaccttttatgggtgtaatatttgtggatatggaatttaaaatttcttaatgaagctgctatttagcgttaatttttaagtagctctcccttttccttagaacgtgtaacacttttgtatatgtagataatagtagaacgaaaaaaaactctttgtagagagattctgcttctatatg

SEQ ID NO: 18786 - DNA, 3003 bp, Unknown; identical to SEQ ID NO: 18785
  misc_feature (1)..( 3003): 2750-1469P.txt file - cDNA_ID_1819360; gDNA_ID_2926200; Annot_ID_141498

SEQ ID NO: 18787 - DNA, 3000 bp, Unknown; identical to SEQ ID NO: 3070
  misc_feature (1)..( 3000): 2750-1469P.txt file - cDNA_ID_1819373; gDNA_ID_1620623; Annot_ID_47076

SEQ ID NO: 18788 - DNA, 3000 bp, Unknown; identical to SEQ ID NO: 3070
  misc_feature (1)..( 3000): 2750-1469P.txt file - cDNA_ID_1819373; gDNA_ID_2926200; Annot_ID_141492

SEQ ID NO: 18789 - DNA, 3000 bp, Unknown; identical to SEQ ID NO: 3098
  misc_feature (1)..( 3000): 2750-1469P.txt file - cDNA_ID_1819377; gDNA_ID_1620624; Annot_ID_47105

SEQ ID NO: 18790 - DNA, 3000 bp, Unknown; identical to SEQ ID NO: 4267
  misc_feature (1)..( 3000): 2750-1469P.txt file - cDNA_ID_1819377; gDNA_ID_1620694; Annot_ID_48634

SEQ ID NO: 18791 - DNA, 3000 bp, Unknown; identical to SEQ ID NO: 4267
  misc_feature (1)..( 3000): 2750-1469P.txt file - cDNA_ID_1819377; gDNA_ID_1620694; Annot_ID_164867

SEQ ID NO: 18792 - DNA, 3000 bp, Unknown; identical to SEQ ID NO: 3098
  misc_feature (1)..( 3000): 2750-1469P.txt file - cDNA_ID_1819377; gDNA_ID_1620624; Annot_ID_162451

SEQ ID NO: 18793 - DNA, 3000 bp, Unknown
  misc_feature (1)..( 3000): 2750-1469P.txt file - cDNA_ID_1819377; gDNA_ID_2926208; Annot_ID_141844
actagtacatgctattatcttttttattttattaaatatttttgtccttcattctcaaccgttgccacattttctttgttaatgatcattatattattattatgaagtcgtttttggaatcctacaacattaacatacacaaatgtctttttgtgataccatacaaataatttgtttttctaaaacaaacaaaaaaatatcttttgtgataagcaaattgtgaatctgtgataacctcgcccacaaatcatatcacttattcgacaatttgtgataatttagcccacaatatttatgcactagctgatagaaagaaacatatccttatcactcacttactgtataaaatcccggattggccccatcaaatatacatcgctcttatcattaaccacatctggcaagtggtttaagctgtcaaatacaacacgactttgttgaacatatttttgtttctcaatctgtaatccaccgacgttcattttttggttaatcttttgtctgctgatctgatcatgtaaacctgacggaatcgaataacatatataactcaatctaattatgcaatgcaaaacaattatttgtgaataactcatttttaacccgttgaaagaaatgatggttttttaaagatacatgcaacctttaatctcctttattcatgcgtgtctgaatttgtatcacaggatagagtaacttacgaattttcttggattagattattagaacttcattttgccaaagaaaatattgcttacataataataaggaggcggctaaggataacatgaattacaatcgctatacaacacataattattacactttttgttcttcttaaaaataaatgttatccagctatattttcatccagcaaagccgtcaggcgttgtcgataagcttcaaaaaaagaactgatgaaattccgaaattcctcctccatattagcgtacgttacgttttatttaatttattttgcaaatgatattttcttcacttccagttatttttttatttttttaattggtagagtaaaaaaagatttattggcactctaatttttgacggttaacacacatatactgcaattatgtttaacaaaactaaaccgatcgatgaaatattctttacttggtcgatgaaaatagttgtctcatccgatgatccgaatgactctttccaagttggtaccttaaattgtggtatctgctgtattccatacgaaagtaaaccgcggaataactaaattcttaaaccatctttatcagaacaaagcaactaatctgcaaaattgtcagtgttgcaagctataaatgttccgtacaagctacaaataaagaaatacaaggcttagccgatgtgaaacgtacgttagagttgtacacgatatgttttgtgtgaatttgataaattcaaaaaaaaaattgttgtacaccttgatcctagtcatgctggttggtgtatattaatatattatatcagaaagtgactgtcattctattttaatgtgatatttacggtcaaagacatgttgcatgtaattgcgcgcgcaatgtatacgaccattttttgatgaagtaactcagcgggtaaacattctatcactttccatttcattggtaagtacaatattggattttcttttgtggtatgcactagtcggtatcagtcccgagatgtaattagagaaatatttgtaactagaacttttttccaactctttcgaatttttttttttttttttttttgccgtagatttggaatatgattctaacagaatatcaatacaatatagcaactttggctcactggtcactgcttcataacatgataacaaaactctcaagcaactactttcatctgaccctttttatgtcaaaaaaggtctttcgtctgaaccgaaaatcaaaccgagttggaagcttctagcaaagataatgagccgtactagtcacaactcacaagtcacactttcgaatttcaaacttcaattgaagatccgaatatccactgccgtagtttgtacgatactttcactcatttcatgttgtcatgtgtcgtacaacagtttccagtttcccattattatttaatgtttatttattaatatttggactttaattacggcaggttatactatatggtatgatagaatattttcttcattccactggattttgctaattatatatatttattccaaatcacaattttgatttatcgtcattacaaaaactaaaaagtaatgaccaaaataaaagatatgtaatttcagatattccgttctaactattctattctcttcctgattccattaccaaacactgagagacaaataagctactggccgctaattggctatcgctctctttacatcttcgaacataagcaatagttgaaaaatataactttactaaaaaaatacatatttttcgttaaaaaaaaccttgtggtcgtctatatactattctaataagtaaaaaaaaaaaaaaaaagtaacggaagcatgaactttcatgcctggaagaaactactggccaaaaccatccactaaatacaactaatgaagtaatcatcctagttgagcatattgtaatcatcacattcaagaaaaatatcccatggagaacaattttgcattatataaaaagttaattccttgtcgacttttatataacacaaacaagaaggagcacatcgtaaattcatcaccgcttctacaccttcaccgtacgtgtctctttcgtactttctcactatttgtcattctaattataaagtacaaaaaaatcaatagtttaattattaaattaatattaaaaataaatactttctactaaaagtctaaaatattataacatcgaagttgcgaaaaataaaataaaataaacgtaacatttcacctttaaaaccgtacgcagagtgctcaacgaacccaaacacactctaaaaatatcttctttctccttcttcttcattcttctcaatatctcctaaatg

SEQ ID NO: 18794 - DNA, 3000 bp, Unknown; identical to SEQ ID NO: 18793
  misc_feature (1)..( 3000): 2750-1469P.txt file - cDNA_ID_1819377; gDNA_ID_2926208; Annot_ID_202398

SEQ ID NO: 18795 - DNA, 3003 bp, Unknown
  misc_feature (1)..( 3003): 2750-1469P.txt file - cDNA_ID_1819388; gDNA_ID_1620624; Annot_ID_47101
gtttttgcattttcatgtgtatccgcgacaagcacaccaatgacctgaaatacaagattagcttagaaataagggaacgaaagcagtacatgaaaactttttaaacttatttgacgtaacaaaatcaatacatgctcctttacttttctggtatcacttcttctaagatacagataaactaaaagttccccattgaggtttattttcttacttgtcccacacacgtgaccacgtctgtagcaaataattcttcgtcggcaacaattggtccaatcatattattcccgggaacatctttggcaagaaacagaccaacaaaaccagatgaagatttggctgccgaatcatcaactgaaaggatgcgggcatgtggaactttacttagcactaaagcagcatgcaaggtacaaggcggcaatggggtatcatcagtatattctgcttcccctgtgacctagatgaatatacaagagtgttgagatacactctatggaccttcggcgagccaacagatggaccaaaatacctgcattcttgccgaaagatggacctctggcaagccaacagatgtaccctgttttactgtctcatagtcttgttttccaattctagagaaccgaggaacaagttgcacagctgacatatgcgagggtggaaaggtctctatagtgggatttacattatttacatgatgagtaacccataagaaaaatttaaagaagaagcttagggttagagatttgcgaaactccaccattcccccaggagcaccttccttaatcaagacatcactctgtatgaccttaagtgcgtcttgcagaagacatttattccaattcttaccaattagaagttcctcagtgtttcttgcacgcaacgaaagaggagccacaccaccataaacaatagatgcatcagaaacaaacaattgttgccctttctcttcaagaaacacacgcattccaccattgacaatagctatatcatcatccctgcgatgggcctgcttaaattctttcacatactctaaaggccttgtccatggaaggaataccgacaacaagatctcgttgcttcccatatccactttacgatagccaaggaagaaatcttttgcaggtatagatctaacatctccattgcagttgattatccgaaactctgctcttgaagccatccaaagaggatttaaatcagatattggactagctgtacagatgtttccaccaatgcaagcaacatttcttatttgtgtcccagcaaaccacttcagctgttcgataaaagccttgcatgctgatgtttcatgtgcaggacgctcctttactaccttcctgaataacctcaggagttcagaaagtctcaaagctgaaccaacctctatcccattgtcattgacattcaatgcgttgagttctgggacttgagcagcagagattagcaccggatactgtaacctctttagtctcatttcgattcccacctccgtgttaccaaccagtagttttgcatcaggaaaatttgctttgagttcaagcaagttctgaagacttacgggtctataccaggtaatcccctcatttccccctaactttaagggagctaacttcctcagcagaagttcagggggaaaaataagctccttatctgtatacttagctccatctatatcactataagagattgactgaaatctatcttcattacaagtagctgcttcacttgttgtttttgatccacaagaacaaggtttgccagtagatggacaaatatttgaaccgtcctgaaggctaagtgaagataaaccactgtatagagcatcatcagattttgcaaaaacccgaaacgcatcaatgatgggtctataaccagtacaacgacacaaatttcctgcaaggcattcttcaatctcctcctcagaaggtgagtttttacttgacctcaacaaggcatacatcgacatgacaaaaccgggagtacaaaacccacattgagaaccatgcgaagatgccaatgactcctgagagaaatagggagaattaggatcgcagaaatgagaaaaaaaaaatctggaagaagtaaaaccccacctgaagagggtgcaagccaagtttccgatgaccaactccttcaatggatattacatgcatcccttctacagagtagagaggtgctaggcaagcgttgacagcataatgcctgcaataaaagtttccggtatgaacagtataagaaggcctaaacttaagcaaagcagatgcaacctatgagagaaaaagatacgcacacacatgtctttgactctcggtcataactagacaccatcacggtgcaagacccacaaccaccttcgccgcatccgagctttgtcccggtcaatcctaaatctaaaggaaacaaaaaacgttttcaagaatcccaccacacaacaacctaaccctctaaattttgctgcattgtacaatttgtggcttctctactctatctaaacttagattagatataagcatttgaagaaatcaataatatagagttaaaagcacctctgagatattcgagaagcgtcatgtgagctaatccatcaggcaaaactctacgaacaccattaacgtacattattgcctccatgaactcgttctgctccatcttcactgaacccagacgaataactgttatccaataatggcaaatatccaataatggcaaaaatccaataattgcaaaatcttctctttttaaaatgttttttttttgttttcatttttcgacaaaaaatagaaaagcccaattattaagcccataaagaagaatgtagcccaaaataagcccaatattggagtcatcaatcaggtctgggacattgaaaaaactcagtaacagtctaacagaggaaacgcggcggaggaggttttacgactattttcccttcacttcttcatcttcttcctgcgccgcttttcaaacctattcgaccagacaaactcggaaatttcatattccatg

SEQ ID NO: 18796 - DNA, 3003 bp, Unknown; identical to SEQ ID NO: 18795
  misc_feature (1)..( 3003): 2750-1469P.txt file - cDNA_ID_1819388; gDNA_ID_1620624; Annot_ID_162447

SEQ ID NO: 18797 - DNA, 3003 bp, Unknown; identical to SEQ ID NO: 18795
  misc_feature (1)..( 3003): 2750-1469P.txt file - cDNA_ID_1819388; gDNA_ID_2926208; Annot_ID_141840

SEQ ID NO: 18798 - DNA, 3003 bp, Unknown; identical to SEQ ID NO: 18795
  misc_feature (1)..( 3003): 2750-1469P.txt file - cDNA_ID_1819388; gDNA_ID_2926208; Annot_ID_202394

SEQ ID NO: 18799 - DNA, 3000 bp, Unknown; identical to SEQ ID NO: 3091
  misc_feature (1)..( 3000): 2750-1469P.txt file - cDNA_ID_1819392; gDNA_ID_1620624; Annot_ID_47100

SEQ ID NO: 18800 - DNA, 3000 bp, Unknown; identical to SEQ ID NO: 3091
  misc_feature (1)..( 3000): 2750-1469P.txt file - cDNA_ID_1819392; gDNA_ID_1620624; Annot_ID_162446

SEQ ID NO: 18801 - DNA, 3000 bp, Unknown; identical to SEQ ID NO: 3091
  misc_feature (1)..( 3000): 2750-1469P.txt file - cDNA_ID_1819392; gDNA_ID_2926208; Annot_ID_141839

SEQ ID NO: 18802 - DNA, 3000 bp, Unknown; identical to SEQ ID NO: 3091
  misc_feature (1)..( 3000): 2750-1469P.txt file - cDNA_ID_1819392; gDNA_ID_2926208; Annot_ID_202393

SEQ ID NO: 18803 - DNA, 3000 bp, Unknown; identical to SEQ ID NO: 3090
  misc_feature (1)..( 3000): 2750-1469P.txt file - cDNA_ID_1819396; gDNA_ID_1620624; Annot_ID_47099

SEQ ID NO: 18804 - DNA, 3000 bp, Unknown; identical to SEQ ID NO: 3090
  misc_feature (1)..( 3000): 2750-1469P.txt file - cDNA_ID_1819396; gDNA_ID_1620624; Annot_ID_162445

SEQ ID NO: 18805 - DNA, 3000 bp, Unknown; identical to SEQ ID NO: 3090
  misc_feature (1)..( 3000): 2750-1469P.txt file - cDNA_ID_1819396; gDNA_ID_2926208; Annot_ID_141838

SEQ ID NO: 18806 - DNA, 3000 bp, Unknown; identical to SEQ ID NO: 3090
  misc_feature (1)..( 3000): 2750-1469P.txt file - cDNA_ID_1819396; gDNA_ID_2926208; Annot_ID_202392

SEQ ID NO: 18807 - DNA, 3000 bp, Unknown; identical to SEQ ID NO: 3088
  misc_feature (1)..( 3000): 2750-1469P.txt file - cDNA_ID_1819403; gDNA_ID_1620624; Annot_ID_47096

SEQ ID NO: 18808 - DNA, 3000 bp, Unknown; identical to SEQ ID NO: 3088
  misc_feature (1)..( 3000): 2750-1469P.txt file - cDNA_ID_1819403; gDNA_ID_1620624; Annot_ID_162442

SEQ ID NO: 18809 - DNA, 3000 bp, Unknown; identical to SEQ ID NO: 3088
  misc_feature (1)..( 3000): 2750-1469P.txt file - cDNA_ID_1819403; gDNA_ID_2926208; Annot_ID_141835

SEQ ID NO: 18810 - DNA, 3000 bp, Unknown; identical to SEQ ID NO: 3088
  misc_feature (1)..( 3000): 2750-1469P.txt file - cDNA_ID_1819403; gDNA_ID_2926208; Annot_ID_202389

SEQ ID NO: 18811 - DNA, 3000 bp, Unknown; identical to SEQ ID NO: 3087
  misc_feature (1)..( 3000): 2750-1469P.txt file - cDNA_ID_1819410; gDNA_ID_1620624; Annot_ID_47093

SEQ ID NO: 18812 - DNA, 3000 bp, Unknown; identical to SEQ ID NO: 3087
  misc_feature (1)..( 3000): 2750-1469P.txt file - cDNA_ID_1819410; gDNA_ID_2926208; Annot_ID_141832

SEQ ID NO: 18813 - DNA, 3000 bp, Unknown; identical to SEQ ID NO: 8485
  misc_feature (1)..( 3000): 2750-1469P.txt file - cDNA_ID_1819440; gDNA_ID_1971812; Annot_ID_58141

SEQ ID NO: 18814 - DNA, 3000 bp, Unknown; identical to SEQ ID NO: 8485
  misc_feature (1)..( 3000): 2750-1469P.txt file - cDNA_ID_1819440; gDNA_ID_2926173; Annot_ID_140189

SEQ ID NO: 18815 - DNA, 3003 bp, Unknown
  misc_feature (1)..( 3003): 2750-1469P.txt file - cDNA_ID_1819444; gDNA_ID_1971812; Annot_ID_58139
ctaaaattacattttgggctcagaaagaatttttgtttccgtattgggttacaatgctttattcactgagaatcaaagaatgtgtctgtttatttcttttgatgctacaaaaccaatgaattgagttatgaaggctatattagtggatctctctgtctgctacttattaccaaacaaatgaagaaagaatcatagtcttgaagaaacagagtttgtaagaattctctttagttcctttctcaatatcttcccagttggagattttggtatagagttgaccatcaccactttcctcaccttcctgtagggtgcaacctagaacacgtaatgtataataatgtattacattaatgatcagtgttttgaaatgggaaaagccattttgaattagtgggaacctaacctgagaagctacatagcttattacatcttcttctgaaagtgttgtttcttgtctccggacaacgaatgctaccggaatctctccacattcttcatttggggcactgaaatggaaagtttggatactttcagtagagtaacagactctgtcgaattctccaaaactggatttgcagtatctttcacttattaaactagtttagtaaatgatcaagatttgttttttcgaacttacgctgttactgcagcgtcgataatcaagggatgtgaaacaagaacagcctccaaatctgctggagcgatctgcaaaaaccataaatgcaaagaattaatatttcctaatttagagttggctgaaagagaaactgctgttcctttacctgaaagcctttgtactttataatctccttaatacggtcaacaataaacaagtaaccatcttcatcaaaataagcaatatccccagtacgtagccaactatcttcaactatactcatctgagttgcttttgggttattcaagtatcctgacagacaaatgaacggtgttcagattctctccaagtaaaattaaaactgttccataaaaatatgtagcacaaaatcaagaacaagataataagcctaatctatcaacacaagcaccaaataagccccacgaaagttggaagatccaatctatatttacatttattaggatgcaagtgtttctcagtgatttgaaccattgacaaaagactttattcatgaactgagaaggaaaatctcaactattttggtaaagaagtacagtaggaagaatctatctacctttcatgacaccgggaccttgtatccagagctctcctcggtttcctggtggaaggaaagaaccagagctccaatctactaccttggcttgcatattaggagccagtagtcccacagaagaatacctactaagcttttccgagttgaagccccgtgttccaactgcagttgattcagtcattccatatccctgcaacaaaatgtgatccattttatacacactttcagctaaatgtaaagaaaataatagtgtgagtcaaaaagtcatggcctcgttaaatcaattttagttgtttcttttgggaagagatgtcaaatttttctaaaaaatgtagattctacttcttattgagtttatgaatgaataacatttaattcagttttctaaaacgacatccaaaagtaaaattcagagacctgaatcaaatcgacatgaggaagagtctgaaggaaatcttcaatgaacttcctactcaaaggagctgctccagaagaaacttgcttcaaacttttaaacacttcaccacaaactccttttgccttctttgtcaatgccatcaacataggtggaacaaccgggaaatgagtgatcttaaacctttcaattacattaacaacatcagaagcatcaaacctcttcataacaacaatagttgatcccagagacaacaatcccatcacaaagagtgataacccgtagatatggcacaaaggcaaagctgctagataaacattactcgatcccggatattcgtactgagaagcttcaaacctcacaaaaagctccattgatgctatcaaattcctatgagttaacaaaactcctttactagctccagttgttccagatgaatacataattgcagctacatcgtcttgcttaatcaacggttttggtacaaacccaaaactttctttcataatggagtaaaacttcgggttttcgatacgaatcgaatcaaaatcgtaactttcagatacactaatcacactaacccccaaagaactcagcttctcaacgttttcagtagaagtaaaagctaatccaacactacactcactaacttgcttcttaatctctcctaaactactcgaaggattcatggtagtaacaatagcaccaagcgagatcaaagagaggaaaatcatcggaaaatagacggaattaggcaagacgagtgatacaacgtcaccttgacgaacacctaaaacgtgatagatcccagccgccattgattgaaccataatctgtagctcagtgtgagatattgagaacccggttaaggaatcgatgagcgctgtatcgccgtggtgtttgtgtgagaaaagagcggagacggcgtcgagatttgggtcgacggggaggtgtagggaagggaatttgctggtgtagattcctgttttagaagagaaccaaaagggagggttttggtgagacgtttgggttttaggatttggcggtatgtgaagatgtgtcgccgccattagagagaagcagagtttaagattctgcagcgatcaatatttacttctgatcgggaaataaaccaacgacggaatagtttagtaaaataattaatttagttgtaacactattattatgtactaattgcaattaattgatttcgaagaacagagagtgcaagaagatcacgtgtgacacgtgacagtctgttagcaaaaaaagtacaatagtcaaaaaatacacactcacttgatttcttccctttttcagttttgtttccctattggctactttggatcccttttagattctttatattctctgatg

SEQ ID NO: 18816 - DNA, 3003 bp, Unknown; identical to SEQ ID NO: 18815
  misc_feature (1)..( 3003): 2750-1469P.txt file - cDNA_ID_1819444; gDNA_ID_2926171; Annot_ID_140148

SEQ ID NO: 18817 - DNA, 3000 bp, Unknown; identical to SEQ ID NO: 8483
  misc_feature (1)..( 3000): 2750-1469P.txt file - cDNA_ID_1819448; gDNA_ID_1971812; Annot_ID_58138

SEQ ID NO: 18818 - DNA, 3000 bp, Unknown; identical to SEQ ID NO: 8483
  misc_feature (1)..( 3000): 2750-1469P.txt file - cDNA_ID_1819448; gDNA_ID_2926171; Annot_ID_140147

SEQ ID NO: 18819 - DNA, 3003 bp, Unknown
  misc_feature (1)..( 3003): 2750-1469P.txt file - cDNA_ID_1819460; gDNA_ID_1971812; Annot_ID_58135
gtgccaagggatgagacagttgggtttgtgattgatggcaaattgtaaacaaatgatgaattgttagggccagttgcataatcttgatcatgtgtcctgtgtcctgggaagtaatcgaacagctcagattgattctggttgggttcaaattgacgatgaagaatgatgttgaggtatggatgcatgtattaatggaggtagatggcaaaaataacattaaatggcaagaggaaacactatgtcatgaagatgaacatcatgattgacataatgtggtagttggaagttcataaattctgtgtctttttgttcatgcatcttcttcttcttcagtgacacagtaagaaaataatcactttgggaataaattgtgaagcatttgtccacaaagattctacctttctgtactaagtagccacccaaaggatatataagacgattttaaaatagatttggtaagtaatgatgtagagtggaccagtagaaaaacttataaatgaatttgttgttataatgtgactttgaggtttggagtcagtgactcataaatttgaagcatgatcttgtggggttttgtgacagagcaaataagttaaagcagccatgctggattctttttcaaataaagaaacatttcaaaaaatagaacagaaaaaatgatcatatctactacactaccaaccacatgcaaggaattatgaacactataaagcatgagtgtcattgaacatttgacaattcgtttgttttctcgagaataaaagataactttataaatggagattcattttaccatcttcttgatgaattcacaaattagaaattacaatcaagggtaaaaaacttgggggtaacttctacatatacatgtgtgtggttgtgtgtgttcataagaatgaaatcaactatcttcagagaaatatcttttgactctaacccgctcaccattgaagtagatgtatttgtattcagagaggtaccttctaaggatcagttttcgattttcttcttggttgagttccctgaaggctcgtgccactctcctcgcagagtcttcgtctgggctcaccttcagctcttccatgtctgcaaagacctaaaagagaacaaccgaaagaaaatgtatcttagaaccacgtcatacttcttgcagagaggtgtagagtatcttgaggagtatcttaagtgtaagatcaagataaattctcgagggaagaaagaaccttgttttacctcgataaccttatcgtgaaggtcatggtgagcatacaacgctatcatcctagcgaacaagcgtcttgggatggatcgtgtatgtgtgtgcagaatcatgttccataaggactctgcctcatcagccctttcgtccatatcaaatgccaataagaggatatcgtatgttcccattgtagcaccttgccctttgcttaacatccacttagccaactgagtttgtcactaaaccaatcaactcaggacaccatatttagcaaaactttacacttgacataggaagccgtattacttacttgaatcacacgatgccactgacttctctttcttaagatttgcaacgccttagctgcagcaataatgggaaattcaacctcccaagctacccatttattcaaagctccataaacagcctctttttcatttgggagtccagagagctacatatcaacaaggactactttatcatcgtttcacttatgaaaacatatgttttaacagaacttttcctcacttaccattcgaacaagattaagtgctttctgtccagacccagcagagtcattcttcttccacaagtgatgctctttcttccccactttctttatttccttgctacaatatcaacattcaacacaaaaacttactggtgaatcaaacagaaaaaaacaatgtcaaatgattactcaagaaagatatgcaaccaaacataagttaatttacatatattatatatataacttgaaatgtaacaaacaacaaacctgttcacagtggcaacataacctctgtccaatttcccagcttccttctctgagaacttcaaaacaatatcaccattatgacatgttgtaattcatttcacaagctatatagccattaaacagaaagtaactacaaaaacattttttttttacctttgatctgatgcaaaagccaaaccttttcgtcttcaacgaggagtaacttccgcaacgtggagattgaagcaaagaaaagcatataaattcttgagatttctgcaatttgaagaattcacatctgaatacatatatacaatcttatctcaagactgaaatatttgatggagagaataaagtaactcactgataagccttgcaatgggaatatcccttgagttggattcaagttacagagcgccattactttcacttccagtaacacaacgaagaactgaatttgaattttatgaaatggtaaatttttgaaactggagttgttgaagataagggataaaggtgatacctttactcaaaacagagcagatttggaagtaatacgatgcagcaagaacaaaaacacattcagagtttcacagaatcaatcgagtaataattgctagagagagattgcacgatgatcgattgagtttgagagagaagaatcgagtttagggatttcttagtaaaccgaggaaaattggtttagccaattacagaaccgatcaataaccgaatgaatttagtgtcactgtcagtttgtaatgggttagtgcctagtggtggagtctagaacgtgaatatattaatgggcctttttagacaaatctagcccaacagagagaaacgagttattgaaagttctgccatacttgatttttgattgtcaagtactcaaatagcataacttttctttctttatgtatatgattgagttattagtacttgattatttagttaaaatttcatttactatctcaaacttttctaacttctcttaatcacgattattagcaaattggtttccatg

SEQ ID NO: 18820 - DNA, 3003 bp, Unknown; identical to SEQ ID NO: 18819
  misc_feature (1)..( 3003): 2750-1469P.txt file - cDNA_ID_1819460; gDNA_ID_2926171; Annot_ID_140144

SEQ ID NO: 18821 - DNA, 3000 bp, Unknown; identical to SEQ ID NO: 8481
  misc_feature (1)..( 3000): 2750-1469P.txt file - cDNA_ID_1819463; gDNA_ID_1971812; Annot_ID_58134

SEQ ID NO: 18822 - DNA, 3000 bp, Unknown; identical to SEQ ID NO: 8481
  misc_feature (1)..( 3000): 2750-1469P.txt file - cDNA_ID_1819463; gDNA_ID_2926171; Annot_ID_140143

SEQ ID NO: 18823 - DNA, 3003 bp, Unknown
  misc_feature (1)..( 3003): 2750-1469P.txt file - cDNA_ID_1819469; gDNA_ID_1971812; Annot_ID_58132
cggaagaaaacgcaacgccactgcaaccgccacaaacgcaggaggatgatgaagaggaaaaggcaatgtatgctatctgggcagtaccggaggatgacgtggaggatcggcttcagaggttaatggaagggctcaggtcagagtttggcggtccagcatttgatcctcacttaaccctcgttggacctttcccttacaaacttacggccagcgaggctaaacggatgttcaagtcggcgtgtgaaggttttaaggtgtatcctgctaccgttgaccaagtctccgccggaacttcttactttcagtgtctctacgtatctctccggcacaccgtagaggtatattttacatgcataaactgaaacaaatctttaaccgaaattgaaacttataagctaccggacattgtttttgcgtttgtcttatgtttacaggtaatgaatgctgccggacatttcatggcccacttcaaacccttcaccggaaaatgtatgatctaatctcgattaatcggattttaatatttggttgggaagtaattaaaacgttattattgtgaaaaacactaaaaatcatattattaccaagaaacgtgtttttttgtttctttctctttctgtgtacgtgtatttgaaacgttggattgttgcagtttacgtgccacacatgagcatactctacggcgatttaacggagagggagaagaagaaagcgttagagaaagcttacacgcttgattcgagtctcgacggattgaattttaagataaatcgagttgcattatggataaccgatgcagacgttggatcgtgggtgaaagttgacgaacatactctaatttcttaaatgaaataaagtaaataaatattatggttttgggcctagtctccaatcttcctcttgtgctttgtgtgttgtgtgcaatttgtctccccttattcggttttcatctgctgcattggtttagtaaggtatgatgttccatggttcggctcaaatttgttatcggtttggtctaaatgtatctttgcctctggcttaattctatgttaatatgaacatagtttatggatcttgtgggaatattcctccttctgtttcttgttaagtgttttggtttatatcttgaagaagaatgacctagtcaaggatttgaatcattggactcttatcaaactgataatatcataataagatgattcaagatataatatttaaaagcacacaatcatgaatcaatttggagtctagttgacatttgttactaaattactaacaaaaggttcaaaaagtttgaattgacattaaagataagaatcattgataagggtgcaggaggaggaaaaagctataagtaaacaacttgtcattcgtcgaaactaaaatatgatagctatgtgcatatgttttaacatagatttaaaatttaatgtaaagttttttcatcataatttagtacgagtataggacaaaacttggtaagattttgctcgaatttcgtaaaatataatactttcttgaaactttttatttaagtaacgttgacattcatgtgacgtgtatgtatccaattttggttaataagatgctatgaaatctaattattatactttcattcaaccactattcgtatctaattaattagaatattcttttaattttagtaaaccaaatgagctatagaaaaacatctctataagagtagctaggaaccaatttggaatgtatagttgacatttgttactaaatcacttagagaaactccataaagttggattgaaatcaaaggagaagtaatattaaaatgttttcagcaggaacatatgagctataattagacaacttgtcatttaagacaacaaattgattatcatcatgtcttaagatacgaatgtcaaaatcttgaccttgcatgttagttgttatacataactggttgaaaagatagttaagtctaaaggttgacaaatgatgaaataaaaattagaaaaaatgttaaagccatacaaatccacatgttgtgaagttgaataagtaagttaaacgagttttggttctaaactgaaatttgacccccaaaaaaaagatgaggatgcagatgtcaatctttacctattcaatgtacaccacaataaattgaatcacattcttagcatgaaaccttatccaatttgtttgtatattttttccttggccaactaaagtggctattatcaagaaacaactaaagtaccctgtaaattgataaagaaaacaagtggaaaatatgtaaatatatcattttagaattcaaaccaaaatagaactcatgtaatcttataattcttatcccctttttaaaaagtctttaattttagacatgactttaaaaattcacgagccaggttggttacaaacttacaaaaactcgtcggcgcatgtaaaacgcagtcgtttaaccgaatcgaatccaaacacgtgcgggttcatccacaccgttaagtttcatctgacgctgtttacatcaacggctaagatttgttattctctcttttcgtcaacgcattgttaccgtggcgccagatatgacgtctatatacgcgcataaaatcacgtgacaaacacgcgctcaacaaaagctggttcttctccttttcctctccgatgactttcttaccgaccagcttagtcttctccattacggcatcattcacctataaatttcgccgctgggtttaattctctattcattcagaaccaaaaaagaagaaacctttttgattctctttgcgatttctttgttcaatctcttctcagattgtgtgaatcgggtttaaatcggggttttagggtctctgttttcaaaagggtaccaaaaagtttggagctttactgtagaaagatttgatttttcgttgacccactccgagattttcggatacaaatcagggttttagggtttttgttggaatggaagaggattatcaacagccgaggtttacgattggtaggcaatcatcaatg

SEQ ID NO: 18824 - DNA, 3003 bp, Unknown; identical to SEQ ID NO: 18823
  misc_feature (1)..( 3003): 2750-1469P.txt file - cDNA_ID_1819469; gDNA_ID_2926171; Annot_ID_140142

SEQ ID NO: 18825 - DNA, 3003 bp, Unknown
  misc_feature (1)..( 3003): 2750-1469P.txt file - cDNA_ID_1819477; gDNA_ID_1971812; Annot_ID_58130
cggagaacttgctggactagcagtaggatcaacagtgctacttaacgtgataattgccgggtaatatactattattaattactatcattttcttttttatatagttttctttatcgacagaaaatttgaaaatgatatatggttatgtttatctttatattaggccggtatcgggagcatcgatgaatccaggacgaagtttaggacctgcaatggtctacagttgctacagaggactttggatctacatagtttctccaattgttggtgcagtttcgggtgcgtgggtttataacatggttcgatatactgataagccattacgagaaataactaaaagcggttcttttttaaagacagtgcgaaacggtagctctcgttaagaaaaagaaaaacatgactatgttgtactagtcatcggaggttaagttgtatcactaaagaagtaactggaatattttgtattaaagtgtttttaaatttggattaccgcaaatggataaacatttatggtatgtgacgaatatgtaactgatctataacgagtttggccatatctaattacgtgctatatggttgtattaactgctatattatatctttctctttttatgcgaaagataatgtcgtcatatttatggtgctactgtatcgttacacctttgaaatcattaatgcaattttggatagaaagatccttagtttacgcaaaaattgtcaaaagttgcaatttagaactcgtcaaacaaagcacaaaagccggtgtcgcaaacattgccaagtgtgcaatactttgtccaagagcttaaaatccggccacgtgtcattttgtcgccattgttcgccacatcatcaatccgaatgacgtgtcacgcatggaatcattcacgtcatgctttcctcatgcaaacatcactcctctcttataagaccaaaagcaaaacactcgaaccaaactaaagaacaagaaaaaagggtgttgttacgatggcatcgagtgataaggttccggtggcgtgtccggcaagcagtggagatggaaaggagccaatgggaaatccgacgaaaaccactacggcgatgctagagaaaggaacggctatgatgcaatcgatgaaaccgatcaggcaaatgagcctccacgtgtgttcattcgcttgctatagccatgatcccggtcgtcagatcgaagttcatatttacggccaccgtgtaaaccaggatttcctccaatgtgctgtctacgattccaattcctctaaggctcatctcataggtaaatatacttcgacttcgatagtttgtttacatttttttgagttaagtttcattagctaccaattaaaaaacaatgcaatatatggattgatcacgtctcttatatactattccatgtcctctaatgtgtgttggatcctatgaggttgcgttgtgtttgtttattcgtttcacacattcacaattttatatgaaaataaaataaaactaaacttcatttttttcgtatgcactattaattttaggtttatataggcggtaaattaatggccatgcatattttttatgcgtataaatgttttctaagtttgagcattgaagctttttgctagagactaatgacttctgaattttgtttgttattgtattgaatctatagggatcgaatatatagtgtcggaaaagttattcgaaagtctctcaccggaggaacaaaagctttggcactcgcatgattacgaggttcatgattttcgatacattgtccgatatgtttattatttatctgaaaaacgaaaatgatcgaatgagagttgtttttagatccaaatggctcttctagtaactccaagggtccctgagctcgttgcgaaaccggagcttaaaaatcttgccaaatcttacgggaaattttggtgtacatggcagattgaccgaggtaataaactcatcttaatatgattttttttatatatttgatatgattatagatgatatgagtttagtaacttaggttttttgttgtcttgttataggggataaattaccactaggtgtaccatcactaatggtatcgccacaagacgtgaatctcgggagaatcaaaccggagttggtgaaaaagagagatgaagaacatggaatctcgactgaatcgttgaagccgtcaagagatgggatctgtggaccagagaagaagaacctggttgctgattattgggttaggtttaggaaaggctttgcgcttgatgttgttgaaacagatatgaagagaacagctcccttcccctaacttttgtgtgtgctttttttctcagacattaattatataagttttcgtaagcttacactagatgggttgtgtacttattatgttatggagtatgataatgtcataaacatgagaattttttcgctctttgttactcattcactcactctaaataggttgtgtaccctttttttttctggtttaagcaaaagagaaagacatgcatctagaagcccaaaaactctttgtgacaactgacaatgtagccttttaccttttgcatatcagtttcctaaaaagccttttcttaatatagaggtccattgcactccaaaggtgtgcgttcatgagcccatgtagttgataacttcatcgtatgtttatgtttactacatacgtcgtcgtcaagatggaattcacatctgattaaattcatttcctttgaaaaaaagattccttccaacatggctacaatccaacaccttcacttagaaaatttactactgaccaaaaccaagagcattttggtcgtattttaatatccttagtcgttgtctatgaataattaatatgacttacagctcgttggtcgtattttcatatctttattcgttgtctattaataattactatgacttattaacgtattccctgattagtacaactaatataaaatgttaatcttcttctcataatattcttgaagcaaattagcactgaccgatcgatccatg

SEQ ID NO: 18826 - DNA, 3003 bp, Unknown; identical to SEQ ID NO: 18825
  misc_feature (1)..( 3003): 2750-1469P.txt file - cDNA_ID_1819477; gDNA_ID_1971812; Annot_ID_175781

SEQ ID NO: 18827 - DNA, 3003 bp, Unknown; identical to SEQ ID NO: 18825
  misc_feature (1)..( 3003): 2750-1469P.txt file - cDNA_ID_1819477; gDNA_ID_2926171; Annot_ID_140140

SEQ ID NO: 18828 - DNA, 3003 bp, Unknown; identical to SEQ ID NO: 18825
  misc_feature (1)..( 3003): 2750-1469P.txt file - cDNA_ID_1819477; gDNA_ID_2926171; Annot_ID_199525

SEQ ID NO: 18829 - DNA, 3003 bp, Unknown
  misc_feature (1)..( 3003): 2750-1469P.txt file - cDNA_ID_1819481; gDNA_ID_1971812; Annot_ID_58129
gtattctaagaagtatatatatcaaaattaatgcttaacccattcaagaattcattcgttttattacaattgtatattacatattttcaaaaattcaatattttgtaccaaaatctggtgagaacataaaaacagagatatatgttttctcttgacaaaaaaaaaacagagagatattgtagttttcttaatagagccagcaatggtcaaatatatcatgtgaaatagtttctaaaatacatcatccttttcttcttaattaataaaatagtcaaataaaaaatcgtctccaatctttttctctctctggatttgccaataaattggggataaccagctaccaaactcattcacacaaagtcataacagtcgtttaaagtctgatccttttcatttttctttagtgtgtgaaaagagaaatacagttatggcggagatctcgggaaacggtggtgatgctagagacggagctgtggtggtcaatctcaaggaagaagacgaacaacaacaacaacaacaagctattcataaacccttgaagaaacaagactctctcctctctatctctgtccctttcttacaaaaggttttttacttttgtctttactcctgtaactctcaatctccaaaacctctttagttttgaagaagaaaaaatatgtcttacaaatctttagttttgctctgttttttaaattgtcaaattgctctgttttcagttgatggcggaggttttgggaacatacttcttgatattcgccggttgtgccgcggtggctgtaaacacacaacatgacaaagccgtgactcttccagggatcgccatcgtttggggacttaccgtcatggtccttgtttactctctcggtcacatctccggtgctcatttcaatccggccgtcacaatcgcattcgcttcttgcggccgtttccctcttaaacaggtctatactctatatccctatataaattataaactataaggattgatcaagtgttgcatttaagtatgatttttgagtttgataaaccaacattagacattattgtctttgtgtttgataggtttagtttaaccgtcgtttgattctttttgcacgaaactataggttataataaaagttataatgttttttaataattctttattggattttaaagaagttgcatcttttaagtttttcttgtgttgtatagtgtatactgtatacaacctttaaatcatttatatctttcactaatgactttattttttattagaattctttcagtaatgaatttgtacgatagacgtatttatgagcatatgcgagtcatgagtgattgagtgtagataatttcaaatgtatgcgtctacgactctacggtgatatatgagtatagccggaaaactagggggaatttgttttttgtttaactatttgttaaaaagttaaatgtatttttgttagtttccaaattgaaaattttaaaagtgtgtgtttaccatgtaacatttgtccgtatatataacttctccacacaaacaaagtcaaacaaaattgtgttatataaacgtcaaaatcttcacaatcttccaaaattgggtccctagttaatatgatatcgcatatcaaataattggtcactaaattttatttcttatatttttgtaggttccggcttatgtgatatcacaagtgatcggatcaacgctagcggcggcgactttacggctcttgttcggacttgatcaagatgtttgtagtgggaaacacgatgtgttcgtcggaacattaccatctggatcgaatttgcagtcgtttgtgatcgagtttatcattactttctacctaatgttcgttatttctggcgttgccaccgataatagagcggttagtattcgaaatcttcttatgttgcacgaaatgatataataatcaaatttgatggatatatgttagggattctaactattgtaagcaatgttcgttttaacttcagctaatgtgttatcctttttatactctagatcggagaacttgctggactagcagtaggatcaacagtgctacttaacgtgataattgccgggtaatatactattattaattactatcattttcttttttatatagttttctttatcgacagaaaatttgaaaatgatatatggttatgtttatctttatattaggccggtatcgggagcatcgatgaatccaggacgaagtttaggacctgcaatggtctacagttgctacagaggactttggatctacatagtttctccaattgttggtgcagtttcgggtgcgtgggtttataacatggttcgatatactgataagccattacgagaaataactaaaagcggttcttttttaaagacagtgcgaaacggtagctctcgttaagaaaaagaaaaacatgactatgttgtactagtcatcggaggttaagttgtatcactaaagaagtaactggaatattttgtattaaagtgtttttaaatttggattaccgcaaatggataaacatttatggtatgtgacgaatatgtaactgatctataacgagtttggccatatctaattacgtgctatatggttgtattaactgctatattatatctttctctttttatgcgaaagataatgtcgtcatatttatggtgctactgtatcgttacacctttgaaatcattaatgcaattttggatagaaagatccttagtttacgcaaaaattgtcaaaagttgcaatttagaactcgtcaaacaaagcacaaaagccggtgtcgcaaacattgccaagtgtgcaatactttgtccaagagcttaaaatccggccacgtgtcattttgtcgccattgttcgccacatcatcaatccgaatgacgtgtcacgcatggaatcattcacgtcatgctttcctcatgcaaacatcactcctctcttataagaccaaaagcaaaacactcgaaccaaactaaagaacaagaaaaaagggtgttgttacgatg

SEQ ID NO: 18830 - DNA, 3003 bp, Unknown; identical to SEQ ID NO: 18829
  misc_feature (1)..( 3003): 2750-1469P.txt file - cDNA_ID_1819481; gDNA_ID_2926171; Annot_ID_140139

SEQ ID NO: 18831 - DNA, 3000 bp, Unknown; identical to SEQ ID NO: 8477
  misc_feature (1)..( 3000): 2750-1469P.txt file - cDNA_ID_1819489; gDNA_ID_1971812; Annot_ID_58125

SEQ ID NO: 18832 - DNA, 3000 bp, Unknown; identical to SEQ ID NO: 8477
  misc_feature (1)..( 3000): 2750-1469P.txt file - cDNA_ID_1819489; gDNA_ID_1971812; Annot_ID_175776

SEQ ID NO: 18833 - DNA, 3000 bp, Unknown; identical to SEQ ID NO: 8477
  misc_feature (1)..( 3000): 2750-1469P.txt file - cDNA_ID_1819489; gDNA_ID_2926171; Annot_ID_140135

SEQ ID NO: 18834 - DNA, 3000 bp, Unknown; identical to SEQ ID NO: 8477
  misc_feature (1)..( 3000): 2750-1469P.txt file - cDNA_ID_1819489; gDNA_ID_2926171; Annot_ID_199520

SEQ ID NO: 18835 - DNA, 3000 bp, Unknown; identical to SEQ ID NO: 3113
  misc_feature (1)..( 3000): 2750-1469P.txt file - cDNA_ID_1819510; gDNA_ID_2214706; Annot_ID_136971

SEQ ID NO: 18836 - DNA, 3000 bp, Unknown; identical to SEQ ID NO: 3113
  misc_feature (1)..( 3000): 2750-1469P.txt file - cDNA_ID_1819510; gDNA_ID_1620626; Annot_ID_47146

SEQ ID NO: 18837 - DNA, 3003 bp, Unknown
  misc_feature (1)..( 3003): 2750-1469P.txt file - cDNA_ID_1819514; gDNA_ID_2214706; Annot_ID_136970
tatacatgtttctattaacttttcatttcctcaccctaacatcttgactgctaaaaaatgtcaataaaaatacaaaaatgttttctctctttcgtcttcataaacatttagtcattcttattttcccttttttttagtttgatttgttacaagaataacatttttatttttctgtgaatataatgaatacaattttattatattttaagttattttagtttgacggagtataaagtagtatacaaagtcgacgtacgacgataatgtacaaaacaaaagaaaaaatgagagctaactacaccaattatatgtatcgtatatccacgtataccaaccaacatatatatgacatggttaagcgacaacattttttacacatgtaactattataaatttttagtttatagcgtttacaaagacattatcataaaatttgattattacatgactgcataatttaacaaacatagaaccttattaaaatgcatgttccagtgcaatacatgtggattgatgttgaatgactctaaaagatattgttatgatacaacagtatctcaaaaaagattcagaccaaatattttattgttttaattattattattatttttttttttctataaatccgatatttccccaaaagccaaaagggtgatgtgagaccgttatacttgacatattttatatattttatttatataacctattttggatcgtttccaactataagatatggggttgataatttttgattgtacatgaagattttgtgtcctttgtattgtattctatagtcgaacttggaccacgtgtaataacaccggagcacgcattttataagctttatgctagtatccatacgattaaattatagttcatcatcatttgttatactatatattgatgtcacataataattcagatttaaatatggtaatgtgtttgtgaactatccaaaaaatttcaaagaaatataccaaaaatttaatagttaaaatctgaaaacaaagcatgtaatttaagctacaattgttattacatattgtaagggctacgcaattagttcttgacagttggttgactacataacacttgctgaaacctacgttttagcgttggatatctctctatatatttttggtcaatgtcgttggagattgaatcctagattaaatcctacaagaagaagaaagcttcatgagaagaagaagatgaagaaaagagaagaagccaagcttggaagaagagaagaagaagatgtcgtgaccaaaggaggaagaagagaataagaagttgtcgtgaccactgaccaaaggaggaagaagagtcaacgacacaaatccaacataagaacggagttggatttgtgttttgtaataaggccattgggccgtaagtgaattatagccccacaagtgttagtgggtttggttggttaagtttaagctaaataagttaaggtggatataacaaacatagttgcaccaatgcatctcagctcacctggtctaagcaacggtttcaagaagttgctcgcttctattgctccacgcctccacaagtagctcctacacaagagtaataactcattagtatagagacacaagattatacaagaaatacttagtagacataattgttcatctccagtgttaatcctcaataattgttcgatgcagtattcttctaatgagatgaaaaatcatttttatagagttaccacccatcaaaaccatttatacaaaacgttttacttggtcagagtaaaaaaatgcatacaagtattgtgtataaataaaaaggtcatctattaatgtataatctgaatcaaaaaaagaaagagcacctgcaccaataacaatgtgaatctcatcaatgaacaagattgtttgcccattcgaagcatatacttccttcaatattgttttaaaccttgtctcaaaatcttctccataattagcaccaacaaggagtgaacccacgtcaagagatttcagctccatgataaatagcgaaaccaagcaaagcatgttaaatcttcctctagcctctttgaggggaaaaggtaaataaacttaaatatttaaaaatatctaagtttatataataacaatattgggtaagtgaaaagtaattgtcattatttttgacacttatttttataagttagaagtaattataattttttcaaacaaaaaagtaagttttttgtgtgtgaaaaaataatgatattgagaaggtaatttaattagaggtgatattttataccttaagaagtgtattaaagttaataataaccataagttaaaattggtaagctaaatgttagaaatcatttgtgttgtctgaattttcaagtttcgttcgtttcggattactttcttcttctgcaaaaacagatcccaaccatttcaaaggttcgtcttctccttctcttccacactcttctctgcttcactttttactctatcttcgactagtaatatcgctttcgacttctcaaattacttctcaagttactatttttctcttcctttctttcaaattttcgttacaaactgagtttgaaactgtttgggttttgtaaagttttgatcttttcatgatattgcggtaagagattgttaattcgacttctgggtactcacatttcgatgctcaattgtttattcttatgggtaattttggctagggttttttccaatttctctctcgttctctttcacaaggttagtcgatcttgctcatgtggtatagagtttgatgaatcgagttgtttagtagctattgtacgaactatctcttgatatagttgtaaaggttttagattgggaacaaaaaatttcactgtgatgtttgtttaggtagtagagttcaattgtgtgaaactctaatttcatagtttgcttaagtctcagaactagcactgagtctattgttatatgtgttgtttatgtaagtttgttgttattgatgggagatatgttttgtgtgcagaaaatg

SEQ ID NO: 18838 - DNA, 3003 bp, Unknown; identical to SEQ ID NO: 18837
  misc_feature (1)..( 3003): 2750-1469P.txt file - cDNA_ID_1819514; gDNA_ID_1620626; Annot_ID_47145

SEQ ID NO: 18839 - DNA, 3003 bp, Unknown; identical to SEQ ID NO: 18837
  misc_feature (1)..( 3003): 2750-1469P.txt file - cDNA_ID_1819514; gDNA_ID_2214706; Annot_ID_189848

SEQ ID NO: 18840 - DNA, 3000 bp, Unknown; identical to SEQ ID NO: 3111
  misc_feature (1)..( 3000): 2750-1469P.txt file - cDNA_ID_1819518; gDNA_ID_2214706; Annot_ID_136969

SEQ ID NO: 18841 - DNA, 3000 bp, Unknown; identical to SEQ ID NO: 3111
  misc_feature (1)..( 3000): 2750-1469P.txt file - cDNA_ID_1819518; gDNA_ID_1620626; Annot_ID_47144

SEQ ID NO: 18842 - DNA, 3000 bp, Unknown; identical to SEQ ID NO: 3111
  misc_feature (1)..( 3000): 2750-1469P.txt file - cDNA_ID_1819518; gDNA_ID_2214706; Annot_ID_189846

SEQ ID NO: 18843 - DNA, 3000 bp, Unknown; identical to SEQ ID NO: 3111
  misc_feature (1)..( 3000): 2750-1469P.txt file - cDNA_ID_1819518; gDNA_ID_1620626; Annot_ID_162481

SEQ ID NO: 18844 - DNA, 3000 bp, Unknown; identical to SEQ ID NO: 3109
  misc_feature (1)..( 3000): 2750-1469P.txt file - cDNA_ID_1819530; gDNA_ID_2214706; Annot_ID_136966

SEQ ID NO: 18845 - DNA, 3000 bp, Unknown; identical to SEQ ID NO: 3109
  misc_feature (1)..( 3000): 2750-1469P.txt file - cDNA_ID_1819530; gDNA_ID_1620626; Annot_ID_47141

SEQ ID NO: 18846 - DNA, 3000 bp, Unknown; identical to SEQ ID NO: 3109
  misc_feature (1)..( 3000): 2750-1469P.txt file - cDNA_ID_1819530; gDNA_ID_2214706; Annot_ID_189843

SEQ ID NO: 18847 - DNA, 3000 bp, Unknown; identical to SEQ ID NO: 3109
  misc_feature (1)..( 3000): 2750-1469P.txt file - cDNA_ID_1819530; gDNA_ID_1620626; Annot_ID_162478

SEQ ID NO: 18848 - DNA, 3000 bp, Unknown; identical to SEQ ID NO: 3105
  misc_feature (1)..( 3000): 2750-1469P.txt file - cDNA_ID_1819545; gDNA_ID_1620626; Annot_ID_47133

SEQ ID NO: 18849 - DNA, 3000 bp, Unknown; identical to SEQ ID NO: 3131
  misc_feature (1)..( 3000): 2750-1469P.txt file - cDNA_ID_1819565; gDNA_ID_1620627; Annot_ID_47172

SEQ ID NO: 18850 - DNA, 3000 bp, Unknown; identical to SEQ ID NO: 3131
  misc_feature (1)..( 3000): 2750-1469P.txt file - cDNA_ID_1819565; gDNA_ID_1620627; Annot_ID_162528

SEQ ID NO: 18851 - DNA, 3000 bp, Unknown; identical to SEQ ID NO: 3131
  misc_feature (1)..( 3000): 2750-1469P.txt file - cDNA_ID_1819565; gDNA_ID_2926186; Annot_ID_140816

SEQ ID NO: 18852 - DNA, 3000 bp, Unknown; identical to SEQ ID NO: 3131
  misc_feature (1)..( 3000): 2750-1469P.txt file - cDNA_ID_1819565; gDNA_ID_2926186; Annot_ID_200657

SEQ ID NO: 18853 - DNA, 3003 bp, Unknown; identical to SEQ ID NO: 15859
  misc_feature (1)..( 3003): 2750-1469P.txt file - cDNA_ID_1819595; gDNA_ID_1620627; Annot_ID_47157

SEQ ID NO: 18854 - DNA, 3003 bp, Unknown; identical to SEQ ID NO: 15859
  misc_feature (1)..( 3003): 2750-1469P.txt file - cDNA_ID_1819595; gDNA_ID_1620627; Annot_ID_162506

SEQ ID NO: 18855 - DNA, 3003 bp, Unknown; identical to SEQ ID NO: 15859
  misc_feature (1)..( 3003): 2750-1469P.txt file - cDNA_ID_1819595; gDNA_ID_2926186; Annot_ID_140802

SEQ ID NO: 18856 - DNA, 3003 bp, Unknown; identical to SEQ ID NO: 15859
  misc_feature (1)..( 3003): 2750-1469P.txt file - cDNA_ID_1819595; gDNA_ID_2926186; Annot_ID_200638

SEQ ID NO: 18857 - DNA, 3000 bp, Unknown; identical to SEQ ID NO: 3126
  misc_feature (1)..( 3000): 2750-1469P.txt file - cDNA_ID_1819601; gDNA_ID_1620627; Annot_ID_47155

SEQ ID NO: 18858 - DNA, 3000 bp, Unknown; identical to SEQ ID NO: 3126
  misc_feature (1)..( 3000): 2750-1469P.txt file - cDNA_ID_1819601; gDNA_ID_1620681; Annot_ID_164451

SEQ ID NO: 18859 - DNA, 3000 bp, Unknown; identical to SEQ ID NO: 3126
  misc_feature (1)..( 3000): 2750-1469P.txt file - cDNA_ID_1819601; gDNA_ID_1620627; Annot_ID_162504

SEQ ID NO: 18860 - DNA, 3000 bp, Unknown; identical to SEQ ID NO: 3126
  misc_feature (1)..( 3000): 2750-1469P.txt file - cDNA_ID_1819601; gDNA_ID_2926186; Annot_ID_140800

SEQ ID NO: 18861 - DNA, 3000 bp, Unknown; identical to SEQ ID NO: 3126
  misc_feature (1)..( 3000): 2750-1469P.txt file - cDNA_ID_1819601; gDNA_ID_2926186; Annot_ID_200636

SEQ ID NO: 18862 - DNA, 3003 bp, Unknown
  misc_feature (1)..( 3003): 2750-1469P.txt file - cDNA_ID_1819608; gDNA_ID_1620627; Annot_ID_47153
aaccgagcaatttaggatgggatcaaacctcgtaaatggggcaggttcgctcatagttatggacatggccgtagaaagcaaggtctactttgtacttctgccacagtttttgtaggctttctcttcccataggctcttcaaaggttccttctttgccataccaatcattggtggaataaccaaggacacgatgagctataaaaatgagccaaggctgagtctttctatcaacagtggcaagacaattctcaatgaatttgtattgctccgtgccttctctccaatcgtgttcactgtctgctacacagaagcgaaacattccataatctgttttgtacctgcccattcaaccgaaatttgtaagataccgttctgaaacttgcaagaaaatgtcaatggtttaactaactttaccagaatttagctctgttctcagcaggaaagtagaacatggtctctgcaggaacaccacactctcctccggagtctgtaccggcataaaaagatccagtgtctggccaatcacgctcatggttgccactgcagtgaagaaaaggataacttaaagcactgcaagagtagagagtagaagcacaatgttgtagattttcttgttgactaacctggcgatcatgtagggtacagtagaagcaatgggctggacttgagctgtgaactgatcccactgggagagatacccattggaataagtgagatctccaatgtggaaaacaatgtcaatgtccttcaagtccttgatgacttggtctgttgtgttgagggaaccaggctggtaatcattgtactcattcgagccatctcgctcaccctgaaacatatttcaatcaaggaaaatcattttagatattagtctgagagcgcatggagatcataatggcctaaaagagacgataccatacctttcccatgtcaccaaatattatgacccgttgtttcgagtcttgtccaggataaggagaggacacaaaggtgtaattcttgctccaaattgtggaaccattgaccaagtcatggcctagcctgtatatgtatctgtaaaccaaaggattgagagttacatgtatgaaactatattagtgctcctggattagacgataaagaagcaaactaaagatttcatactcgcggtttggccaaagttctttcaagaaagaagtatggaagaaaccaggatcacgccaaccaacgccgcgagcaggattacctgtgtaaacatagcatgcatccacaaatcaaatctctagaatgatccagatgagtagtttcagatattccaggactgctggctcagagatcacagcgaaacaggacataccacacatgctgtttctgttaaaggtcaatgttccagctggtgatcttctagctggaagtccctttgcactccattcaatgaaaggaacagcctcatctatgttgtacccactagtccatgtcacggtcatctatcaaagatagaaaaataagcaagttttagctaaagatcccaaatattgtatagctgcttcagaagtctcaaggccattgagtggaaaaacttacttcgtcccaattcttccctaatgcaagacgcggatagacaggtgctttaggattgaagaaagctacaggattcgaaaccccgagaaggtgtggctgtgatattcaaaagatcaataattaagtccacttgatatacaaaatactaaactgagaaaaactatagttataacctacctcttgaactccattggaaaacagtgcaaaggagacatcagctctctgatttataatctggaacttgagagtcacattcccggacttcatgtaatctggatgagaattacaatacatgtactgccaaatagaaattaaaaggggaatgttacaccgggacttaaaaaaaaaaaaaaaatcactggtaaatatgtaataaaccaaaccttgatgggagaagagcatatgtaaggagttttctctttgccaccacttgttggccaacagttacccgaactaacaaacaacaaagacaagttaataatgcacaaatggcacgttcacaagttaacaaacacagatgcagattagaaaaaatactcgaattttgctggagagaaaactcctatccaatcatctgaagtgggcttggggttggagatagcaagatttacccattctgtatcttcaccctgtaagatcaaagtcatgacatcaataacatatctatttaagtttggtttttgtgataattacgtgaaatcaagaaaacatattcaagtctatcatacaatttttttgacatttaaaaaaaccatctcttaagagttaatatatatctgtcaaacaagaatctgacaagaacaataatatgatgaaagaatttgttattggaacctgggaaccaagaacttgaggcgaagcgtgaagtttgacagaactatctaaagcaagacttgtttcgtaaacattaatttgagcaagtgcttgatctccacgaccattggcatgatccaaacataagctcgagctgaacagtgcgagtaaacacagaagcacacctaaaactctagccatatttttttttgtttttcctttgttgtgactgagaaacaaaaccagaaaggtatatatatatatattataatcaggatatatctaggaatcccaaaattgattcatgtctatcgaattaaacaaaatcaaatattttctttcaccgtcaaatctttagtcaggaatattctaacagtttctttttaatattctaacagttttttcttaatgatagttcatactgttttaaaaacaaataatgataacggaaaaaacggattttcgttttattcagacttatgtacattaggctgatccgggtcggaccggctttgaaccggaaattaataaagcttgattgttaaatttggcaaccgtggcttcggtttcaatcgcgctgtaatcgcatcactaattcgggtcactttggaaagaaagaagaagaagatg

SEQ ID NO: 18863 - DNA, 3003 bp, Unknown; identical to SEQ ID NO: 18862
  misc_feature (1)..( 3003): 2750-1469P.txt file - cDNA_ID_1819608; gDNA_ID_2926186; Annot_ID_140798

SEQ ID NO: 18864 - DNA, 1154 bp, Unknown
  misc_feature (1)..( 1154): 2750-1469P.txt file - cDNA_ID_1819616; gDNA_ID_1620627; Annot_ID_47151
gaattcttgtgatcttgaacgagtatgaactgagttctccgtctaagaatttgaagactgatagaaaaatgtttatgcttggatactgaaaattcataagtagctcaattttgtcaggatattgcatccacaaaagcattagaaaaataaagacaggaagatccaatagatgcttaattcacctgtgcagactgtgatagcaatcgacaccacgggttctcaaacctactgtgtacatatgtccatctttcaaaacttgccttctcttgcaaaatcgctgttgagtatacaatccaaaccagaaaacaaagacgaattgaaaaaacaatctcaaaaggaatttaaattgggtccaagagcataaagatcgaacaagaataagagcaacggaccttgcgcaacaggtggtggttgcgacgtcgtagcagccgccgcagaggcatcaatctgggagtctccagaggttggagtagtgtcgcctaacacgcatttactagaatccgaaggaggtagtgtatcgccgccatcttccaactgaaacgaaaagtgaaatcgccaaaattgttcaaaccagaagctccagatggcactcgaaagatggataagaaataatgtctccgatcagaaaccttttggcgtttggatggagatttatctgcgggagaagatggagatctcttgccgctgcttccgtcgggcgggttattgttctcgccggaggtagaatcactccgtcccggtgacaccatgactcttctttcttccgattatttcaagagcaagatttgcgattctttgagagttgaagaatcaatgcgagagatgaattttgagagaacgtaacaagaaatgagagagcttatgtaaattggtgtatatataggcctttctcggtgggaaaaaattatagagaaactttgattaatgaaccatacctaaaccaaaccgtttagtattattaggaatcgaattttgtacttaacaaccaaaaccaaaccgatccggttcagttttacccacacctggttttaattttgaaccgcacaaccatccaaattccaaagctagagtctctcagagcgtttttaggtcgaaccagtccttaagggtccgaccaatagaacgtagttgctcgaactcttcttccaaaaatg

SEQ ID NO: 18865 - DNA, 3003 bp, Unknown
  misc_feature (1)..( 3003): 2750-1469P.txt file - cDNA_ID_1819616; gDNA_ID_2926186; Annot_ID_140796
agtatccgcaaaccagaaatccaagaagattgaagtagaatcttctgttgcaaacaatgtaatgggggcatgcctttcttcaaagtatgattcactgaacgaggtaaagtctccggctccaactgtagctgtgagtctgaatcagaagaagcagcaggagaaaggctagaagcaactcctccaccggctgacaaatccgagcttttcccttgatcaatgagctcaatactctgattgggaagcttacatgacttattagaagcaagtccatccctcagtgactcaacttccttagcagtcagagcctgcaggaaattgcagaacggatgcaccaggaattacttacagtaatctcatacccgtaatcaggaaaatagacaaataagtgtagatgcaaaaactttcctcttgtaaactaacaagcatataaaaaaaaaacagcttatatttaagtaacacatacaatatcttacccccaaaattggatagctgtcaaatattagcaatttcgcctcgaggtcacgggcaagtgctttagctaacgtctcttggtatatttcagaccctgaaacaactccaaccaaaaagcgaaaatgatgtttccggctaaagaagtacaggaaccacacaagcaagataccacaaacctgcgggaccagaaagcaatatccttggattcataggggtcatgtcggagacaaattggacatattcttttttcttcagatgtatatatgaagcatataataaggcagcctttgtatattcactgcaaaaataaagccttagtcagcatacacaaaacagagaacaaatgcaaagcgcctaaactaccaaagacaagaaagcagaattagacctcaaaattctatgatgatataaacagattcttaatggaagattcacatgcacatatcttaacactgcatgaatacctgaaaaaatatatctgacttggtcccatacctcaaataatagggaaaatttttgaatgaaacttccatgttttcgcctctaacaaaaccagcttgaatggcttctctgaatattgcagattgcagaccattgcctgatgttgaagcttgttgtgaattacttgtcacctcgtttttctcatccaatatctgataccagctttgttaatataatgcaaaatgctgttgatgacgccagggtacaagagaaacatagagtatttacctccattttggaatcttggttgttaacagaaaaaattccttccatgccgtcaacttggaccatcgactctggcgcttggtggctcttactggatgcatggatcaatctttcaagcgatgatataattgaatgacctgtcattctctctaggtctagaaactttcctgcaggaacctgaactgaaccaggttttgctgcaactataggcatttgctgatatacctggatagaaattaagggggaaacttatgtatattcctatggagatattcatctcaaaactgaaggaaaatttcttcttgcatataataaaaaaagtggaatcacatgaggatacgaaagcaatcctgcttaaaccaataaccacttcgtcaccagagtttagcacatggttgatattcccctcggcataatttccgtttatccacatatgtccattgtttcccatggtctctagaaccgctaaaacattgcctttgcgctgaacatgtgcacaaacaatgagaatacatactgaataaggagttcacatatctccacaaacaactcaaaagtagaaaaaatcatacgcacaggaattgcataggccagtttaaaatccagcagtgctaatgtttgagcgtaacattcaaggaaacaaaaatacctgaattcttgtgatcttgaacgagtatgaactgagttctccgtctaagaatttgaagactgatagaaaaatgtttatgcttggatactgaaaattcataagtagctcaattttgtcaggatattgcatccacaaaagcattagaaaaataaagacaggaagatccaatagatgcttaattcacctgtgcagactgtgatagcaatcgacaccacgggttctcaaacctactgtgtacatatgtccatctttcaaaacttgccttctcttgcaaaatcgctgttgagtatacaatccaaaccagaaaacaaagacgaattgaaaaaacaatctcaaaaggaatttaaattgggtccaagagcataaagatcgaacaagaataagagcaacggaccttgcgcaacaggtggtggttgcgacgtcgtagcagccgccgcagaggcatcaatctgggagtctccagaggttggagtagtgtcgcctaacacgcatttactagaatccgaaggaggtagtgtatcgccgccatcttccaactgaaacgaaaagtgaaatcgccaaaattgttcaaaccagaagctccagatggcactcgaaagatggataagaaataatgtctccgatcagaaaccttttggcgtttggatggagatttatctgcgggagaagatggagatctcttgccgctgcttccgtcgggcgggttattgttctcgccggaggtagaatcactccgtcccggtgacaccattgactcttctttcttccgattatttcaagagcaagatttgcgattctttgagagttgaagaatcaatgcgagagatgaattttgagagaacgtaacaagaaatgagagagcttatgtaaattggtgtatatataggcctttctcggtgggaaaaaattatagagaaactttgattaatgaaccatacctaaaccaaaccgtttagtattattaggaatcgaattttgtacttaacaaccaaaaccaaaccgatccggttcagttttacccacacctggttttaattttgaaccgcacaaccatccaaattccaaagctagagtctctcagagcgtttttaggtcgaaccagtccttaagggtccgaccaatagaacgtagttgctcgaactcttcttccaaaaatg

SEQ ID NO: 18866 - DNA, 3003 bp, Unknown
  misc_feature (1)..( 3003): 2750-1469P.txt file - cDNA_ID_1819623; gDNA_ID_1620628; Annot_ID_47197
gtgagaccttatggaccaaacctgatacattttctgcttgaactgattagattggatattaactgtaatccacctttaacagatgatgatgaaggaccagtatggaaactatgtggtgcagaagatattcgagacatgtacggctgatcagcgtttaacattgttcagccgagtgagaatgcatgcatctgcattgaagaaatacacatatgggaaacatattgttagtcgtttggaacagccctctattgaaggtatgaaattccccaatgtaagtcaagttcaaaagtgaggtgaataatcacaatctttaggaacaaaagggctttgctgttataccatataagctgaaacagggcgaagtacacaatcaaatatattttctatgctaaaaaatggtcggtgaatcgctcaagaatgacatgtcacatgtgcatatagaaatgtgtggtagcacaagactgaatagaataagatgggattggtagcacaagactgaatagaataagatgaggattggtatatggatcaggaagagttacacattgtgtttgttgtttctgcagaaaaccaagaattgaggagatgagtggctcttctgatttcaagacagtgggctgactcagattcactcaatacaattcgctttttcatgaaagctggatattcattgggaaggtcttagatgattgtgaaggacatcgatattgttgtttacttggaattttatcatagccgttgtgatgattgtgtggcatgttctgtaaatattcataactgtatcagtagtttacttcagatctgtaactggtttgtggaatttcacatggtattcgaaactttctagatactagagaatattattattgaagccaaacattacatgctaatcctgaaatagcctcctcttcctcaaatttcatgagctacagattcttatcacatttcaacactgttttgagactttctttcattcatctgacatgaggagccaaagtataggatcgaaagagaaacttgtcattactcacgaaatataattgaaagcagtgtagcatatcacacttgacaatggaagaaacaccccacacaaaaatggaaagctcaaaccaacacctccaaaatactatttcaatcttaaccaaagagatcgaatccgaagtctccttcttcctcttctgattcttctttcttcttctcatcttccttaggggcagctgcagcttcacccgcaccacctccacttgaggcagctcctccagcagagaatcctccaccaccaccaccaccaacaattacctacgccacaagaaattgattccaattgataaaaattacaatgcaaaacaggaattatacacaaatattgatttgtactagtttccggagccatgtaaactaaagtcacctactaaaacagagaaggcaaccaaaaacaaattgagtgatttagctattacaaagctgtaacctttaggtatcattgttaacctataaaacaagctacattgacgcaaaatcacatttgatgcaatgataagagaactatagtgagccatgacacttgtatcactgatcaacgaccataattactgtgaatgaatcattcatctgaaaatgcaagctctgattctcacacagtattgccaatttcaaagatgcacgatctcaaactgtaagcttgttcgagcaagagagacttatacctggaatacggcggaggtaggggagacaagagaaaacgaagactgaacgccaccggaggaatcagcggagagagatacctgaacgagcttacgctggagctcgtaggtagaagaagctgaagattcaagttctccttcgtgttgcttcgcgctccacgcgccgcctccattcttgcatacgaatgtgaatactcccatcttcttcaatgtctgctaaaatcgatggcgatagtgagagatttctggaaaaagtgacgatcgagagtggttttgtttttatatacgatgatgaacgaaagctcaaaaagaagttaagaaccctagttttttggaggtctctgagtaaaagactgttttacccatagtggacttataggtcttaaatgggccacttttgagagtaatgaatatatataggcctagagtgaatagcaacaacccaccaaggttctttcacttctttgaaaaaccaaaaaagcaaagatcaacaaaatttatcagattctacgagagtcatttcctaacacatgagatgatgagattattagagtatcacaactctcaactatgtttttccataaactatgcatcgcaccattcaccacatgatattgtaactcttaagtctaagccatgaaatcaacattgaagtaaaagaactcacatagtaaattggttttctattggtttatattttaacaaaattatactgtactcatgtcatctttatgtcaccaaatcacaaactaattttctacttttaaaacaaaacatctaccaattccaccacatatcctaaaaactgactcaaatctctcaaaatctaaaatttcctaaattccacaaaatcatccataatctttaatcctccttagttatgatatcaaaaaaccattttattttaagtatctaatttccttgccataaattttattctctagtttagctaaacttaattggaagtaaagtttattgttgctgatatataataaaatattttcatgtttaaaaatctaaatatagttgaatggactctttaacaagaaagtaaatattggcgtctataaggtcaagagatgtggcgtaatgactacttttgagcaaatcagtggacaaattaagactttccaatctttcattggtcaagtctaaatataaatgattggatttctaagtttcatttcctgtttttaggctcactcgtggactttttttaatttctttcctttgccatatttataaaataaaagagagagaaagaattttcaataattttcaacaagcaaagttcatgatg

SEQ ID NO: 18867 - DNA, 3003 bp, Unknown; identical to SEQ ID NO: 18866
  misc_feature (1)..( 3003): 2750-1469P.txt file - cDNA_ID_1819623; gDNA_ID_2926188; Annot_ID_140876

SEQ ID NO: 18868 - DNA, 3003 bp, Unknown
  misc_feature (1)..( 3003): 2750-1469P.txt file - cDNA_ID_1819626; gDNA_ID_1620628; Annot_ID_47195
caagtcttccttctccagtgattgaattcgaaaacaagagagtacttaattaattccagcagtctattttctccaataatttcttgttagtattaaactagtgatataaaagttcccaaagaatctaaattttgttttggattggagttggcttcacgaccttttttttttttttaagttttagtattcattttatatgaatggaatggggcaatggaaagaaaaatagtccaagtgggtctcaaaaataaacgaatttagctctgtcaatcgcacttgtctcttcatgtcattcgccggtttgctccttccacgacggcggacgatctgcttttcgacattactgtcttttaattttcttttagttgcctatttttcgttgttgttgtccattacgccattattacttttactaaacaaataatattcaaaaatataacaactaaaaaggccaattgtttttaatgacccctaaatttgagaaattaggaaactggccatttgaactttgaagcgcctagaaataatgagctgcctgggaggcagagctacattacacagtgcggctgggcatctttttctgaggttaatgggccaagtggtccggcccgtataggcccttaaccaaaaaaaagaagaaagaaagaatcgtacatggaagtttgaggtgtctcttagcatcatgagccatagtgtacaaatgcatcaaaagattagactaaaaaagagttgtacgaatagtgtgatataagcagaatattcgtctttgaaacatcttatcattgcccaatttggatatgattcggctagtgaaatatgggtttatgtttcatcgaatagtagacatttatcttatgaaaagtgcattagcataaacgaatatatggcttccttaagaattcgttgtatttgtatctgactaatggagatttctttgtgcaagtagagtattgtttcttttttgtgtgtgcgggcatgtacttgtaaatgacttgtggaaatttcattattcaagtacaaatacaaagaaatttccattgattaagatgttggatagtagtagctagttcttttttcccttcgaaaaaattaaattaaatggaagatagatacatagcatctgctcggatattagtatgttgaagcctcaaaagggcctaatccaaacatcgcaattcatagtaatttagagtatgaccaaagtcaaccaatataactatctaaagttatttcagtttttctaattttcacatctataaagtaggaaaatgatttggattagtataaaactagcaaaaaagaaaatttaaattgtagagtttgtacctataagtgtagaccattaaattttgttctgcatctgatcaaatctatacaagatcaatattaatcctatacgaactataaatcatgagaaaatcctcccggaaaaagtaatccaaaagaaagattatgaaaataggcacactgagcagtaatcaaaatctgttttatcagatgagaaattgttctaatataatggatcaagattaaactccacacgtctcaggttttagtcgacaccatttttctttctgattttggacaagagcaaatcagcaaaatgtgagtgagtttctatggttttgtcacaaaacttttgtgtgtgggctcgttggatacacaaacaaagtcaaaggttagaaatttattgagttttgggtatttccggttttagttatgagtcacatattctttcacaaaattcagacccacgtttttagcaattgaattcaactttttgagttttcgtctgttttactttctcaatataaatttttaactttgatactatatataaatttttaatataatatgtaaacttgttgtacatgtttcagttatacttagtgttttaacaaataaaatacactcagtcaatcaaaaatcaactgagtttctaatgttaaaggagtatttatttttgtaattcagttaacacttctaatcattttcatgaaaagctttaaacatatgcttttagttttcaacaaacatattacaaaagctattaagttaatcttcaaagttattaagctaataacttataaacgatattttacacataataatgttagttgtagttagactaaccatgacttaatcacccaaagagaaaacaattctagaagactagaaggaacatagaaaattaaaaaatgatatttaaagaaagaaagtaataaaaatttggtaaaccgataatgaataaaaagtcaaactccataaacttcgcggaaaaagaaaagcaccgtaatggtggaaatatttttgccattaccggaaaaaaatccaaacattttaaaaatcccactgacttagccaaagatggtcactttttctctctcccccttgtctctctgagcaccagaatctagggtttcttcacagtgaatctttttttttttttttgcttcctcctcaataatcgccttctcgtaagtcaatcactctccctctcgtcacttctgctccctatgttaaaaagttcattcatttctgcttttctagggtttttttttgggatttcaaagtctagatttttcttctctgttctacttacactctgtttcttctctctttatctctctgcctctcttttgggtttctctgtttttttcttttaatggaggaccatttacatggtcatgtatttctatctgcgtggagatatttcgtaggctttaaagttttgtgcttgtttgtttatatgttctttactttaaagttctactctgttagtactctgtctgcggaattagattactggtagggatgtaaaaaaccttgaggaaaatggtagagattctgattagaagctatatatcatttgcttattccatagtggattgatttagcttgtttaaattccagttctttttgtgatagtccctttcttatttcattggtgataaatttgtctttaggtacttgtgtgaaagctcccttctttgtggagaaatg

SEQ ID NO: 18869 - DNA, 3003 bp, Unknown; identical to SEQ ID NO: 18868
  misc_feature (1)..( 3003): 2750-1469P.txt file - cDNA_ID_1819626; gDNA_ID_1620628; Annot_ID_162572

SEQ ID NO: 18870 - DNA, 3003 bp, Unknown; identical to SEQ ID NO: 18868
  misc_feature (1)..( 3003): 2750-1469P.txt file - cDNA_ID_1819626; gDNA_ID_2926188; Annot_ID_140874

SEQ ID NO: 18871 - DNA, 3003 bp, Unknown; identical to SEQ ID NO: 18868
  misc_feature (1)..( 3003): 2750-1469P.txt file - cDNA_ID_1819626; gDNA_ID_2926188; Annot_ID_200782

SEQ ID NO: 18872 - DNA, 3003 bp, Unknown
  misc_feature (1)..( 3003): 2750-1469P.txt file - cDNA_ID_1819638; gDNA_ID_1620628; Annot_ID_47189
ttggttcttggtcctccacaatcatccacaggtgggtaccaagacatcaaatcttctgctgaccaggaaaatcttaatcctttcgaagactggacaaacctaagtgagaatgactttttctcggaggaagagatccggcaaacaagccatgacttgttagcgaatgaggacatgcaacagttgctcttcagcatgggaggtggcaaaggagaagatggttttactttcccatcgtttatgcagaatacaccaatgatgcagggatatgatgaggagggccgtgggcgatcaggaaaagcggttgttggatggctgaaggtaaaagctgctatgagatggggattcttcataaggaggaaagctgctgagaggagagcacagattgtggagcttcatgataataacgatggtaaatgaatagtcaggttgcttgctagtgtatagaagccatgtacagtttagggatgtataacaacatcacttaccgatatggatttgcttgatttagcttattagacaagaatataatcgatgaaccatgagaaatttgaagactaaccttcagcagcaagacaagaagctgattttctgtctctttaagtttcaactttcaacttgcagatatattagaagactgactaagtatgggcctataagcccattaatgtctctactgaacgcccaacttgtgaaaaacatgtctctcatctcaattttgttttcttttcacatcaacttaaagctacgagaaccaaacaagtgatgtttttggtcaaacaggacgaaacatgtatacataaaaagaggtaattatgttcgataaacataggtataaataaactataagaatttgttacaacattctttagatttgatattaactgctgtttacatttgaagaactcagttagttatttaatattttattttatagggtctagaaattacttgcgtgtggggactgatcaccgattctaaagaaggctcatcctttggataatagtatgaaacttgtcaataaagataagtcatcacaagtagggagatcttagctgtgttccatacgcccatctagaaaaagcgacgatggtcaagattaaataactgtatttgaaaaaccaaaaccgcgtcaccaactccaaagccattaccattagccatcactttccatcttccagctgttcgaatcaggacgcccctttttcttcaccaaacccatcggccgataacgaaccttcctctctgactgcctctgctcttactataaatacaaccaatacgacctcatccaaaacccaacaaacctaagctcaaagcccaccaaaaagaaaacaatcacttagcaatggcgatgatcagttactccaccattgtggttgctctgcttgcttcttttatgatttgctctgtttccgccaattttcaacgagacgtagagataacttggggagacggacgtggacagatcacaaacaacggcgatcttcttacactctctctcgacaaagcttcaggctcaggattccaatccaagaacgaatatttgttcggtaaaatcgacatgcagatcaaactcgttgccggaaactccgctggaactgtcaccgcttactatgtaagtccatttcctttagtgttttcttaaagttcacatattaagagtgattaggctaaatgttttttttgtttggttctacagttgaaatcccctggatctacatgggacgagattgactttgagttcttgggaaacctaagtggtgatccttacacacttcatactaatgtctttacgcaaggaaaaggcgatagagaacaacaattcaaactctggttcgatcccactagtgatttccacacttactctatcctctggaacccacaacgcatcatgtaagtccaaaattataaaaaataaatcacacttactcttttgaatctaatcttgtttgttttttctatctattcagattctccgtggatggaactcccataagagaattcaagaacatggaatctcaaggaactctgtttcctaagaaccagccaatgagaatgtactctagtctatggaacgctgaagaatgggccacaaggggtggtctcgtcaaaaccgactggtctaaagctcccttcactgcttcctaccgcggcttcaacgaagaagcttgcgtcgtgatcaacggccagtcttcatgccctaacgtgtcaggacaagggagtactggttcgtggttgtctcaggagctagactcgacgggtcaagaacagatgagatgggtacagaataactacatgatttacaattactgtacggacgctaaaaggttccctcaaggtcttccacgcgagtgcttagctgcgtaaagcttttaaacaaatgatccaaagccatgaaaagtaatactattctttgattcatcttataaagtatctgatgtttggttacatctgttttttatttattctatgtaagtatatttgtattcgaatattgatcaatcactttaccaaaataaaacatttgaacgtacgatcagaaaagtttaagtcatagacctcaacgaaaagtaaaaacgaaaaagttactgtacattattttctgagattcttattattgattcctaagcataattaagctataaattatatgctattagactattaaataacccaatgttttatcaataagtagaatccttcaactcttctaatttataaatggccttttgatctaaactaatgtctagcacaaaaaaagaataataataataattgttttggtgacacagaaataatattccacgaacctgtctatgttgaaccgtgtaaggtcgaataactcgatttaaatattattacatacaaagtttaagactaccacgtcgataatgtgcctccacgaaactctctttatataaccacttatttccacttcatctaaatccatcgacaaagacttacctctcacggcgagaaacaacagagaatcggggaaaaatg

SEQ ID NO: 18873 - DNA, 3003 bp, Unknown; identical to SEQ ID NO: 18872
  misc_feature (1)..( 3003): 2750-1469P.txt file - cDNA_ID_1819638; gDNA_ID_1620628; Annot_ID_162563

SEQ ID NO: 18874 - DNA, 3003 bp, Unknown; identical to SEQ ID NO: 18872
  misc_feature (1)..( 3003): 2750-1469P.txt file - cDNA_ID_1819638; gDNA_ID_2926188; Annot_ID_140868

SEQ ID NO: 18875 - DNA, 3003 bp, Unknown; identical to SEQ ID NO: 18872
  misc_feature (1)..( 3003): 2750-1469P.txt file - cDNA_ID_1819638; gDNA_ID_2926188; Annot_ID_200774

SEQ ID NO: 18876 - DNA, 3003 bp, Unknown
  misc_feature (1)..( 3003): 2750-1469P.txt file - cDNA_ID_1819642; gDNA_ID_1620628; Annot_ID_47188
actgtttttttcagttctgtattttctccgaaacgaattggaggtccagatggccggaacttgcagctgcatttcaagtctagattatctctccctttattcactggaggaagagtggaaggagagcaaggtgctactatccatgttgtattgattgatgcaaacacgggtcgtcctgtaacagttggaccagaagcttccctgaagcttgaggttgttgttcttgggggtgactttaacaatgaagatgatgaagattggacccaggaagagtttgaaagtcatgttgtaaaagagcgtgaaggaaagagacctttgcttactggagacttgtttgttgttctcaaggaaggggtaggcactttgggtgagattgttttcacggataattcgagttggattagaagtcgcaagttcaggcttggtttgagggtaccctctgggtactgtgatggcatacgtatacgtgaagcaaaaacagaagctttctctgttaaagatcacaggggcgaatgtatgtgttttcttttcttgttctctttttgccttgtgcttgccacttgttttcttctaaatcaacatgttgttggattggttatgtgtagtgtacaagaagcattatccacctgctttgaatgatgaggtgtggaggttagagaagattggtaaagatggggcgtttcataagaggctaaccgctgcaggaatagtcactgtggaaggctttctgagacaattggtcagagattctacaaaattacgggctgtgagtgcctcctattacgtcaagctcattgttgttggatgagaacattcattcaatgctcatgagtaattatgattatttgatatttgtctagattcttggaagtggcatgtcaaataagatgtgggatttgctagtggagcatgcaaaaacatgtgtcctaagcggtaagctttatatctactatactgaagattcaaggtctgttggcgttgtattcaataacatctacgagttaagtggcctcataactgaagaccaatacttatctgctgattcactctctgaaagccaaaaggtctatttcattctccttattttcttacacttatttgcctcatgatgtttggtatattgttctggaaaactctgatttacagatttttgttttggtgatgtgtgattatatagttcagttctgttatatatatgcggtagtgtaaattttttggtgtttaaatctgaaaggtatatgtggatggactggtgaagaaagcgtatgaaaattggaaccaggtcgtggagtatgaaggcgaatctcttttaaacttaaaccagcctgagaggttggatatttctcagactgatcctgtaacagctctggcaagttactctacggtgcctcttagtcagtttcctgaattcgctatagaaggttggcaaatcagtcccttgtaatattactaaatctcaaatcttatgttctttgttctgtatcataagtttatattctacttctatctttactgcagggtataatcaaacgctgacaacagccctacctcataacccacaagcacaatttgattttgttccccagcaagatcagtttatcggaatacagcaacctcaaactcaaaccaacatagagaatgaaaatgtaactaggttggttcttggtcctccacaatcatccacaggtgggtaccaagacatcaaatcttctgctgaccaggaaaatcttaatcctttcgaagactggacaaacctaagtgagaatgactttttctcggaggaagagatccggcaaacaagccatgacttgttagcgaatgaggacatgcaacagttgctcttcagcatgggaggtggcaaaggagaagatggttttactttcccatcgtttatgcagaatacaccaatgatgcagggatatgatgaggagggccgtgggcgatcaggaaaagcggttgttggatggctgaaggtaaaagctgctatgagatggggattcttcataaggaggaaagctgctgagaggagagcacagattgtggagcttcatgataataacgatggtaaatgaatagtcaggttgcttgctagtgtatagaagccatgtacagtttagggatgtataacaacatcacttaccgatatggatttgcttgatttagcttattagacaagaatataatcgatgaaccatgagaaatttgaagactaaccttcagcagcaagacaagaagctgattttctgtctctttaagtttcaactttcaacttgcagatatattagaagactgactaagtatgggcctataagcccattaatgtctctactgaacgcccaacttgtgaaaaacatgtctctcatctcaattttgttttcttttcacatcaacttaaagctacgagaaccaaacaagtgatgtttttggtcaaacaggacgaaacatgtatacataaaaagaggtaattatgttcgataaacataggtataaataaactataagaatttgttacaacattctttagatttgatattaactgctgtttacatttgaagaactcagttagttatttaatattttattttatagggtctagaaattacttgcgtgtggggactgatcaccgattctaaagaaggctcatcctttggataatagtatgaaacttgtcaataaagataagtcatcacaagtagggagatcttagctgtgttccatacgcccatctagaaaaagcgacgatggtcaagattaaataactgtatttgaaaaaccaaaaccgcgtcaccaactccaaagccattaccattagccatcactttccatcttccagctgttcgaatcaggacgcccctttttcttcaccaaacccatcggccgataacgaaccttcctctctgactgcctctgctcttactataaatacaaccaatacgacctcatccaaaacccaacaaacctaagctcaaagcccaccaaaaagaaaacaatcacttagcaatg

SEQ ID NO: 18877 - DNA, 3003 bp, Unknown; identical to SEQ ID NO: 18876
  misc_feature (1)..( 3003): 2750-1469P.txt file - cDNA_ID_1819642; gDNA_ID_1620628; Annot_ID_162562

SEQ ID NO: 18878 - DNA, 3003 bp, Unknown; identical to SEQ ID NO: 18876
  misc_feature (1)..( 3003): 2750-1469P.txt file - cDNA_ID_1819642; gDNA_ID_2926188; Annot_ID_140867

SEQ ID NO: 18879 - DNA, 3003 bp, Unknown; identical to SEQ ID NO: 18876
  misc_feature (1)..( 3003): 2750-1469P.txt file - cDNA_ID_1819642; gDNA_ID_2926188; Annot_ID_200773

SEQ ID NO: 18880 - DNA, 3003 bp, Unknown
  misc_feature (1)..( 3003): 2750-1469P.txt file - cDNA_ID_1819675; gDNA_ID_1620629; Annot_ID_47215
acacggtgtgtggtcttcaactcgtcattcaatctttggtcattttatcctcaaaagtaaaagaaacttttttttcgttgttgtttgagatggagtggtggaagaagaagagtttacgagccataattaaaagggagagattggtccgaggacacgagagaggtgggacattgctagaagagatcatcaaatcttgcaatggcaaagcaaatcccatcaaaatattctccgctgatcaaatcctagaagccaccgacactttcagcgaatccaatcgtgtttctgaactattcgatgagattccatacgattggtattattcaggtaaaaacaataaccatcatcatcatcataaactgttactcatcaagaaatggagatatagatttagtgagcataacggaggaaacttttgccgtgacatagccatctcatcgattgttagtggtcataaaaacttcatgcaattggttggatgttgtcttgaatctgaacatccagttttggtttatcgtgcatcaaagaaacctactagtttagatctgaaaatggttgtgtcatggagacaaagattgaaaatagcagaggagattgcaactgctttagcttatcttcacactgcgtttccaagacctttcgtatataggattctgcgtttagaagatatcttattggatgatgaagatggtgttgctaagttgtgtaacttctcctactgtgtctctattccacaaggagaaacatttgtgaagcttggtaatggttgtataggtggagattatgattacatggatgataattatttgattaatggtattgtctcggagaaaactgatgcgtttggatttggtatttttatgcaaaagcttctgatgggagaagagagatttcatgagctttgttatgatcggagtgacttgacaacttttgaaaacagaagaaagtttgcaaaatgcattgatgagattgtcgattcaaacatgttagagaaaataggtgatgttacagaagaagagcgttgtcgaatggaagctttcattgtcctctcggaaagatgcattggtcttagaggggaagttccaaaaatggttgaagttgccaaagaactaaaaagattccttagagattcttcttcttcttgtggtgaaacaagtttatagattacatatcacatacttgttatagattatataaatggtttaaaaacagattttcaaggtttaaaacagattagcaagtccaagtttcatttttattctgtataaatttagaaattttcttttcaagatgttgcatatttttgtaggcttgtagccacgtttcttcttgtttacaaatcgttgacttcactttttaatttgacataaaaaaaaaaaaaaactaaaacactccataaaattaattaaaatcagaacatatggtagcatcgtccagtaacattacagtatcatgctcagagcagtttgtgcatcgccattacattcaaaagtctctcacgttttcaccacatcccttgagctgcctctctcactttttttttttttttcagtggaatctttctgtttcaatttagattccaaatattgacaacgatttgtggtggattgtgacaatttaacagattctaattagttttctaatggctgattgaaatagtggcacaattcgtcaatttcaatactattggggagcgatattaaataaaaattattgtagtacaaaaaataaaagtttgaatattcaaaggaaaatgtagacttttttttttgttggtaggaaggagagaatgtagactttttaattttacggagtcgtcgctgaaatcctaaccaatgataaagcgctacgttcacgtgagtctgattttcaattattaacataaaaaataaaataaagatttctggaaaaagcgaacacattgctatcaaacggggctagattggtaaattacgtaattgtctgttagaggagtgcgtcacccaccacggtctttctcaagacaatgaaacgataactaaaataaaaaggagacacgtacttaccgttttgcccacagccgtcacaaatcagattatttactggatttgaattagagatggtactgatccggttaaactcggtttggtcagagttgaagtcttgacttggttttgtttgaagaaaagtgaaaattgatgagaaaaccaaaagaaaccggttaagaagatcaaaccgggaatgggcggcgaatggtcagaaggttaagaaaggtagttaaaaatgagagaatcgaagcagaggaggaagatgacgcacacgagagagacgaccacttccataatcaatcaacaattgctttccttcccggccagccacagatctccgtggccatctctctctttctaattattacaaagaagcattattattattattttaattatataattattgtataatcaaatctctctctgtaagtaataattatcgtataaatcctccccattgttgagttaattagttcttgtaaacccatgacgttttccgtcaaagctggtgagtttttgtctctctctcagcttccttatgtttgtttgaatacgttctgtctctttctcgtgattcttcttgtaacttgtttaatactagctcaaatgtctgatttgtaatcatgtaaataattcttctaagtttggatcctttaatgtatgaaaacccatgattcaatgttacttactcctcttcattaatgtcttcgcatttcaactttgaaaactccattgtttctcggtcaaagctcactgctttttgtttatttatgtttcaataattgctcaattatggttgttgcccaaccttgtgggtctatctttcctttatttcagctcagtttctttgacgattccgtaaattccattactttgtgtttcgtgagcatgtgggttttatgtaatcaaactgcttcctttttctgattctcaggcggtcaactttgaaaactaacaacttcggatttccatcatg

SEQ ID NO: 18881 - DNA, 3000 bp, Unknown; identical to SEQ ID NO: 3173
  misc_feature (1)..( 3000): 2750-1469P.txt file - cDNA_ID_1819687; gDNA_ID_1620629; Annot_ID_47212

SEQ ID NO: 18882 - DNA, 3000 bp, Unknown; identical to SEQ ID NO: 3168
  misc_feature (1)..( 3000): 2750-1469P.txt file - cDNA_ID_1819695; gDNA_ID_1620629; Annot_ID_47210

SEQ ID NO: 18883 - DNA, 3003 bp, Unknown
  misc_feature (1)..( 3003): 2750-1469P.txt file - cDNA_ID_1819727; gDNA_ID_1620629; Annot_ID_47200
tctccaaaatgactacgttgtgaattgtgtgagcacgagttctccaacgacaccgttttcaacaagtaattgtaggttttctcacactagagtttatttacgtctaatcatcaatatatcactgagagtgaaatcggaatcacaaaaatggcgtcgacgaagccattgattgtcgcagcgaagacgctccgaaaccggatccacttccgatctggatccacatctactggtccaagccggtgggcgacaccgggtcacgaagaacgacccaaaggatatttcatgaaccggactccgccgcctccaggacagtcgcgcaagtgggaagattgggagcttccatgttacatcacaagcttcctcacgattgtaatcctcggagtgggtctcaatgccaaacctgatctttcaatcgagacctgggctcaccagaaagctcttgagcgcctcgagatggagaagcttgcatctgccggagattcatctggttaatcccaaaacttgggagatatgattcaatggttgatctggtatgtatgtgttttgtttgtttttccggggatttgaggagattttcccatttatgatgatgatcacgaatactagtgacctagggtttcgttttgttcctcctctcctcttcgttagtgtcgataaatatgttcatgaaataagcgatctttaactcttgacgatggttttatgtaactcaccttaatttttgatcatgtttcaaagctctcttgcctccaatcctttgcttataacttctcatatttggttacttttttaatattcttggagaaagtgatgaaaagtttattgcttttgctgacattgtatgattcatttgcttagaggggtctggtttgtttctgttcgttatcttatgactctgtgtggtacagtcccaacttcacattagtaatagtcagaagttataagtatagttctggttgggaaaagtttctctcttttgttttctagatataaaaatgtcgagacggttcattaccatagcttaagattctaggttctagcactatatacagtcatggagttaggtaatgaacactagattcctgtttgttttgtttccaaacatattggggggatagaatgattgcttgagtgtgcttcccagtttataaccattatgttagtggctgcgtgtgccgaattgcaagccactgtactaataccaagtgaaagaacatgagagtgtttgatatcggttttcggggaggaggttttgatgaagtacttggatatgtcgagggagagggaggtgcaaacataattacactcaagtaggtagatgaagttttagagtaacagtatacttcatgtcgctgcaggttctgatgaatagatttaggaataggtactgtcactttgaagattattacttgtctgatattttcattagccttcattgttgccttgtgaatcttctaggtaaccctaggttctgtgttggatccctaaatcttttcatctcattttggttgtttggattcttactctgtttcaatatctcccaagagtatgattctaaaatccttttcttcttttatacattgggatgtccaaaccgaacaaacaacgaaaaacgattgtagaaccggaaaatctaaaccgaaaccgagatttgatatccataccacacttgcatgatttgaccaaattggctcaactgaaaaagtgagtctcggtttacttgaatgtttgttggctgtttttgaatagtgaacggtaaaactggcgggtgtacttattgcttgctgccacctgcattgatatttcttaaatcgtatgcatctacatactacaggttccaaaatcacattaagtgcttcttgtcgtttcatattatatgtttataagatatcaaactagcaaaacttttgctttgattattttctagctgtatcttataataaagtttaatattatctcttgtgatctaccatccttagcttggccacacactctctgttcccttgtccacaatcgtaaactcaataatttcattttaaataaacgacaacagcttgttcacatataaaataacaaccatctcaaaataaaatcaagagttctgcttctctatccagttttattactaatttactactgcacaacatcatatatagccattgcaaaaaaatgttgcttctgcctttcacattttgttgtgtagaagcaagatcatagttactgtttagtgtttacaagtggggaaggcaaataagatctgaaggactaaagtgaaagtgacaatacggtcatcattactctgacctaaagtaaacgagtacaatgtgactggcgactcccggtaaacacttgaaccaccgacaaaaacttcccggtttatatgtaacggcatcattcacaacgaccgatcttcacggtccgtaccgtacacgatccatgtctgtagaaggagaaataaagtactagctttttacggttttcagaataaagaaaaaactcatttgctgaacaaaaaacggatttcttggtgatcccaaagtggaagaaagctctgtttcttcatccagattctcagtcactcgtaaattttcatttttttttttccttttttaatatctttcctctatttttcaaatatagaagatcaaaaatcattcttgtgaatgcactaatatctaatagcaactttgggaaattgtgagaatcttactgattgcttatgtggggacttgccgtttttagtattaaaaatgtaaatcattttttttccttttcatgtagattgaaacgaaccataacaagtgtcaataatgttgtcgttttccttatttcatatcctaatttgccttggatttcaggaatatacgcaactgagtttttgtcattttcttctgtttcagactattgatcacagctgttctttttttcaggcttttcttgaaagttgttaagtaactgttgctttggctgcaatggaggaaaactgaaaagagtttgatgatg

SEQ ID NO: 18884 - DNA, 3003 bp, Unknown; identical to SEQ ID NO: 18883
  misc_feature (1)..( 3003): 2750-1469P.txt file - cDNA_ID_1819727; gDNA_ID_1620629; Annot_ID_162601

SEQ ID NO: 18885 - DNA, 3000 bp, Unknown; identical to SEQ ID NO: 3182
  misc_feature (1)..( 3000): 2750-1469P.txt file - cDNA_ID_1819747; gDNA_ID_1620630; Annot_ID_47237

SEQ ID NO: 18886 - DNA, 3003 bp, Unknown
  misc_feature (1)..( 3003): 2750-1469P.txt file - cDNA_ID_1819747; gDNA_ID_2926193; Annot_ID_141149
gtttggtaaaaaatgttaaatataatgtatatcatttctatattaattctctcaatttctagtgtattttttttaaaaaaatatatgatcgatgagaccacacgtaaaaaaaatcggcaaattttgaactaaatagatacaaaaattcacaaaacttcaaatattttaggcgtttaatagtttaaatttcatactataaaatgatacaaacttgattttttatcaatttaaactaaacatatcagatttgaattaatagaaaaatttcaaatgaaattatcgatacatttacataggtgttgagtcatatacgggattagaatgtcttctagtagcgtcaaaatcatattttagtgaggatatattgataaaagaaaagaaaaatagatagctagctccataaatagtaaattttaagttccaccaaagtacttgaactggacatgtctataatatcttggaagtagaacttctgatgattatgactatatatctactataacgcttgtatacaccgtgaaaagtctatttcaaaacccatggaggagtgatcatttagcctcatgtaccctcaccgcatgttacctatttagaaactacaaggtgagatgttgaatttgagtgaccattatctttttgctttcttctttgtttttgccatacttgtcacttgtcatctcacattcacacttattctcaatctattttcatcaccttggcaaaaatcctagctagataggcatcatcttggattctagttatgtggtctggttgtgaatatttagctagctagaaatctatcacataggtagatatgcgtcaatatacatttacagtgccatttacttttcttttttacgaaattgcgtaacaagatttcatacgactttgatttaaaagttgtcaatcacaccaattttacatatttcgaccaaattcttattgtttttcaaataaaatacggtctactttgactatcagattaacccaaaaaatacctcaaaaaattgattatatccgaaaaaataattactttttggattaaaaatttttatcgaaaatcgttatcgtgagagttagatttaggtcttatttgaatctacttttgattaattagtatatataaatgggtcaaaatgatttgagagctgctttgaagatattagtgacaaagagtaaatgggtaacacatgcgaatggtcacaaattctgcagtggagaaatcactcatgttcaagggtccacattgttcatcttacacattaccaaagtctgcaaaaactagggtttgttcctttcacatgcctatgtctgttagatgaactacctctcgtgaaaagaaaaaaaatatattcctctacactaaacacaagaaagaagaaaccaacaaacacttgtatttaccacaaacaattttcaaagatttcatttacgtataagtcaattttccaagtccaaagtttaggatagatacgtaatcaaataaataatagacaatgtatgttataaaagtaggaactagtacttctctatcaagtaactaactatacaagctcatcaagttttttttttctttaatgtaatttgtttatagtttatcaagttttagttcttatatatactcaaatatgtacgtaaagaaaaaataattcgaatgtactggatttaatcattgggatggtaaagtttcgaatggaacactactgtacccatatctctatatccctttttatgtacctgcaaccccacacacacatatatatatatagtatgggcattttagttccaatccggctagagattcattctgattatgtataatatttataatgtttctagtatttagaaatttgatatttctgtgtaaaatttcttacacaatattttttcttatcattagattttgtaagcaaatacaaaccttaactagctagcttaatacattatttttgagttgtgtagaagaattccgaaattccacatatgtaaatgcctaaaataattaaaaagaaatagatatttagatcattcgctcggatacagattggatacgaatatctgaattttcttaagtgtttgatttgtaccaatcgttagtatttactcatacacgcatggatggacacagacaacactaggaacttgtacaaatgagagtacttgccaattcttttagtcagttttataatataattgtttataattaaaatgagttatgttttgtgtggtgcatgtatataatatttaatacatgtatgtgtgcatatatttatgtatgtcaatgcaacaaagatttgggcttataaatgaatgaagaaaatgttggtgggatatggacaaaaacaaattggagaaacaatgaaataattcgaacccatgacgttacaactagtcaaaagtccccacatgatcttatcaaacgtaggtccatggatgagttgttttcgatatcataaatttctcacgaattttgttatatggcctttaagtgtaaaatgacaaaacttgccaaacaaatcatagacccaatgcaatttagatatcattggtgaatggttatagtaagtttaatagctttcaattcaaaatcaattgaaatgaatggcttgacttatgttacttagttattattattaatttcatgatatttcttatgtgagattcgtaacatgtttcttcaaaataattcatctttcatctcatcttgtatgatatcatgatgagtgagatatgatttgttttcaagtcttataaagcctattaggcccagaaccacgaatacttttcagagaagaaaacgcccattagtaatagtataggcccattaagtattagaataacaaaaattcagattttttttgttggtcacgaaaatttagctttttaatttaataaaagaaaaatgggaaaagaggacaagtcacgtcacgagacaaattagcatagcacgcaaagaagaagaagaagaagaagctccaagaatctgtcgcagaaatcgccatg

SEQ ID NO: 18887 - DNA, 3000 bp, Unknown; identical to SEQ ID NO: 3191
  misc_feature (1)..( 3000): 2750-1469P.txt file - cDNA_ID_1819751; gDNA_ID_1620630; Annot_ID_47234

SEQ ID NO: 18888 - DNA, 3003 bp, Unknown
  misc_feature (1)..( 3003): 2750-1469P.txt file - cDNA_ID_1819751; gDNA_ID_2926193; Annot_ID_141152
aaaggtaattacgcatttccttggttcgattcgtctagggacttaatagtgtgcgaaatattagaggatccaaatgatgcgtaagataagtcttatgagaagtccattagccctcgtaactatgattttaggtactagtagaaattcaattgggtatatttggtgaattctagagctttataattttgttatcgtttaaggctgataatgatgaagacataatgtcatggctctatgtttttattgctctttcctgttattttttttatcaactgatattaaagaatatatacattatattggctggtccatttcagtttttcttttatttggtcccgatttgattttatgtacataaaacatgtagaaccaatagtagtgtggtcgttatctttctaataatcgaaggctcgaaaccatatattgattcttggttagcgtatcgtctcttttatgactgcataatttacatggcttgcctatgtgttacacattatctcgatttcgatttcacgttcttggtaacatattaaagaatttagtatacgaaacaataaattgcatggggaaaccgatattcataaccaacgataatttgacaacacaaaaatggatcatcattcgccattgcccactcggccatacattagaaggacaagttatatttatttgctctctgtgaatctaattaagttttttactcgtcagtgggaaacatatagtaattgttttgtttgcattaaaatgaaaatgtatatatataaataaaaatgtactgatatatctactatagtagacttagtagtaattgttgtgaaagtagcagaaacaaaggatatggttgttgtaacataccaaattttcatgaaagcattcattgtgaatgtgaagttgagcgtatctatccgtgcaaccaaaaatagaaagagatgaagtatatgatcataatctgatttcttttgcttttagcacactaatcattgaagtttaagcatcacatctcttttctattttcctttccttgacaaaacttgcgaatcgttttgatgttccatacgtcttttgccatcattcatacataagtaccaaccaactattattaaacttttatttgttaattatacacaatattgactatatatattattatttttaccacaaaaaaaatttaaaatttagactatatagtaccaaccaatatagtattaatttttttttattttttacaaaaaccaatgaataaatttgattttccgaatgtggtttcttaattaaatttatattatttcagttccaatatttatatatatagataataaaaacaaaagagataaaagaagagatattggaaacaaaagaaaatgaataattgagagaacacaaaagaggaagaaagagagtggagaagagaagagaagagaagagagcaacttcctccattttcttttggcttcctctctccttctcggtttgttttgtctgtacctgagagagtttcccctaacaaaaaaagactcttttttcctcaaaatccatttcgcttccgacgccattctcagtcggtgtgaacgcgtgagagaaagagagagatttggcttactttatctccggcgggcatctttttccggcggagtttccgatgtatctactctagctaagctcagctcttaactgttacaggtctctctctctctctctctctctcttcccccgagtaaaaaagccacaaaatgtctgaatcatttagctctgatctcactttccgatgctttttacctattttctcgtttcgatttctttgtttgcttttcactgttcttacttcaattagattctgatccctctttttaccctttctctctctctctttctctgcttttgcttttactgtttccttacaattgtgattgtattgagctaattttggtcggattcatttactcttctctttgtcaatttgcttgtttttgttaaagatgtgacatttattactaaaggtttcttctttttgggggaaacaaatttgagttcatagatagacttactagaggagtgttgtatcactgatgctggaatctggttaatgtaggcagatccacagtgcctgttgattgtttcttcctatcatcaatctcggaatttgagggggtcttattattaagggtgagtcaattttgatttgtaattttcacaaggagtttgtgttcagacttcagagcataaaaagtgactggcttgattgtgataggtcatgtgaaaaaatggtaactggttcatcttatcttttgttcagtcactataaagtgtccctctgattacagaatcttattctcctttctttttttccttacaaagttcttgttttgttatgcttgtcctgttcctctttgctgctagaaatattctcttcttctactctctcttcacttttcctggatcttttaggtttaaattttgaagcttgcagagctggaaagtttcttcattaggaatctttgcttgttagtttcgtgtcacctcagataataactaaatagctgtgaaactgcagggaccataatgaatgaactccgaggcagaaaggctcaaaagattgaaagtccagttccaggatgcttagggaagatggttaacctatttgatctaggaattgctgttaatgggaacaagttgcttacagataaaccacatcttgatggtaatcactagttccctctgtaattgctttgttcactagtcgaagctttctgttatgtttctgaactgagtaggatgtcctagtatccacctgtgttattgacacgaggtagtttcatggcaggatcctctctgtcaagaagtcgatctgatgtgactcgaatgccaggcccttcttataaaggccattcagaagctgaattggtacgtttggttaaataattagaaatagtatgcatgctagcaacagcgattttaatattcagaagctgaagtctattgcctgcactgtttgcacagattatg

SEQ ID NO: 18889 - DNA, 3000 bp, Unknown; identical to SEQ ID NO: 3179
  misc_feature (1)..( 3000): 2750-1469P.txt file - cDNA_ID_1819755; gDNA_ID_1620630; Annot_ID_47230

SEQ ID NO: 18890 - DNA, 3003 bp, Unknown
  misc_feature (1)..( 3003): 2750-1469P.txt file - cDNA_ID_1819755; gDNA_ID_2926193; Annot_ID_141156
taccagcgactcacggcaccgagagtcgagcaacagtcactggcggagtatctcgtacttttgcagttcctggtcttggtccgaggggaaaggcggtggcgattgagacggcgggaacacaatcttgggggttgtgcaaggccgaaacagagccggttcagagacaaccagcgacggagacggatatcaccgatgaacggaagagaaaaacgagagaggaaacaaatgtcgaaaaccaggtgagtcagagctcccatatataggttaactttacgcaaacatgtcagcgcgtgttagtcacttgactcgtgcagtttagcagttgaagcttaatttgtatctttctgtttcttggcgtacagggaactgaagaagctcgtgattcgacgtctagtaagaggtcacgagctgcaataatgcataaactctccgaaagggttcttatgcttccattggaatttcaagattctgagtttgaataatggactatctgtttcatctcctttaaaacttgttttttttttgttaaacagagacggagacaaaagattaacgagatgatgaaggctttgcaagaactccttcctcgctgcacaaaggttattacagtttcttttttaattaactagttgttatttaactttaacgttgattctgattctgtgtctactctgatcagactgatagatcttccatgctggatgatgttatagagtacgtgaaatctctacagagccaaatacaggtatgtcctcaaaaacagaatgtgagtttgaacatggaaacagtttgaatgtccgcagattcatttcctggaagatttataaagtttagatgagatggcctaatagccctgttcttgaggtctttgcttcccaaattttgtagggtaaacatttaaggatctttaggtcatgagtgagatttcatatctgaatcgaggtttttatgccagatgttctcaatgggacatgttatgattccaccgatgatgtatgcggggaatatacaacaacagtacatgccccacatggccatgggtatgaatcggcctcctgcattcatacctttccctaggcaggctcatatggcggaaggtgtaggtcctgttgatttatttagagagaatgaagaaacagagcaagagacaatgtctcttctccttagagaagacaaaagaacaaaacagaaaatgttttcttgaactgaaacttgttagttcttttattaagacaagacacactcttatatacatgttcacataactactctacgttggtaacagttgtaacttctccaacaagttacgtctcttactcgcctcctttcgtagtcacatgacgtccgttgacttaacatacaaactataacatatatgatattacaagatttaatcatggactcaattctcaacaggtccatcatcatatccaccaccgcgctacccttttccaaacattcagacctttgacccatccagaattcgtttacaaagtccgcagcctaatctggtgtcgaaccaacctcagatgaatccctatagccagtttgttggtcaccaccggatccaacaacctcgtcctccattgcaggtaattcttcaccagtatcccattgtgcttattcctctctgtccctacgaacgcttacaagatccttttctaaaaaaaaatgtttttatagagtcaaacaagaccacaggtgagtttcagccaagcaagtagtagcaaagaacctgatgatcaggacaacaaaccaacaagttagtacgaatcagggaataaaggcttttcttgctagataagttaatagtcaagattgtgaatttcaatgggtaaagtcatcctacgttcacagtctcacagataaatttataacacatttaataatagattttttagaaatttgcaaaattaagggatagatttggcacaaactcattaacgtcacacaaaatatgtaaaaaaattaaaaggacgaggcagaaaaagatcatgttgttttctaacgtcgatacaaaaaactctgatcaagttctctttagatgtttttgtttattaaaaaaagaatgccaaaagagtcgacgcatagagtaatgacatcattgtggatgctgaaaacgtcatggtatgcataaagacacacttccgagagtgatagagagcttatcctatatatgctcctaaaatagactttctaaaagcacagaattttatcaatagaaggggaaagaaagaaatagcgactcaatgaatctggccctaaaagcaatttataaactctgttaactaagtggtttcttggaggtttctggggtatatagaagacaaaagtaactctttcttttttggtttttaataactcacaacaacaaaaacaaaacaaaaaaccttttcatgataaaaaggtaacatgtgtttggtttctctcatacatttgtttctaatctcagacataaataatttttgttcccgacttcaaaaccaacgatgattatatcattccacattcattttcttctacttcttccttctccttgatctcatttccctagaaaatccatctatcatgtaagttcctttgagattctctgctcttacttgcaagttttatcttgacatgtttgatgattaaggatttggtttgagattaggggtgaagatgatatagtggagctcttatggaagagtggccaagtcgttagaaccagtcaaacacagagaccctcctccaatacaccaccatctcttcctccaccacccattcttcgtggtagcggaagcggcaacggagaagaaaatgccccgcttccacttccacagccttcacctcccctccatcatcagaatcttttcattctggaagacgaaatgtcttcttggcttcaccattctcaccccggcgttacgtccaccccggcttcttctgtctccctgccaccaccacccaatgctccgtacagctccggttttttttttcctcttttaattctcttactttatg

SEQ ID NO: 18891 - DNA, 3000 bp, Unknown; identical to SEQ ID NO: 3177
  misc_feature (1)..( 3000): 2750-1469P.txt file - cDNA_ID_1819774; gDNA_ID_1620630; Annot_ID_47224

SEQ ID NO: 18892 - DNA, 3003 bp, Unknown
  misc_feature (1)..( 3003): 2750-1469P.txt file - cDNA_ID_1819774; gDNA_ID_2926193; Annot_ID_141161
atcaaactttttctcgtacaatgtttgtctatttaccattgatccagatttattgtgaatataatatacaagaatatttcaacacccaccgaaagttattcttgactgatcactggatttccttgcttaaatcattaaataaaaaaaccttaaaacacgttttaatgatgtcttgcacttttagaacgaactttataaactaatctaaatggagaatcgttgtttacaatgtttcaccacttcatgagtgtccaatctctgttatgtgaacgaaaacaaaccaaattaaatataatctatctaaaagtaaaaccaaaatgtatcaaaatttattttttggttaagcatgatttattaaatttttttcatgaaatcctaaaacaatgtaacggattttttttatctaagccctatgcagtatgcaacgagacgaaaatacctgattaaaaatatggaaatcgtaaggaacaatagagtaataaaacagattgatgacaaacgaagttactattggtaaaatttctgatttggaagaggagaagttgacaagttcatcgaccccatttatttgtggagtcttccccacgtatattcctcggcctctaccacaaccgcgtgagccagctaacagtgtccatcttcttatattttagtttttttttttttttctatctaatatttatttatcaaacacatgttggtgattggaaactaagaaacatacatattcatagtacctttccaggatagcattttctttatattaaagaagttagttctttaattgttatgttgtctaattcatgcatacaaagttcattagatgcacgtcaattgtcaaaactctatactttttggactacgtcaaaatttcgatttcttagaagttatatataaagaaagccttactgacaaacaaatggtgatcgaatagagttccaatccaaaacattccaaacacaaatcaaattcgtaagatggcgggtcttcaagcgaagacgttaatgttcgttctggcagctgccttagcgactcttggtcgcacatttgtggaggcagacttcagtaagaattttattgttacatggggtaaagatcacatgttcatgaatggtaccaaccttcgacttgtcctagacaaatctgcaggtatatagtaatcttataacacaataactttaaaatcagtccatttaattttagtctattatttcatgagaaacttgatagataaacatgtataactgtttttatgtttttgtttgtttttgcaggatctgctattaaatcaaaggtggctcatttgtttggaagcgtagaaatgctcatcaaacttgtgccagggaattctgctggaaccgttgcagcctattacgtaaaattttcttttgaactcgatcgatagaattacaaaaaaaataaaaaaaaatagaatcaatacgcaattcttttatatatagaaaaattagattaatgttttcagatttttctttgtagttatcgtctacgggaagtacacacgatgagatagacttcgagttcctaggaaatgcgactggtcagccgtacacgatccacaccaacttatatgctcaagggaaaggaaaccgcgaacaacaattccggccatggttcaacccgaccaatggtttccacaactataccatccattggaacccatccgaagttgtgtaagtaattaacttatggctatggcggtttcttaagtactttataaaaactccaaacaaatgctaagaaatggtactttctatcaatgaaataccacatcaaaaaaacttaagtaagattaaatgttacttagatagtttagtttgttactgtaaaacaacattaaagtacaaacacttcatgatgaatttttcttttagttccttaatgttttcgaaccttcaaaccaaaaaaactttaggaatctcaaacgattatatgtttttatttcctttctataaataaacgtgtcgcacaccatgttgtatatcttatataggtggttcgtcgatggaactccgatcagagtttttagaaactacgaaagtgaaggaatcgcatacccgaacaagcaaggtatgaaagtgtttgcgagtctatggaacgcagaagactgggcaacacaaggaggtcgagtgaagactaactggacgctagcaccatttgtggccgagggtcgtaggtacaaggcaagagcttgtttgtggaagggatcagtcagcatcaagcaatgtgtagatccaactatacggtctaattggtggacatcaccatcatttagtcagctcactgcttcgcagctgacgaagatgcaaaagataagagatggtttcatgatctatgattattgcaaggacactaacagatttaaaggtgttatgcctccggaatgctcgaagaagcaattctaattcaagtttccggccagcgggcggaacgaggagaggctccggcaatcatagcaccgcggtcgaggttaatggggacggactgtaaattcgtttttcattattttttttaataatttatttttctgaattgtttttgtgaggatttttgtgtgtctttgattcattgataactcgaatgagcaatcatgatgaagaagaagaagtttttttttttccattttttctttgttaaaatcctatacaaaaaaaaacaaattcaaaagctaaaaccctagtaaaaagagacaaaatccaatacaaaattatccccaaaattatccatatttagacacattgcgttgactttagaactagtggattagaaactccaccggtcctacgtggcaactaaatttcagtccacgtcaccgacacacaaattttcttagccttactataccatacaatttacgttaatgcccctattgtctcatctattcgcaaatttcaactctcaaattcaacgaagtaaaaaagccctaaattgatatctctatcccttgcgcatgatccagattcggttgtgatcggagctgccatg

SEQ ID NO: 18893 - DNA, 3000 bp, Unknown; identical to SEQ ID NO: 3176
  misc_feature (1)..( 3000): 2750-1469P.txt file - cDNA_ID_1819780; gDNA_ID_1620630; Annot_ID_47222

SEQ ID NO: 18894 - DNA, 3003 bp, Unknown
  misc_feature (1)..( 3003): 2750-1469P.txt file - cDNA_ID_1819780; gDNA_ID_2926193; Annot_ID_141163
tgctattttttagttttggtgctaaatatagatatgcctgtcttcctaacaataaactgtcatgctgcaggccgttcctgggtctagtaatgctcgtgcaataccaatggacacaagcaatcatcgaggtcagctcgagttataaattttaattgtgtcactttctgattaattttgtaatagtatatgatgtgttttttgttttctctcgactttcacactggactcaactggcatagagtgtttggctgatttagtttcccgttgcaactgtttatttcaatatcttgatgctaactctccgtttggcaggaggaactaagatttcacatgaagcccaagtctctgaccgtgtcagaccggctaatgccagtggtccaagcccacagattaataccgctgtagggaggagtctgggttttgatcaagtccacaagaatgtacgtgcttattcatttgcctcttccaaataaatgttgtatcctgcaaccctcccccttgtgttagcatctcatgcctgcatctgtgttgcttcagagttctgcatggttctctgcttaaagcttttacctgttttgcatggtcaattgtcatcaacgagctctatattgtgatatgaactacatatagcataaatgattaaaacacgatactgatcatcacgaaatatgctcttgaccattattttactgaaaacccattgcagatgaacatgccatcatccacttcattatctcctgcgggtacctcaaaaagaaatgtcagacccgaaacctcaaattctgggtttgggagcgggaataaaaccggcggttggacttcaccattcatgtcaccggggaaatgatgcaaaaaaagttggagtatatcattcatctgatctgctgagcaagattatgtgtgcctttgggtctaaactgtgatttctgcagtgaaaagctctagactgaggttgaagatctgaatggagtttttccatgaacagcttactgtttgacaaaaggcatgaagattatgtttgctttccttcaagattctcacaaatgactgacttcaacctttgtataaaatcttgcaaccgggcgtgtaatttggttcttgtgattcattctcccaagttttcttctataaaactttgttcgtatttctgtacgtagttccctgtgttggggcataacctgggtttgctgtgtcatcaacattgtttgcagaaaatcaagagcaaagcatgagcagcttcagcagagatgccttcaaaggcttgagtcaagagttgcttgtggcagggacatgtcaccatcaagctaatgtgcagctgacgagaacgtaaaaggataagctatggctagcttctggaatgctccgagaaacacttccccctttttttttctctgaatttcctattcagtttaatggtattctgtgtttgatttttcttactcgattttgtgcattgaaaaaaattatatcaaaaagcttgacttgatccaaacatgcattttcaattgctattattaaaaaaaaaaaacgtataaaattgtagtctcaatattgaaatacaaacacctagaattgatcgatttggtagagaactagttagtggattaaatttgggttggctgattttcgagccataaactatttcgattctcagctttcacacccggacttttgggcctttaaatttccaccatcaactttcatattcccaaaattacatcatctatttttggattcatgcttaaacatacatttccaattgaaccattcatttaaccgggattaaccacaaatccgcgtttactgtaccgcgattgcgattaacccaactaatacccagacccgttaagaaaacgacgtcgttttcatttcgtttaactcatcaaaaagagaaagaaaacgacgtcgttttcattcttcttctttaactctcaaatcgatttagtcgttcttctttaatctcgacactgtgaaattagggttcttgagagagaaagacaaaaggggatttggggttttcttcttcggttcgaatttttgggtctcgatttgggtttcgaatagggagaaatgaagaattggtgggaggaaagattgatttaccaaagcgatccagatgaccccgatttcgaacctccagagagtgacattgaagccgacgatggaagtgatagtggtgatagcggagtcgaggaggacgaagccaccagaatcgagggagaggacgtcgggatagatggagacagagcttctgatggagaggaaaatagagaagacgatggtgacatagcgtctgatggagacgtcaatctagaagacgatggagacagagatgaaagtcaaaagaagaggactaccaaatcgatttgagagttaaagaagaagaatgaaaacgacgtcgttttcttaacgggtctgggtattagtcgggttaatcacaatcgcggtacagtaaacgcggatttgtggttaatcccggttaaatgaatggttcaattgaaaatgtatgtttaatcatgaattcgaaagtagatgatgtaattttgaggaatatgaaaattgatggtggaaatttaagggcccaaaaatccgggagtgaaaactaagaatcgaaatagtttatgactcgaaaatcagccaacccattaaattttcgaaccttcatcattttgcagaccccaaaaacggaaatcatcaaatcatccaccgtgccagcgtgacattacaaaatcacgtaaataccctcgtgtttgtttataaggtaaaaaaagattggcggacccaaaatggtgcagtagttaggtgtacaaatttttttttgaaggatcactactacggctcaaacaagcctgggtccatgtcactaccaccgatgtcagtcaaacaaaaataataatatatgtttttaagttcctctaatttcaatcttctaaacaacaaccctaaatccttatctctatccttgcgcttgatccagattcggttctgattggagctgccatg

SEQ ID NO: 18895 - DNA, 3000 bp, Unknown; identical to SEQ ID NO: 3212
  misc_feature (1)..( 3000): 2750-1469P.txt file - cDNA_ID_1819788; gDNA_ID_1620631; Annot_ID_47263

SEQ ID NO: 18896 - DNA, 3000 bp, Unknown; identical to SEQ ID NO: 3212
  misc_feature (1)..( 3000): 2750-1469P.txt file - cDNA_ID_1819788; gDNA_ID_1620631; Annot_ID_162701

SEQ ID NO: 18897 - DNA, 3000 bp, Unknown; identical to SEQ ID NO: 3212
  misc_feature (1)..( 3000): 2750-1469P.txt file - cDNA_ID_1819788; gDNA_ID_2926182; Annot_ID_140619

SEQ ID NO: 18898 - DNA, 3000 bp, Unknown; identical to SEQ ID NO: 3212
  misc_feature (1)..( 3000): 2750-1469P.txt file - cDNA_ID_1819788; gDNA_ID_2926182; Annot_ID_200344

SEQ ID NO: 18899 - DNA, 3000 bp, Unknown; identical to SEQ ID NO: 3213
  misc_feature (1)..( 3000): 2750-1469P.txt file - cDNA_ID_1819792; gDNA_ID_1620631; Annot_ID_47262

SEQ ID NO: 18900 - DNA, 3000 bp, Unknown; identical to SEQ ID NO: 3213
  misc_feature (1)..( 3000): 2750-1469P.txt file - cDNA_ID_1819792; gDNA_ID_2926182; Annot_ID_140618

SEQ ID NO: 18901 - DNA, 3000 bp, Unknown; identical to SEQ ID NO: 3202
  misc_feature (1)..( 3000): 2750-1469P.txt file - cDNA_ID_1819796; gDNA_ID_1620631; Annot_ID_47260

SEQ ID NO: 18902 - DNA, 3000 bp, Unknown; identical to SEQ ID NO: 3202
  misc_feature (1)..( 3000): 2750-1469P.txt file - cDNA_ID_1819796; gDNA_ID_2926182; Annot_ID_140616

SEQ ID NO: 18903 - DNA, 3000 bp, Unknown; identical to SEQ ID NO: 3201
  misc_feature (1)..( 3000): 2750-1469P.txt file - cDNA_ID_1819804; gDNA_ID_1620631; Annot_ID_47257

SEQ ID NO: 18904 - DNA, 3000 bp, Unknown; identical to SEQ ID NO: 3201
  misc_feature (1)..( 3000): 2750-1469P.txt file - cDNA_ID_1819804; gDNA_ID_2926182; Annot_ID_140613

SEQ ID NO: 18905 - DNA, 3003 bp, Unknown
  misc_feature (1)..( 3003): 2750-1469P.txt file - cDNA_ID_1819814; gDNA_ID_1620631; Annot_ID_47254
aatcagaacttaagcgaaatccttcgaccactaaagaagaaaatccctaacaaatctcagagtttgtgttaatttcttctttccttacatcttttccagaagaaaaaaagctgaaagatgtggttttttggatcgaaaggagcatctggattctcttctcgttccacagcagaggaagtcacacatggtgttgatgggactggtctcactgccattgtcacaggttttcttctatcaatagtttcatgcccttttgcgacttgggtttgtctaaagttgtagacttttctataattatgaattgatttcatatgtagggtagagattttttacttttattgtttagacaattggaatttgatgtttttatgatcagggtctgtttttggttcggtcaaccctaataaatatatggaggtcatcaccgtttgttgttctaaagtttgtcttttttttttgccaataagtaacaagcttttgctcacaagaattggattgctatgtttggtgaattttaaagtacaacatgtttgggaccatttgatctgcaaataacatgtgctattagaaagttacatatatatacatacttgtctctgtttcagctgattctaagttatgttataatcacacactatacaatttctgaccaaaggaagaaaaaaaaaagatttgcttgtagatctcgtttcaatacttttgtgaagtgctgcttccttattttggttagattgagtatgtagtttagtatgcacatgttctgtatcagcctatcagggtattgaaaaggctaggaacgagcttaatctattagttgatacaacttaagaaagtgagatttctgaacatgttggatcctcaagttttgttttgtttgttttcatgttttttcaggagcatcaagtggtataggtgtagaaacagctcgtgttcttgcactgcgtggtgtgcatgtggttatggcggtgagaaacactggcgccggtgctaaagttaaggaagatattgtcaagcaagtccctggagctaaagttgatgtcatggagttagaactcagctcaatggaatctgtcaggaaatttgcatctgagtacaaatctgctggtcttccactcaacctcttgatgtaagctattgaaatatcgtggttcatctatagccgtttggatttattgacgtttatgttttgacttgtctcaattttgtaagcaacaatgccgggattatggcatgtccttttatgctctctaaggacaacatcgagctgcaattcgcaaccaaccatttaggtgagtatgataaccaaaccaacattatggctttgtcctacattttatataattagtttctaatcagtgcaacggtttttgtaatccaaatacatttcaggacattttctgcttaccaaacttctgttagatacaatgaagaacacatcacgtgaaagcaaaagagaaggaaggattgttaacgtatcatcagaagctcatcgttactcgtacccagaaggagtccgctttgataagatcaacgacgagtcaaggtactaatggtgaaccaaatagtataattctccgatcccatcttttcttctaaagccaacattcttccttgatttggtctccacatgcagttacagtagtatacgtgcttatggacaatctaaactctgcaatgtattgcacgccaacgagcttgcaaagcaactgaaggtaaactacactaaacaaagcaaagatgtagcaaatcaagaatctatgtttccatggttatcttcaattctggtatatgattaaaaacaggaagatggagtcaatataacagcaaattcacttcatccaggagccattatgacaaatctatggggctacttcaactcctatttggctggtaacttcttttctcggattcaactctcatcactccatgtttcataaggttacactcaaagtaaacaaacgcatacatatattttgagtctcttctgatctctctgtcaccggcttaatgcaggagctgttggtgcagtggctaaatatatggtcaagtctgttccgcaggtatgcatctaatttctgaacctcacactaataaccaatcacttgcaaacttgtcactaggtttctcagcttaagtaggagagaatgatacagcagtctagctttacggattgatttggtttttgttggtaatctggtttataatgtctgagtattcgacttggtagggggcggcaacaacttgctatgtggcattgaatccacaggttgcaggagttacaggggaatacttctcagatagcaacattgctaaaccaatagaacttgtcaaagatacagaattggcgaagaagctttgggatttcagcactaagcttactgattcgcaatgatgattaccgttgcagtagatagttgttcagggaacctttactttcgatgtctctattgtgacaatacttatttcagtctttattgatacaaaataaaatgtaaaaaacaaatctgaaatcatttccatttcaattctgcaaaaagatggtttatccaatttcagcctaaacaaaagtgttacttatctgttttctcattgactcaaaacagttgtctagtgaactaactcgtagacataagtaagtaagaaaccaaacagaaagagcttaaaacatcttctgattttggagttaactcatgttattggtgggagctattttaaggacatttgttaaatcctttaaaaagaaagttgttaataaatccccatcatttgactttggagatgcactattctacacttcaacctcaacctcgtgagacatgaggattaaagtaaagtaatcacatttctgtcacatatgaacaaataaagttatttaaatcagaataaaagcgaaatcgcttgaccactcaagaagagaaaaacgctaacaagtcccatagtttgtgtttattggacttctttcctctcatcttctccagcagaaacaaaaaaagctgaaagatg

SEQ ID NO: 18906 - DNA, 3003 bp, Unknown; identical to SEQ ID NO: 18905
  misc_feature (1)..( 3003): 2750-1469P.txt file - cDNA_ID_1819814; gDNA_ID_2926182; Annot_ID_140610

SEQ ID NO: 18907 - DNA, 3003 bp, Unknown
  misc_feature (1)..( 3003): 2750-1469P.txt file - cDNA_ID_1819818; gDNA_ID_1620631; Annot_ID_47253
gatgttactagttacacaaatatctaggctagatgtcctaatcatcttcaaaatattttgttgatgttttatcttaaataatcaaagtttttcaattattgtgggtgttgtatatatttaacataatcttaatccataaacaaaaagtaatataaaggtgttgcgggaaaaggttacttaatggttaagaagtttggcttatgatcatcccactttgtgaagtatggcatgaactttctttttaccgatattagagccaaatgaaagcggtttcttaatcgccaagttccaaccaaaaaacaaaaagcccacatttacgaaaaatactcttaaaccaacattttgaattcatatgatacaaagcttcaaatatccaaatcgaggaaattattttttaaaaaaaacaatacataacttttaaatataaattgcgaaaaaaggtaaagccactcatcaaaattcaaaagtgatgagattaaagcaagtgaagacgcatacattatcacattaaaagtagcaaacacaccaagaaattagataaaaagataacaaaataattccatccactttctttttcttttgttttgtcaagattttgttttttgtatttcagtcatacgtgtgaatgtatatcaacaacattgtttttaatgtataaaaatctcaactactataaagtagctgaatgatatgtgattaagatatatatcgagagagacaagccagcaagaattttcagcacacatacacacacaaaagattcaaagaatcatctagtaacaaataaaaaaggagagagaaggaaaatgaacagaatgagcaatacagtgataggattcttgaatatcctaacactaatttcctccatagttctattaggatcagctctatggatgggtaggagcaaaacgacatgcgagcattttcttcagaagccacttttgatcttaggcctagctatcttgatcttgtcagtagctggtctagtcggtgcatgttgtgacgtggcttgggtcttgtgggtgtacctcttcttcatggtcttcatcatagtcgcactcatgggtttgaccttgtttggattcatagtgactagccatagtggtggtgtggttgtcgatggtagggtttataaagagtttaagcttgaagcatatcacccttggcttaagacaagggtggtagatactaattattgggttactataaagacttgtctcttgggctcagtcacttgttccaagctcgctctttggactcctcttgattatctccaaaaagacttatctcctcttcaggtactcgttataatcattccaatttttttcataatcagtaaaattagtaaactagctagtcatttagagatttgtaacataaaaataagctagtgctaaacattacatgctaataataattcgagtaattgaaatattctgatatttggaaacagtctggatgctgcaaaccaccgacgtcgtgcgtttacaacacggacacggtgatacaacaagaccctgattgttaccggtggaacaacgcagcgacggtgctctgctatgattgtgacacgtgtagagctggcgttttagagactgtacgtcgcgattggcacaaactctctctagtgaacgtcattgttgttattttcctcatagctgtttactgtgttggctgttgcgcgtttaaaaacgccaaacgccctcaacattacggcttcccttatggacgttacggcatgtccaaatccagacctggatgggaacagtcctggtgagattaactgcttagagaattacaatattttttttcattgaatatacgtttataggtttgttctcttttctaatgcaacaattatttttattattttcgcggcatgtaggtcaaggtggtggcatgggagagatcggtattagtgaaaaatatttatgttaatgttttcgaatatcacggttcaactttttggtttccaatatataattattgattttgaacagaacataaattttttataatgaaatttctaattcgagaaaaaaaaatttagtcacttccgatccacaaaatctgagttaagaaattgaaaaaaaagagctaaatgttttatgtttatggaacattattttaaatgttattttaggtagtcaaatgggttatctttgggccagacattagtcattgaggaggcccacaaaggtatagaactagagtaacgaagccttgccttgaaggcaataatcgcttctcccacatcggaagtttgaggatggatactcgtctgtgacatagtataaataaagaacatggtcgaagcttgcaaattacttacctggacggggtcaactcgtgatcaagaagacgagtggcctaggctagtgaattccattgcacataacggaagggtgcttagcttaaggtcttcccttgtggaagagcctgcgtcattatttgtggcagagggggtttgcgttcgcgcagcccctaccattcccagtagttcaatcttttgttcatgaatacccatggcctaggctagtggcttcctgcacttgaggtgcgctaagcctaaggtttccccaaatggccaagtgggagatcctgcgtcattatttgttgccttggggggctgcgttcgcgcggcccattccatccgcaatagttcaatctttttagctctctggtaactgttataacatctgaggtctttctttaattgttcacgtttttggtggagctattttattgaaggttgttaatttgactttggagatgcaatcttctaatcaaatctccacgtgagaagcgaggattctctcctcgtcattatttatccttcccaattagagtaatcacacttttctgtcacatatgaattattaaaatcagaacttaagcgaaatccttcgaccactaaagaagaaaatccctaacaaatctcagagtttgtgttaatttcttctttccttacatcttttccagaagaaaaaaagctgaaagatg

SEQ ID NO: 18908 - DNA, 3003 bp, Unknown; identical to SEQ ID NO: 18907
  misc_feature (1)..( 3003): 2750-1469P.txt file - cDNA_ID_1819818; gDNA_ID_2926182; Annot_ID_140609

SEQ ID NO: 18909 - DNA, 3000 bp, Unknown; identical to SEQ ID NO: 3198
  misc_feature (1)..( 3000): 2750-1469P.txt file - cDNA_ID_1819822; gDNA_ID_1620631; Annot_ID_47250

SEQ ID NO: 18910 - DNA, 3000 bp, Unknown; identical to SEQ ID NO: 3198
  misc_feature (1)..( 3000): 2750-1469P.txt file - cDNA_ID_1819822; gDNA_ID_2926182; Annot_ID_140606

SEQ ID NO: 18911 - DNA, 3003 bp, Unknown
  misc_feature (1)..( 3003): 2750-1469P.txt file - cDNA_ID_1819841; gDNA_ID_1620632; Annot_ID_47288
gtgaacggacatgtgtacttccacttgaggagaagtcatgtcttttgcaatgttctaagcacacaaaagtttcatagaacaggtatgattcttgatttgatggaagctttaacgattgaggaggaggatgggatcaaatatgttggaacaggtctagaagagaagaagagaaaggcaatgagcatgatctaagctgtgtaagactaacaagacttacctacaatataagctgtgtagtctgttgaggaaaacattgatgagtctataagttgcatgtgaacttaaaaacagcaaagtttagagtttatgtgattacaattaatgatgctattacaaatttcaaacctcttcttgaatttagaattttaaaccttgataactaaatttcataaaatgcaatagagtagctagatgacaccctaatttgcatcctctgttccaatcatcatcatcgatcatagagcacagtcctacacatcgggcaagtgtttttgcggtttagccactccacgagacaaccattgtggaagacatgggaacaactcatgcgagtgggtgctgttttcgaactggagactagactctggagacaaatggaacacgactctgcgttcaaactctttgtttcctctacgctcatgaacccttgtagaaccatcctcgatatctttaatgctgcctcgtcgacacggacgtacttgtaagtaaccgcgacgctcacggtcaagtcaacaaaacctgagctgatagcacttgagatctttgggactaagtgatcgcacaaccaatggtcgtctctatggagtcgatcatggagtaacgattggatgtggtggtgactacaactagggagagtgtaattgatgggaagtgatttataggaaagcggagtggacgttgcggttcgatggccagtgccagggtttataaggatctcatccttaatggtattgacgatgaggaagatcgagtttgtatttccttgtgatggagagcgagagactctctcagcttggacctgaacgctcactacggctttgggaatgggatcattcatgtttgaaagaggcttctcaacacaaaacagaagaataagaatttgcaaatcgtaatgagagcaaattgagagagaagacaattgtgaatagctttagggttacgtagtgagtatatatatatgagctgtgttcaacggtcaatacatttcagattctagtttccttttgttctttgttaccaataaatttccttttttgccacaaagaaatttccgtttctttaattcttcttttgggatgatatctgttatttcttttgttattcaaaactacttgtattaactattaagagacattactcaaagtttgaatatttagatatcataattaaagaattcattcatatgatcattttttttttttgaatgaatgttagatttattaaaccaaaaaaagacctttgtacaatgaatgtaaccttatactaaaagttccgaattttttaaataaaagataccaaatacaataatcacttgggtcttccagcaccaaaccaacttcgcaagccatcctcaaatttggttgcggtttcctttagattagaaagtctgttccgaactatacgttcaatgtaagaagacatgagggtaggagacaagttttgttccccatgtcgacgcttatttctttcagaccatatggagtgcacacaaacttggaatacataccgtagaataaacctcaccgtgggggtgaatcttgaatccagcagcttagatacaatatcattgtatgaggtagtaaactgaccttgtaataaaccttctgcaatatcatatgatcatttctttttgaaaataatgttaaattatattcaatgaaaaatagcgtttgtacaactagtgcatcatgagattgaaatgagttacaagaatttgctacttaatttcgagagtcgaaccaagtttgtaatcccttatcataacgtctatctcctgtgagccgaatggttgaaaacctgtttctcatttgcttgtcaatccactctgttagtcgggtttgacggtttggagtttcaccatgccttctgcagttcctttctcgccatatagtataaatcactgtctgaaacacgtagcgggctatgaagctttccatacaatcacgccatggacctcaaactgaagagattaaaaagaatgccaatccgttgagtacttctctttgtagatgttttttgccactgcagcccatacttcagagcaaaagacacaagaaaagaaaagatggtctctagattctagagcgttgttgcagagaatacatgtcccaagagcgccactgttcctctgcaacatacgttccccagtagagagtctattactgaccgctaaccacacgcaaaaagaaaattttggggttgcatgtaaaccaaactccgttatgccaagtaaccgtgatgccctctttgcgaatatggttccaagtgtctctagtagagaacttgggttgtaaacatcgtgtttgcctctccacaatacaacatccggctctcttttgtgggtttgacgttttagttcgagcgcctcctccaacaagttcaatgtcacagtcctatgtctcctctgccgtctaaagtcccaagcctctgcaactgtcaatagcctgcttattcccatgtcaacaaaccttctgtttccaaccaagtccagcggcctacccatgttggaccatatgatcatttatctttttcagacatttttattcgcctaatcacttgttcactacttcattcatgttacctaatcttgacggtatattaattttactaattccaaatttgaagttattgagtttggtggtgtatatgtagataaatcttgtagatgttttctgctaaatatgtataagcaaaaagcatgtttaatttttcttaatgatcttagactaaggggagacaattgtcattaaaccttcaacctaaacctacctattataagacatg

SEQ ID NO: 18912 - DNA, 3003 bp, Unknown; identical to SEQ ID NO: 18911
  misc_feature (1)..( 3003): 2750-1469P.txt file - cDNA_ID_1819841; gDNA_ID_2926154; Annot_ID_139444

SEQ ID NO: 18913 - DNA, 3003 bp, Unknown
  misc_feature (1)..( 3003): 2750-1469P.txt file - cDNA_ID_1819850; gDNA_ID_1620632; Annot_ID_47285
tgcttcaatgaacattgtgatcacgatgacctaattcgaaactccataaacccaatgattttctcatactaatccaacgaaaccctagaacctagagaccagaagcttccagacaaaccctataacagagtctaatgatctaatcaaaaacccaatttcgaaaaatccaaaattggtaagagaaagggtaaaagaagctaactttctctggtgatttgtctgaaattcttgtactctccgccataagaggacgatccagaatcggagaaggacatcgcgtgaaatcgtcgacgaaatgttttttgatggaaagggaaagtagaatcgaatatcaaaaaaaaaaacagattcgcgaggaagaagaagaagaatgaaatttccgttgaaattgtggatctagggtttacttggtgacgaagacaacaacgacgttaaagagttgaagaaaacttggcgcttctagatttttgccgttcctgggtcggctccagcgagcccatgagttttcaaactttgaatgagttgttttctcagacgtgtgttaaagtcaaaatatagggacgaattatataatattataatagtcaaatgacaaacgtaaccttgatattaactaattttgcaaagtaagccactatatcaagatactttacagtaatcacccaactaattaaaatttgaaatatagcccccaagtcaaactatgattcactactttaatagttattaaaacttataactaaagccaaggaacatcaagcttagaatagaagcctagaacctaaatcgatttcgtagaccaaaactctaaatctttgtcaaactcgtaaacaaaaggtataaaaatcaaatatttaataatctaacttataatctaaaaacaaatcataaaatataaacaaaactgaaatccagattttagaataagtttaccaaacaaggttaacttttatccgatttttctcaaatttgttttaatatctttctagtttctgaataaaaaccaatccaatagttttgtgtttacaaatgtgaattatataccttttttgatagataaacgagaaaactatatgtgtttgtttttagtaaaaccaaatggcgaattttaaattattttattgcgatatatattgtcataattacgctatattgaggcttttatatttgtttgatgtttttatgtcaagtttcgtaagtataaataattttccatactttggttaatttgagggctgtttgcaattttacttatagtattattgcaactgatcttgctatatttatttatttatattctgttgaagtgatcttgcatttttatgtttacttttatcttccaaacttttagtttctacattcacatctttcttttacatttttcatctgttcttagttagttccaaatctttattttatcattatcattaaagaaaaacgttatgagacataaatcttgttgagttttaacttttaagtttaacctggttcaagcatgccgttttttctcaaattttatttctaacattttgatcaatctgcattctatgtaacaaaggcttttgtttgaatatattttttcatgcaaaaaagaaaacattttgatcaaactaataaggaacaagaaaaggtatagtgttaggtaatctttttttcttgttcatattttacagtgatttattacatcaaaaaaatttagcacataatgaacactacttattgtcgtattattaccaaactcacatatctcacatcactacacttctttaatttgttctacactacttaatgccttcaattaagatgaagtcgcttctgaattcaggttttttcttcgtagacagcttccaccgcaagaaaaacacaaccatgttaacaacaacaacgatcataatcaaccctacactgatcaataaataccacattttatctggagatatcatatcacagccattgagactaataagaaagagacatggagactggagaggcaacatcatccatagaaacgcccacatttctataatataatattctccagctggtaaaaagcaaaacaccatgacaaccagctgatgttgcaagatatatatctagagcgattaataaaccatcttggtcatggatgttttggtggttaacctctggagatcctagcaacagctttattgccttgattttgttctgacatgtttctatgtgcaaggcggtgttaccatttgatcacgtccgttcagttcttgtgtctctagcgattcagcaactacatgacgcagagtacttcgagttcttcatatctatcattcataaccgcaatgtgtagagcggtctcatcgttcacattaacatctctaacacaaccgggacaagccaatcataagatcaatctcctcttctcactaccatatgaaatggcgtcgtacatgttatcataataaagaatgtacctctcacatgcataccaaaaaaataaaccatgtattaaacaaaacaaacatattagtgtttattacaaaaaaaaattatactttcgtttcctagaagacgaacaaggtcaggatcattctcttaaacattgatacgaaaaaagaaaatttcctaacattctaaagctaatgaatgtaatcaacaactttattttcttatgtccgtaaaccaaatttctttggaaaatttactaaaatgctctgttagttataaatttagattattggtgactggtcgtcgtaataaacgggaagaaacgaccgaatcttaaaaaacatgttgtattgagaaaaaatctctcttttgtggtttggttcagtaatttcatcgaacacttgctaagcaaccgcataaacttccgtacttttattacacgtgtcgcaaaccaaagatagttcccattgacacgtattcgatcacgtggctttgtcctgagcttttctttctctaacgcaaatgtttaaccacagtggccacgaagaagaacgatactaacagagccttcacagagagatg

SEQ ID NO: 18914 - DNA, 3003 bp, Unknown; identical to SEQ ID NO: 18913
  misc_feature (1)..( 3003): 2750-1469P.txt file - cDNA_ID_1819850; gDNA_ID_2926154; Annot_ID_139441

SEQ ID NO: 18915 - DNA, 3003 bp, Unknown
  misc_feature (1)..( 3003): 2750-1469P.txt file - cDNA_ID_1819873; gDNA_ID_1620632; Annot_ID_47279
gcagaagataagtttcacaaagttatagagacagatcaagctagaacagagacaaacctgcttttagattctgatccagagcagagtcaagtgctctttgagcatcttcagttaaaggaggatgttccgggctaaagaaatacatatctgcctttcctagtaacttgaccgtttcttcacgcactttgtaaagcataatcttattcgcccgcaaaaactttgaagtaaaactagttcctgctcatcaaaatcaaacactatctcattccaaatatcactcactaccaagatcctagtaaccttttgtatcatctcaagcaataaaccagaagtaaagtaagtaagtaccttcaatcaaaatacccatgagaagtgcttcagttccagtatttggatacttgagcttcctagcttcaagctctcccattgcaaatgatttaattgccctccatgaccatctacattcacaacattaccctctaactttctttaaaaacctaaatcaacccaggaactttaaaaacaagcaattcaattcaatcttaggtctacaagaaacaacacttacttgggctttttcgcatcagaaaccactaaatctggattcctgcaacaaattaaagcacataattgaacaaaatcaaccacaattgcgaaaatggagcaacataaaattgatcaaaatcaactaaaatccgatcaaaactttagaaatttacgcggtgggtaagctggagatggcggatttatggattcttcttgggcgattagtttgtagagcggagactggagaagtgagagagagggatgaatcaacaacgcctaaccaaggattcgtcaatgcttttcttgtagagaagaagtataatggaacagatagtttcttcttagagaaagaatcgatttgtgagatgatcggattcgtcaaagcaaagttgcaagaagagtgagccgccattttcgcgagtgtgtctggataacgggaaaaatgaaagaacgtcaaattgggaaaggagaagaagagtcctggagaatgacgattgtcgaaacgatatcgtattcgttttataaatcttaaaactttcttatatgggcttaaaagatgtgaataaacccaacacaaaataagtttagttttgggcttattgcttatcattaaacgggcctatcaacgagtgaaagagtcaaaaacaaattttatcacaagacaaaaaattcaaatagtcaaaaagaaagtgaatgctgaaacctaatttattttctcacatatgtttgaatacgaatggtggatttcatgttttcactctgccttttaaaattctacctttcattttctaatagacacgagttaatgacaaccattagctttatcattaactaagttgattttttactactccgtttaaaagtttaatgccaacacaaattcaacacagttttcagaaaagtaaatccactatcatagtaaaccattgttagcttggaacaattatatatctttttagagaaattagtctcaaatatgattgggagtgagacaatctcggatggttgtatctatttttcttttactgaaaaatagagatttttttttttatgtcaatgctttttcaaaagtaaaaatctctatttgttagaaaaaatagaaatttttattttttattctatatataaaaaaactctattttagagataaaactatagatgagttagaatgaaataaatacaaaaataaagtatagagataaaaatagagatgagttggaaatgatatgaaggaatagattagaaagaatctatatatacatttttgcagccattttcgcaaataaatcctagacttgtacttatttacaatctaatgccattagcattaaatcttttttccaaaataattaattttactttaaatttttgatttaaattgtcaatcacattatcaatcaaatttaatcccaacaaacttcaaatcaatctcttaaaattagcataaacatatttgttaacaatattttaaaacaaagttttttgttaaaataaatattattcttactaaacgttttttgtttaaataaataaattttgtatttgaacttatttacaatgtcatgtcactgacattaattatttattaatgaaaatatttaattaaagatttaaatcttctaaatccttacttttagagttattatgtcattactttgtaagcaaaaatattattttttaaatattattatttatatatttaaaatttataaaacattattaatatttaaacttataaaaattttgatatatcataattttttaacatcagtttaaaaaaatcttaatttttgccgtcatattttatgattcaaaattttaaaaatgaacatatattaaccaattggcaaaaaatgtgtgggttcaacgtcccgcatcgacaaaaatatttagacaataatttataaacatatcataaataagatcaacattaatataaataaatgggttttttacaggacgaatttgacgggacgagtttggcaggacgttacttaataacaattgtaaattataaaataaaaatatattatagatatacaatttgcaaaaaaaaaattatactaactttaaaaagataaattgtctccgcagtgtaccgcggattaaaatctagttagaaaacaaaagcgttgtcattgattttattctattttaatttatatcgaatttttttgatatttcaacactaagattttttcacattttttaatttaagaatcttgaaattacttattaaagaaccaaatcaaaatttctaaagctctagttccttgacaagtggcgttgtttaagattttaaataatcctaatatctctagtaaaataaaataacagccaagtacgacttttttgtattcactctctctctcaaagattccgtctatagaatcattttcacaattagaaatccgaacccaaactcatcaattttacaaattctctcttatctctatg

SEQ ID NO: 18916 - DNA, 3003 bp, Unknown; identical to SEQ ID NO: 18915
  misc_feature (1)..( 3003): 2750-1469P.txt file - cDNA_ID_1819873; gDNA_ID_2926154; Annot_ID_139435

SEQ ID NO: 18917 - DNA, 3003 bp, Unknown
  misc_feature (1)..( 3003): 2750-1469P.txt file - cDNA_ID_1819889; gDNA_ID_1620632; Annot_ID_47274
ttctggaaaaacctctagttgtgagcaacctgagagtattagctcttgaagacatttcagcttataaagatcagaagaaagatgcttcagctttttgcagttcttcagattcagcaaagcaagtcttctaaaggtttgaatggattcgggaaggctctttataacagtgccatctaaaagtagaacttcaacattttccgagatcagtgggaatttctttaagctggagcagccactgagaataagagtttgcaaggattgagttttgattccttttggaagactcctaaggcttgtgcaatccctgagattgaggtatataagcttctccaaacaatttatcgttgacggcaattttttcaaacttgtacatccttctagattcaacctctcaagattatgagcattagccaaacccaaacactgacgtaaatttatagaatgactaaggtcgacccatttgagcattccaacatcctgtgaaaaaaaatacaaccacaagtcaaatttttgatgcaaatcaaaattcactttagcttaggactgatcaaactgacgtaaaacataccttttcatcatcccaaatttcttctaattgactatgtggcaatttaaggtctacaagattcttagggtcaaagtctagagggatactctgtagtggataaccatgccagtgtagatatgtaagctcgttaggaaggaaactaagtcccctccgcaagtgtagtttaaactctgcttcgcatccacgggaacaatgagaatcataaattttcaagtatttgagattgtacatcccttggaaggctttggcacttagacgcattgctcttagttttgatgtgtcgagaaaaatgcctcttatcttatcagttccctatcaatcaagtagtaaatgtacagtttttaattcaaagcatgatactgtaacataatacaaaattgtagacaatagaatatcatcaagatatgtcattactcattaccaggccttcggttagcaggtcacaaatatcttcactgtcccataatctgatatgccattggcactggttaccatgtcgtgatagccacctacagtctcttatacctattgtttctacttttaaactaatctccttggccatcgtttgcaacatgtcatgcatctcgatgcgattatcagaaagagtgatcagacatttgtcaacgagatcctttaccacgccagagacgtccacaccatgactgttgagaaggcttgtcacgtaatccacattctctgatctgaagaaacatgcaatatccagaaaaacattcttctgttcagtggtaagctcctcatagcttgtttctagaacttcgtagatatctccatgtgatctacttttcagtctatccagtttagcttcccagtacagatcatccctctcacaaagatcagatcctaacaccttaagagccaaagggtggcctttagcgtaatcaagaaccatatttgtcaaaccttcgaactctttcaaagggaaagagttactaaaagcattcaagctaaagagcttcaaggcttctctatcattcaatttcgggagcacgtattttcggcctttgatcgtctcaatcagtttactatctctagtagtaatgataattctacttcctccttgataccatttgcaatgccccataagatatctgatttgcttttcatcattcacatcatcaagcacaataagtagcctcttgctcttaagccgccgctcaaatctctcatgtgcatttccaggagctccaatctccaaatctctatcattaagtacagtggaaaagagtttctgcagcaaagattctaacccgcttctacctgaattttcgcggatattagtaaggaagcagctaccgtcgaactgaccacgcatacgtccatacaaacaatcagcaagagtcgttttcccaatcccaaccattccaacaatgcctatgatatgaacggtatccaaatcctcccatgataacaacttttcaagattcttcagacgcgattctatccccacgagaccttcgttcccgcttggagccaaatcattcaacttcttgaatgtgtcaacggctatttcatcaacaagtttggcctcagacgtgctaacaaaatgacaaaaaagctggatttagcataaactttaatagcatctctaagaagataaatgtagaactttgacacaaagacttggtaagtttttttgtgtgacattgatgacatcgatctagattttgcaaagttacctaatttccttgactacataacctaggatgttggatgctgaggcaagagcagccttccacgatgaaatttcttccggcgtaactccgggaaaagtcaattctggtaacttgaacggcaccgcaaaactattcctctgtttctcgacgtccgatttgtcaactttgtagaagattggtaccactagctgttggttgctgttcctacattcgaggatcttcactaactctcgaagacaccacgcagaatttgcatagttcgtggagaagacgatgattgcaatcttggatttctcgattctatcgaaaagcgcagtgagattgtctcctcgacggagtctgtcgtcgatgaatgagtcgattcctcttagacgaagtgctttttggagatgaccggtgaagttgttgcgtgtgtcaaagcctctgaaactgagaaacacatcgaactctgctgaagatggagaagatgattccatgggagaaaagctctgatccaatttgtccagttttaaagtcaacgatgagctgagaaaaacaaggcttgtggtttggtttctctcataattgcgagaccggacaaaaacaatttatccaatataaaatacttaattagtggcacgaaaaaaaaaacacgaaaagtcaacaaatcgatatgtgagcaaagtaaatttgtgtttttgattattggggttttaaaagttttcttcctcattcttcgtttgttaattttaaggatcgatg

SEQ ID NO: 18918 - DNA, 3003 bp, Unknown; identical to SEQ ID NO: 18917
  misc_feature (1)..( 3003): 2750-1469P.txt file - cDNA_ID_1819889; gDNA_ID_2926154; Annot_ID_139430

SEQ ID NO: 18919 - DNA, 3000 bp, Unknown
  misc_feature (1)..( 3000): 2750-1469P.txt file - cDNA_ID_1819897; gDNA_ID_1620632; Annot_ID_47272
caaagactaggacgttcactagaaatcccattgcctccgcactggtgtgatattaactttgttggacttgcgttatctgtagttgtctcattcaaggactatgaagacagtgcgaaacgtttctcggtaaagtgttgtggcaacttcgagaacaaagacagttccttcacgagatttgatttcactctcgcaggctggaacgaaccatgtggatcccttagccatgaatcaagaaagctcacttctgaccacgttttcatgggatacaacagttgttttctcgtcaaaaatgtccatggagagagtaacagctgttgctacacaaaggcttcgttcgaattctatgtgacagatgatgaaacaaggaagaagatagaaacttgtgaagtgataaaatgtgggatgagtttaatgtatgttcctgaagatgatgattgtatgttgctaaagaagacaaatatagttcagctgagtttgaagagcggaccaagttgttcctacgatcttgatgatgttatggatgacgttagacccaagagaggactttgccagtttgttggtggtgaagaaccaggttgtaagagaaggaaggaggagaagatcacagtgagatagaatcttaagttatgtcaaaaattttgttttattaaatgtcagtacacatcaccattaacagaaaaagagagaatgtgcaatactgatttaaactatggacagctactaaaataatcaggtaatcattatgtgcatccatatattcaagaaccgtatatctattaaagatcaacaatgacaacaagaaaacaaagatgatcttagaactttaaacttgtgaatgaatatcttggctttcattatgcagctagaaagaaccgaactttggagctataagctaatttcgaaatgtcgattccacatatggagctagaactacacacatacatagaagttaagagagcacttaccacggttgtcaaatcactcagagtgcattgtatggttgcataaacctcacatgtaaatctcaaacggcataatgtcacctgaaacttcataccaaaccaattttcaaagattaaacatatactggagaaaatgatgtaacatgtcaaagcacagtcaatttctaaacaaacactttaatctcaggagaaagaagaaaaacagattgcttggatcaaccaacctcgtggattctgaaactttgtgaatcttgtttcacgtttttttccatcaaatttataattttgataaatttggaatccaaatttcagagtatggccgaagagaagatggccggagaggtttcaagagatatccattaaaatccaagagcggtgaaagtgagaataggcgtttttgtgacgagtcgagaagaagaaaattcgatctcggaacagtagaaaagtagctcgcgggaaagatatcggaaatgttgccgtttcggtggtggaaggcattgcggcgatggcgtcgtcagattgtggtgacaaagacaaatcgaaattgaggaaattgggaaattgcgaaaaccgggtccacggagaatacggaatgtcgaccacagtggattattggtcggtgaaattaaacacgtataataaaattaaaataaaagctcaaaaagtgggaaacccgcgacaagctaacctccttatttgtggccacgtgtatggccaccatctcacttcgttgatgaatgtctagtaatgcctagtaagaaaccaacatatattattcaatttaaaaatatatgtatttaatattttacattaactataatatttaaatagtaattcagattaatattaatattaataaaataaataaattcttatcgagacaaatttaacggaacgaattttaaaaataatattaataaaaaaattaaaatatcattaatatattgttttaatatagtttaagttttaaatttattattttttgatactatcaatattatacatataaatcagtctgatttacaaaaattatataaaataaaatatatatagtaatataatgtttttagtaacaattaaattataaaatataaatatctcagaaaatgatataatttaaaaacttatatataataaataatttttaattttaatatttttattaaatattacatgagatgagttaagagattacaagacggtttatattgtggaacggattatagtagatgagtttgaatcaatatttataaatttttaaaatatcagtaatatgctggtttaatacgaattaaatcctcaagttttaattattgttcttaaattcgtggtatatgttacttaataacaatcgtaaacaaaacaaaaaaaatattatataaagataaataatttaaaattttatattttatatatatatatatatattagaaaaaaaaattatcatgcggtatattacggatttaaaatctggttttataatatacacctcccaatcaaaacaaattttacaactacaccaaaatatttgtccctaattattttgagaccttaaaatcttacaatgtaaaatttggtaggggccttaaattattattttttttctttctaacaatatccacacgcttttatgccgacatggtccaggtgttttcaaactacatattttattatttttcgtcaaccgtgaaataactattttatatttcctagaatttttggtaaactgaataaaaaatataaaaaaatgcaagtaacgacggaagaaatcataaagtaataagaaaataatttaaaagaatgggtacatgcgtcaagccatgacattaacaaacaaaccgaaaaaagaaaaaaactcatctttctccaaaatcacacaaatcttctttatttgttattctcaatccttccttcatccccaggtttctttcgattcgttgagtcattcaatttttccatcactgggtttttctctctgaatccgatcggagaatccagtcgattactaatctagcgctctctttttttctactcgatg

SEQ ID NO: 18920 - DNA, 3000 bp, Unknown; identical to SEQ ID NO: 18919
  misc_feature (1)..( 3000): 2750-1469P.txt file - cDNA_ID_1819897; gDNA_ID_1620632; Annot_ID_162720

SEQ ID NO: 18921 - DNA, 3000 bp, Unknown; identical to SEQ ID NO: 18919
  misc_feature (1)..( 3000): 2750-1469P.txt file - cDNA_ID_1819897; gDNA_ID_2926154; Annot_ID_139428

SEQ ID NO: 18922 - DNA, 3000 bp, Unknown; identical to SEQ ID NO: 18919
  misc_feature (1)..( 3000): 2750-1469P.txt file - cDNA_ID_1819897; gDNA_ID_2926154; Annot_ID_198266

SEQ ID NO: 18923 - DNA, 3000 bp, Unknown; identical to SEQ ID NO: 3219
  misc_feature (1)..( 3000): 2750-1469P.txt file - cDNA_ID_1819901; gDNA_ID_1620632; Annot_ID_47271

SEQ ID NO: 18924 - DNA, 3000 bp, Unknown; identical to SEQ ID NO: 3219
  misc_feature (1)..( 3000): 2750-1469P.txt file - cDNA_ID_1819901; gDNA_ID_2926154; Annot_ID_139427

SEQ ID NO: 18925 - DNA, 3000 bp, Unknown; identical to SEQ ID NO: 3218
  misc_feature (1)..( 3000): 2750-1469P.txt file - cDNA_ID_1819913; gDNA_ID_1620632; Annot_ID_47268

SEQ ID NO: 18926 - DNA, 3000 bp, Unknown; identical to SEQ ID NO: 3218
  misc_feature (1)..( 3000): 2750-1469P.txt file - cDNA_ID_1819913; gDNA_ID_2926154; Annot_ID_139424

SEQ ID NO: 18927 - DNA, 3003 bp, Unknown
  misc_feature (1)..( 3003): 2750-1469P.txt file - cDNA_ID_1819936; gDNA_ID_2926148; Annot_ID_139163
atttctggaccaatcggatatccacgggtttactaaaactctacccaataaggaaatttcctaaaattttaacccgccctaacccggttttttggttcgggtattgggttggttatcgggtccgtattttgtcagccctatcaaagataatctaatatatgctccaattaggtccacaaatataaccaaaatactatacaaagactaattctaagttaggccaaaaattagatccactaatacaaaggaaacatgtttcttaccaaaacaacttgtatacaaattttacacatttacttaaaactatatatgttatatttattataaaaataacatttttaaacaaagtcaatccaatgcagcattatatgctaatagtaaaaacattgaaaaatattatgacatcgcttttatactatactatttcttatgtaattgaaacaaagtatacaatttaatttatacaaaatattaatgctcgtgctgtatagcacgggttatgatctagtaacacttcatttccaaaggacaaatcataccattatatccaccttaggatcatggactcatggtgccagatattttgcatcattgccaagcagaatgaaagattttcctccacaagagatttgagtttataaatatttggtgagatttaacaaaaaaaaaaaatatatatatatatatatatatatatatatatatatatatttggtgagataagtcttaacttgctacattcaaagaaactaattaaaccaaaaaccaaacactaaaagaatagtaaatcgtcaatttcatattagatgagctaataaagcatcacagcaataaattttgtctatctccatcacttacaccctttttttgtagataatgtaatttcttcctcaagatctgaagaatcataaatcacatagtttagtcaatgttacaatacacacgactaaaagaaaaattacaaaattttattgatagaatttaaaatataccactagacactagacttttgtcttttcattagtcattaccgcttgatatttttactatcttacgcatgttatgaaagattataaagcttaggttttgggtagcaaaaaagggttaggaaaaagaaaaccatactatttgttatccgaaaatgtcaaactaattcctctaactgtggtaaaaggttataaaatcaaatcctctagattgatgtaagtgatttttaaatcgttattcggtcagatcacaagttaatgatgaacttttcagggttcaatacatggcgattttagccatggatccccaacgggatcatgggattacggtccaactgaccggtttggaccgggtcttaatatattgaacaaaatacaagaaatctctcattcacacgaatgattacatttcagaaaaagaaagaaaaaataactcaaaaaacttcacaccaatttgcatcacactatattacccattatttttctacaattatgtggtccacttttcaaatagttcactctcatcataaaccggccggggtccttcaaagctcatgcagttgtgcgttgtaaagatatattgtattccaacaactaattcttgccaaaacacttttggctaatgtcattttcattgaaaacaaagcattataaataggaatgatttgtcatttctggaatggaagaacttgggttttagttaacatttgtgcctaaccaacctctcgtttatgtactaaagcattgtccttgtgattgtgaataaccaatcgctcatttctgtgttagaacagtattgtttattttctgttatttgaatcatttccaatgagaaatgagttacataacacctttatttataaacacaaagatgcacacaaggagaagcaaaatcaataagaagaaaccactccacgtggcccgtcgtcagagttacataattggtgaacgactaaactcagaagaaacaacatgtaataagaaacacagaagcagaagcaaaagccaagcaacatttattttgtcgacaaaaaagccaagaaacattcaatgttgattttgtctaagtaaccaggtgtacatacattacccttaaccatacccaaaatcgtatgtactacgatatgtgtacgtaacagtatctatctacatttatattttataagacattattaaatgggaaacttatagtggctagtggctgctacttggctagcaattaacatcaataatttaataactcaaatgtgaaacatctcattcttctcctttattacaccaaaccatttctcattctttacttaccggtcaggtcaacaattctaccattccccatctttggttaagtttatcttttcattttaaagaaaatatatatgaatgttcatccaataattccaacttcttaaaattgttaatgaacattttaatcaatatataattttaatatcaattttataaataatagaaatgtgaaaaacgcaatttctttgctccttgtagcagtaacacaagtcaaagcaacatttgttttcatttgtttgtcagttagctattttatctacaataatatgttatgctttctgaacaataaataaatatagcattattagatatattcattctgtattttgatttgtccaattagtatatgacacgtctacaagatacatagatctttcattatttcactttctcatccaacgtctggtgaaccaaccattcaaaaatcaaaagtcaacttttaatgcacttgagttttggtcatgcattcatatacatacatatatacatagaagtcattacatgcattatactttacttatgtcaacatgttgcaaaagcactaagatgatatacgtatacatgcatattgcaaaaatcagtggtcccataccattttaagtcatcatgagcgtatgagagtaaattcttctcacatattaataacaacccttcaaagttataagatttttagagagagagctaccacgttttcgtatctccgggaacgatg

SEQ ID NO: 18928 - DNA, 3003 bp, Unknown; identical to SEQ ID NO: 18927
  misc_feature (1)..( 3003): 2750-1469P.txt file - cDNA_ID_1819936; gDNA_ID_1620633; Annot_ID_47305

SEQ ID NO: 18929 - DNA, 3003 bp, Unknown
  misc_feature (1)..( 3003): 2750-1469P.txt file - cDNA_ID_1819956; gDNA_ID_2926147; Annot_ID_197824
aaatattttaaaacataaaatgtcttgttaagtaactcatttacgtcaacgtgaaaatatatctatgtatatcagtttgattacctggtagcctgagtgtgagcagtagaaggggcaagaagcttggtaagaacctctgtacttatcagcaaattcaaatagctaccacaaaatagataatttatacgttaccttatgattgaactgatgtaatgatatttatagacttaattaattaatatgaatttacactcacggatttagcattgtttagtaatttggatgaatatgtagaatcaaccagtttgaaaacaagtgaggccgcggcaagagcggctgcggcttcacctgcggcttcggaaccgggggaagaggaagagatactatagagagttctaggtgtgtccatatcttctggtctctcccaacaactatgatctgaatttccatctcctacctatttacatccattaccaaaacagaaccaaaaataattaattgaatttcgatagtgaatttgttgaatattgtagaagtatatagtatataagatacgagatatatactatttgggacatttaacatgaaatgaaatatttgaataattctctatactagtatacctcaaaacaaaccaaaatgtgacagttcggcttggtttagacgtgtaaaccgaggggaaaagttagtttacctgtgtatatagcatgttggtcgacgtatgagcacggaggataaaattagttccccatttgatagtagaccggagataaccaagctggttaacgaaagtaatctcattctggtattcaagtgcagcccaactcaacaaggttgtggtaaatgacattggccacacaaattttacattgtcaccagcatcgtaatatcctccaatcaaattcacctgagaaatcaaacacccgaaaatttggttaagtctataagagataacataatgccaaaacttatgaaataaggttccatttcggaagacatatatgcatagatatagagatgtttatgaatatagtcggtttacattagctgatgcaccgtcagacaggccagaatcagctcgccatttaaccctttgattagtcgggagtttaccagatctttggccttcaaagaacaaaattgatttgttcagtgcatctccatagtcaagagcttccaagctttcgaaagccaagaacatcccaattaacattacaaccaagagtttgcccattttttattactagactgtttttagaaatgtttctctttcgaaatgggtttttaagtgttgcttgattttgcatgaaatgtgttttagagggtatttatagataccccatgcaagtaaagttgggtacgtaaattcattgcatgagatgtttcacgtaattttagggtaactttggatgtactgttattatgttctctaacaaaaattaagtttagatgataacggaattacaataaaatatttttgatatagcaagttgtagttattcacatcgtatctttttttttctaaccaccatactttatttttttctcttccatctctgaacgtttataaatcgttacttaatgaaggagttgtaatatattccattataaaggctgttttggctcatttacagcaaaacaaaacaaatattgaatcacactacttaatttttgtaaatggttatttattgttatcgttgttttttttaaaactaataaacaatatgtaaaacctatatcaatttaaatcggcttcttaagaaacaaatactttacgtcatgtaatttccataaatttggaaggtctgacgcaaatatattgctgtagtaatgtaaaaatacttcgtaattaacgatccaaagttgtgtatagttatgcatctgaaaacttgactttaaaatatatgaaaatatgagaagattttttttattactttttttttgtagaatgtaaaatttattgataaaagaagatagtgttactatgaatgcgacatgaaatatgaatgtttgaaagtttcgaaaaatttaaagtgttacactaaggagagattattgagtgcgagtttgaaaccagaaacgtaggccaccgtaccatcatagtcagaggaacccgtcatttgcgcttagtctatttcggacatatcaatgaattttatgagcatgtatgggggcaggagttggtgcctttccatgacgccgttcattgcgctctcacaataagctatgaattgtgagttgaaaatcataccgcaacacaaggacatcagcaacaaaataaccaacaactactcccatgtcaatacttcctcgtgagcctaagagtgcatatagattccccagagggcacaaggagacatgccaaaaataagtttcccttctagactttacctccattttgtgcagtggtcgagctaagtctcagtattttaagatttgtttccacatcaaggaaccagagtaagtgttaccacaaactgacaagagagaaccgttccgaagcaggtttttgtgtctccataaaacccataatgagtcattttccgagaccggtctccatattagcttcaagatacttatagtatttgtttcagatagcaaatgtaattccaaacctgcctcttggtttggtttacaaatgtcactccaagcaatctttgctttttctggttaagatccggacaaggccaaagaaaagcagacgtgagaatctcaaattcttttcacggtaatagtttggccaaaactgaaatatgaaaaacaaaaaggatttatttgcaaattctcaacaaaaagccacgtcatcaaatccttttcacggtgagtctctcttctacgtggcacaacccttaccgggaacctctctattctctcaatcgacaaacttgacttaaggattccaaacgtcgtcgcatgacttgtaactctgcaccattgctaatctaacatctcattctccaaaaactcaggaactcgaactatcttccacaactcacgaaaatg

SEQ ID NO: 18930 - DNA, 3003 bp, Unknown; identical to SEQ ID NO: 18929
  misc_feature (1)..( 3003): 2750-1469P.txt file - cDNA_ID_1819956; gDNA_ID_2926147; Annot_ID_139156

SEQ ID NO: 18931 - DNA, 3003 bp, Unknown; identical to SEQ ID NO: 18929
  misc_feature (1)..( 3003): 2750-1469P.txt file - cDNA_ID_1819956; gDNA_ID_1620633; Annot_ID_47298

SEQ ID NO: 18932 - DNA, 3003 bp, Unknown; identical to SEQ ID NO: 18929
  misc_feature (1)..( 3003): 2750-1469P.txt file - cDNA_ID_1819956; gDNA_ID_1620633; Annot_ID_162765

SEQ ID NO: 18933 - DNA, 3003 bp, Unknown
  misc_feature (1)..( 3003): 2750-1469P.txt file - cDNA_ID_1819964; gDNA_ID_2926147; Annot_ID_139154
tcgtgtattgattatgtgattatgtgaagtctttaattggtgaattttagatatgtgcataagaagtttagtatgcagtataaagcaacgattggtgctgattttgtaaccaaggagcttcagattggggaaaagcttgttactttacaggtttggggcctttttcttttggttttgaaattacttttcttcgagatttgtgtgttttactttttttttttttttttttgtggtttttagatttgggatactgctggacaagagagattccagagtcttggtgctgctttttatagaggagctgattgttgtgctttggtttatgatgttaatgtgttgaggtcttttgataatctcgaaacttggcatgaggagtttcttaaacaggttcgtatgacaatttccttctttctgtcacactttgttttggtatgatccatttgttatatgttttgctttgtgtgttatgttataggcatggaacataggaatgtggtagtttttgttttaataggaattgttagcttttgagtatttagagtcacaatcttcagatttttggttaacatttcgtttaaacaaaacccagagtcaaactctcttttttgatgatgttgtgggaagagtttttgattatcgtcgtatgtcttttggttctcaggactatagctgaagttttgttttcccgtgagtaacaagatgattgagcaatggaacatgttttttatgtttgaatgatcatttgcgtttttttacctagcggtttactggttaagccaagtatattactaacttgctttcgtgttcataacagttttagaattcatgactctataaaccctgttctctaatcagtgtgttttcctgcactcacactttcaatccttttaacaatgtataacatgctaacttgtattgactcccttttccatggcatcgttttgggactgtccaggcaagtccatcagatccaaagacatttccgtttatagtgcttggaaacaagattgacgtagatggagggagcagtagagtggtaagaggaagatcaagatatgtcttccatcgtgctttaactcttttactcagtcttgtttaattcctctctaactacaggtctctgataagaaagcagctgactggtgtgcttcaaatggtaacataccctatttcgagacatcagcaaaagatgacttcaatgtcgatgaggcattcttaaccattgccaaaaccgcccttgctaacgaacatgaacaggatatgtaagttttctttttggtttagctctactaaatgagagctcgaaagtgtctaattgttaaaccggagagtctgaatattgtagaatctcaatctaaatctgaatatgacgtttaaatgtagaaggcagatagtgtagcttaaagacagtgacattcttacatgtctatctgcgatttgtctacttctgaattccaaactcttgtgtgatccgaattggaaactaagaatgcattaaaaataaccgctgaatacttatacagtatgtacctcatacacaatggcttgggttaattgcagatacttccaaggcataccagatgcagtgactgaaaacgagccaaaaggcggtggttgcgcttgctgaaccacagatttgaggattcaatgacattcgtttttttgatgcattcatttgaaggttggtgtactcttgagttgcagaacgataagcttgtagaagcaattttttgtcattccatcatatattaattgattggagaagtctgtgtatgatcaatcgattctgctggatacaaattttatttttgtaagaagaaccattattgctcttaatccctatggcgatataaagttgcatgctacactatttcagtttggtttgactcaactgtcggatatgttactacatctatagttagaccatatgttcattttgcatgtatagtttttttcatagaaatattgtaaaactttgaagtcaaactttaacctagatcatgtgatattttaaaaaactttgtgaatgtaatacactcgaatagctattcaggtgacaaaacctaaacagagattgtcttaaacaattcagagaggatatagcatggtcgtctattttctttagttctcaggctgtattattacccggacgtgatctgattctagctgctacagtgtactatctccaacctggaggctacatccctgcagaagaaggtggtggactcagtgaatctgcaattatactttcaatgcaatcattacagctttgaagaactaagagagatatcattgtccttgcttttcttttgctatagcctaagtggttattgcctattggtcatgttggtgggtattgtactattgggtattgtactattgttcactcaagtatatgtatatgaccataaaaaaaaaaaaatggttattgcctattggtcagttttttcttttaagtttgacccaaatctttccataaattgtgataaaacttaattcataaaatatataaaatatattttatatgtcttttaaatagaagtattattagttaatcatgcagtgtatcattcatccagtgtattatatgttttttaaataaaagtattattaaaaaaaatgtcattttacgagacatggttatatggtaggacgggtttcgatcgatattaatacacaacgatatactagagataaaattgttgaattaacaatcgaaatacaattatacgatcttaaatactaaacaaaaaattaaaatttaaaaattagtttaaaaaatcgaccggtatatccaaattcaaacataagttttaccttaatgggccaacatatgggccttaaaaggctttggatctgttactattacactccacttgcaaaaacctatcttcttcttcttcttcgctgaacaacaaacaacgcttcacaaaaccttccgataaacctcacaaccctcttcctcctcacactacagtaagaaaaacacgcgcgaaagctatg

SEQ ID NO: 18934 - DNA, 3003 bp, Unknown; identical to SEQ ID NO: 18933
  misc_feature (1)..( 3003): 2750-1469P.txt file - cDNA_ID_1819964; gDNA_ID_1620633; Annot_ID_47296

SEQ ID NO: 18935 - DNA, 3003 bp, Unknown
  misc_feature (1)..( 3003): 2750-1469P.txt file - cDNA_ID_1819979; gDNA_ID_2926147; Annot_ID_139149
ctcttttatcctttttaattttctatttaatttttgctaccaaacaatctattaaaatcaaccaatcatatgcattctctttcttatatcattaatcacttaaacctacaaaaaacgctggacaactgaaaccaataggtacaactatgttgatggacttctacgaaaaacatataattacatatcgttttctttttctctttcattttcaagttataataaaaaagacttcagtcatacgtgttgcttataatggatactattaattttcttgtcgtatttatacaaattaatatgttttgtattggtacaactaagtacaacccgcacaactaaggtctattcacttggctagttttcagaatattataaaatatgaaaatttaaaaccaaactaagaaaacttaaataatgcatacacaattgtaatgaaattacataattagtttttgacaaaaatcatattttctaaattaatgaaactcttatcacaaaatctaacattcatacattaacaaccttatactttcatggttactttgtatattttaacaaaacaaattaaaaaatttaaatacttgtaattagataaatataaatacactgatacaaagtaatggtattttgatgggggaataccatatgttccatccataaaatttaattttgagttgataacaactagatttattatattctcgatattgtacaactatgacaaaaaatgtgcaaccgaatacaactgtacaactatgggcaatatatttttcagatatttatagatattttttagatatttgtagatattttataataaaaattagctttattcttttgtgataaaaatatttatttattttttgtcatcaaaaatatttaattttatagttaaataaactattttgttccctttcaaactttttttttccttttcaaaacactgttgtttaataaaataaaatactaacattcataattttttgtgttttgttttggatcaaaatacgttgatgtgttgattcatatttattttggagttttttttgacaaaaaatcttagattcatacataaacccagatacatagttgtacatgagcgtaccagttgtacctaaacgcttagatctattatcttagaaaccgaaagacagccgaacaattgtatctaaaccaaaaacccaacataattatatctaaaaatttagccacaattatacctaaaaccaaaaacacaatactatctaaagactcaaacacgaagtcttattgttctcgttgtcattctccttctcaatttctttctccttagctttctccttcttcccttttcttctagtttttatcattcaaaagcaatctcataatattttgttttaatgcatttcacaaactatctctaaggaacaaaattcaaattcattcgaatcccaattgtaatcctaaaaactaagtcataacagctattacaagaggcttttaagggacaatttcgattttaaatcgataattaactcaaatttgaatctatatatacatttttgcagcaattttgtgaaataaatgttatagttggaacttatttacaatggctgccactggattttaatgtttgtttttgataattagaaaaaaaatcttcaaattaaatatttgacttttaacaatcttccctaaatctctccacattaactacacgattagttactgaaataaaacttccaaaatatttaatatcatttatttactacaaaattatcattttttatattgtttttctccatgactataacaatttaattataatcgtcaaaccgcagagatatttgatagcatttaattattacaaaattacaaaatatttagacaataattcataaacatatcataaataagattaacattaataaaataaatgttttttttatgggacgggttggcgggacgggtttggcaggacgttacttaataacaattgtaaactataaaataaaaatatttatagatagatacaatttgcaaacttttatgtatactaactttaaaaaataaattgtttccgcggtgtaccgcggattaaaatctagttgtactcataaaaatccaaattataatcgaaattttatccaaaatccatcatttttaaacaaaatcaaagagaaaaagagatcaaactatcaaatctaataagaaataaaaccctaattaaacacaacaccatcaatcatcatatatggaatagagatggatctttggattgatagaaacaaatgaaaaggtaaaaaagatggatctttggattgatagaaagaatgaaaaggcaaaaagaagacgaaagattatacatggaatagagagaagagagtaaagagaagaagaagaagaaacaaatcaaaagttttgtttttgttgaattgagagaaaaataaattgaagatgaaaaaaatttgatatgagaaattagatttttttttgttgagaataaaagatccaaaattgttatggatctagatccaacatagaggttgggttgtaaataagtaaaaaactctagttttacttgtcttttactattattctgaattaaaataaataaataaacatatgttttttataaaggggctaactagagaatctttgaagctaagggggtggactagataaaaatccaaaatgaagcaaatgacctaactgctgtttgcaacatcatttggttcatttgctgttagctaaccttagtttttgataaccatagtccataggctaaatatcacagaatggtaaagtgtaagccatttcgtcaacgctacacctaaacggcatgaagttggagcttctaattaagaagaacccggtcgggtcaaaattcgggtcactcttctcgggttccccctctaattcaccctctttttttcattcactccacaattacaattacagtcgatggacgacagagccaccgaaccatcacggcgagtctaaaaatactcagagctcctataaatg

SEQ ID NO: 18936 - DNA, 3003 bp, Unknown; identical to SEQ ID NO: 18935
  misc_feature (1)..( 3003): 2750-1469P.txt file - cDNA_ID_1819979; gDNA_ID_1620633; Annot_ID_47291

SEQ ID NO: 18937 - DNA, 3003 bp, Unknown
  misc_feature (1)..( 3003): 2750-1469P.txt file - cDNA_ID_1820001; gDNA_ID_1620634; Annot_ID_47323
gcctaaattttggaaaatatgcatgacagacattcgaaacttcagatccaaatcaaaccgaaattgaaatttgtcaaatatctaaaccgaattgaacacgagcggtttttgagaatatgaaattgggcagagcaattcaaactcaaaaattcaacaattccagaagaactttctcagaaaagtttcgacggaagaaaaagcaaaacgatgaacgtcactcttttggtcgcagacgccgtttggtcgaacattgaatcaaccggttcaggtacttcaccattttactacttctctctttccttttccttgtttacgacattttattccgttgaattttccatctttttctgcagtaaccgaagaacagctctcaatgtcagttctctcttatacatagctgggattctttatttttcccgaaaatatttattgatttttcttcagtcgtttggtatgattagggtttatcgatttaattttgcaaatacagcttgcagctgttgtttggtaagaatcttgagaaagccaccagaataatcgacaagagaggcgtcaagaaaatatctggcttacccagtggaagatccatctttcaggtttcaacagttctctctggttaataaaagcaatcatatttgattatctaagaagatttgtttttttgtttgggttttcaggttgtgggggaatctcagaagagagaagagtatctctgcttcccaggagattactgtggatgttattctttcttctatgatgttgtaagcagaggagagcaccaatgtgtaagattcttaatcagaatgcttccttttctgtttagagattttgtatcaatgttactgacttgttatattctacttttctcttttggctagtgtaaacatcaattggctgcgaggttggcttcttctttgggtacatacaacgaaatcgaggtttctgatgaccatcttgccttgatgctctcaaagatctgaagctttcaatacaactacatgtcttaggcttataagtgccagtaacctgggaatgatctgtgtctttgagaattatatggatcaagattcttcacatgtttgatgaacaatgttgcttcaccttttatgtttaacttgctgtatataagtcttgaactgctatattttcaacttcttaattcagtggaagaaaactatgaactttgtaaaagtagtattcatgcataaaacttttagtgactcgtatacaaagattaattaatcaaaaaagcgtagaatggaaacaaactcaatgatcaaagaaaggaacaagtggatttagagttagtgtgaagaagggcggggaatggggtggacagagaatttcatgttgtggttgcattcgttgtggtctccactggcgaagtagtaagtctgaaccttacggagaagcaacttgaagcctcttgatgatgaacctcctcgtgcaaccagcttcttgcctctggccacattgcatctcttgaagctcttcatgtctgggagcaagtagacgtcgttcttcttcttgttacggtgcttcgtcttggattgggtttgatcatcgttgttgtacttgaaaacaagaacatcgctgacgtagaatggggcatgctttgctgtccattctgtgtaaccgtatccgtttttccatacagtaaccgcaatctttcttccagccggtattggagccgtgtggttgtgtgtagagccagtgatgctggagtggtttgagccagagctgtgattgttgtgtgtagaaccaacgatgcttgagtgatttgagccagagctgtgattcttgtgtgtagaaccaagtatgcttgagtggtttgagccagagctgtgattgttatgtgtagagccagtgctgcttgagtggtttgagccagtgctgcttgagtggtttgagccagagctgtaaccgttgtgtctagagccattgccgcttgaatggttcgagccagtagaggtgtgaccgttgtgtgtagagccagtggcacttgaatgattcgagccagagctgtgaccgttgtgtgtagaaccagtgccgcttgaatggtttgagccagagctgcttccccaaccccagtttgtatctgttccgtcggagctccatccccaaccccagcttgaaccacccgagttggagtctgaaccacctgaacccgagccagaagaaccgccagagttgccggatctccatccccaacccccgttcgaaccggactggccagaaccccaactccagctccatgcttcagcactcccggagaacacgaacgcagtaaccatgaggacgacgagtaacttacgtccacaataaagaaccatcatcgtgtcttcttcttcgttttttttctctctcttttttttttatggcttttgtgagctcttcagagtttagagtttcggtatttatagagtaatgagagtcggttcccattatttagtgaatataattttatttgtttttttagtaacagtaataggatttttttctttttcttggatcaaatagtaataggattttaaaagtggataaatctagctttagttattattgtttgaattttgatgagtcttttttttttttttttttgcatatacgattaacattgcttaaggatattgtatatatctttaacacacaaaaaaaaagatatagtatacatagttttgtttgatattctttttattttcgcacaaaaaaaaaaaaaaaatcttatttatactataatgaatctaaacatctgtccacctttaatccaagtacctctcccaactactgcgactaaatgacccatttgcctaaatgtagtcctttaccttactgaaaatagcgaggacaaatcagtcattcaccgccctaaaacacgctttgacatgtatttatccatttactgttattttatctgtaagaaatccaaataaactcatttctgtaaattaggaaacttctgagaaagtgacgaaagcgaagaaggtttcggaagtaaatatg

SEQ ID NO: 18938 - DNA, 3003 bp, Unknown; identical to SEQ ID NO: 18937
  misc_feature (1)..( 3003): 2750-1469P.txt file - cDNA_ID_1820001; gDNA_ID_2926206; Annot_ID_141743

SEQ ID NO: 18939 - DNA, 3000 bp, Unknown
  misc_feature (1)..( 3000): 2750-1469P.txt file - cDNA_ID_1820009; gDNA_ID_1620634; Annot_ID_47320
ctaacaagaacatgactacaaaatcaattcaagaggcaatttacaaacctgaacatgttcacaaagaccaaaacttcatagcaaaattcgaatcttttaatattgaaatgatcagggtaatagagatctcataagttttgaccatcaaaaacgtagtcaaagagtcaaaagaagaaagaatcctaaaacaagtttagggaaggaagagtgggattataacttactgtgcatataaggaaagagatgtctgttaacgaatctagaagcttcaggtccaccatgaccatcgtatacaccgacgtaagtagcagaagaagatgtgaaaacctgactctgatcttcaagcctggaattggcttgaaccaccgcgatcgaataatcaccgccagcgtgaggtctcaattccgattgccagagtaaaccatcaccactagctctgcttcccaaacaccgttcgagaggccgtgctaaagctcgcaacatcacaacctacttagggtttttctatacagagagattctgagtgcagtagagttagagagaaagagataacaagattttcgattcgattggatgagagaaatcgaaaggtttttttttattgaattttgattcgttcgtttttgtttgatctgatcggttttaagggattcgtgtgtgtgttgagttggtggtggtaaaagaaaaccgcgtgaggaagaagaagaagaatattgatagagatgacttgtacttgtgccgtttcttagaaggctacgtagactacgcgtcgttttgttttaatttcgccctcccccttctctttttttttgcagtttttttcaacgcgttgtttatttttgttattcttctccatttagctttatttttctcaataaatagacaaagttttggcccaaacataaacgtcattgccgtatattatactaaaatatctttcttctggaacaattcaaaaacttaaattctgattcggtccaacaaaaaaatatctaaattcaacagctacttttatttctttttgaaataggagatattatattaatgtagtgtataatatatatatttatttatatgtgatttacagagtcaatgtttgaatattatttagaaatagtagacccttttgaaatataaattcatgtctacgatgagtaaagaatcaattaaattgttcatgtctacaaaaatgtttacatcgtctgcaaatagcaataaattaattctattttgtgtcttatatattttgtatttgaatatatcagtgggaaattgttataatgagcgaataatgaatgggtaaggatgagtaacctgtagccaacgtgtagctgatatatttgcttgtcaactaagaaagacggataacaactgaatacaatttcttgctaataatctagtcatcttagtatctatattattattaacctaattttattatcacgttaccgtttccggtataagaaaaaaaacatgttctggtcaaaacaaatctttgtgtgctgtgttctagagcatactattaaaacgatgaatattattgcttatggagtaatttatatttaattacaagtggcacatttttatttggttgttataaaaaggtttgcattttgggattaagaaattgacgtggaaggacttatatatatacgcggaagcaactggaaattcattggcccaagttgtcgaacttttttgatcatgatgtttacctttacatttataacattatggatgcgtatttatcgttgttatggatcatagggtgattttcaacatatatagatccattcattttattttttttaacatttgcatatccactcatattataccgatgcatacaagattcatcaaacaaaaaaaaacttaattagtactactattatttctgtcaatgctcactaagaatctctctagtatcacatctctcttcagtgaacaatgctctgtgaaccccaagaaccaaacattaaatgagtcaccttctttcttaaacaacagttctatagcccacaaagagagctccttgaaccttcttctcgacacaaaggctacttgaatcttcttcttgcttattcttttctaaactcaaatctctatatgaaaatcatttgtagaatggttacacattttatttggttatcaaaaagaagttgcaagaatatagactattagttaagaaaataaactcatttgaaatttcgttggataatgtattgatctcggcttaagactctctaatttgactgtatataattaataaataatcattctttactttttaaccataaacacaattcaatgttggactacatatccaccttacattctaagatcgattccaagtcattatcgacagcctgaatgaagcaaaacaactcaaaagaagcccacctaattcaaatcacaaaaacgttcaagttccatcgaaccaaaacttaaaccactctacgcaaccaaacttcaaccaaaaaaaaggataaattcggcgcatttttttgtatttgttgaccagtgaagaaaatgacaaactggtcaacgagatctgatcattaaactataaaacaatatattttaaagtaaatagaaatttgtggtgcttcattggatcgacgaaaggcgtcccgatattgaggttcgttacgccggcgaagattttcatcggaaacttatctgatcgtttacgccggcgaagatttccatcggaaacttaatctgatcggaaggaagaaggctcgatgaagagcagattgaagagctacaggaggaagaagctagggttagccacagttatcgtcttctgttctctctgtttcctcttcggtttctatggctccactctactttctcaggtgtggaaactctctgatcttttactctgtactctttagatgtgattggagtctttagcttggttttgtgactaatcgagggttctatgtttgggatcagaatgtgcctcgtgttaaacccaggttgagaatgttggatatg

SEQ ID NO: 18940 - DNA, 3000 bp, Unknown; identical to SEQ ID NO: 18939
  misc_feature (1)..( 3000): 2750-1469P.txt file - cDNA_ID_1820009; gDNA_ID_2926206; Annot_ID_141740

SEQ ID NO: 18941 - DNA, 3000 bp, Unknown; identical to SEQ ID NO: 3245
  misc_feature (1)..( 3000): 2750-1469P.txt file - cDNA_ID_1820013; gDNA_ID_1620634; Annot_ID_47319

SEQ ID NO: 18942 - DNA, 3000 bp, Unknown; identical to SEQ ID NO: 3245
  misc_feature (1)..( 3000): 2750-1469P.txt file - cDNA_ID_1820013; gDNA_ID_2926206; Annot_ID_141739

SEQ ID NO: 18943 - DNA, 3003 bp, Unknown
  misc_feature (1)..( 3003): 2750-1469P.txt file - cDNA_ID_1820048; gDNA_ID_1620635; Annot_ID_47357
ctatacatattacgtctaaaatgttgatggaccgatcctagtagtcttttttattagaaaaatataaaagttaacagtgagattatatttgaacataaataatcttaaatacagtaaaaggaagaaaatagataaagaaatgggatgaccaaccaacaaaagccatcacctatcatataaaaagataatacattttctactactttagcttcaaggatcttaataacacttcgttaccacttgatcaagagaaacaaaaagaaaagctgttcataaaaactctctatcaatggctgctccaatcgccataggaacacgaggaaccatcggatcgcttgtacgtaaagaaatcgactacttcaaaaacttctctacatgtcatccccaattcgatccacggagaggcaattcggaagaaaacaaaaatacatttaaacaaagagatcggtcatcatcacggttgggttcttggttctctaaaactaaatggagaaagaagaagcggcagactcgtggtggcggtggcaagttttttccgagtatgtgctcggcggtggaggtttccggcgagaatcgagttccgggtttcaactataggatcttgaagagtgatcatcagaagggcttgcgtgtgtagaaaggagtcatcatttatgtggattacggtaaagacaatgagatctacatacagtttttcaaatttaaaataatgtctcattgtgttacatacttacaagttacaatgtcaatgagcatatattcgaacttttaaaatgaaaaaagaaaaaaaagtttatgctcaaggaattcctttttcgtttgatccggtctggtctatattcaaatttggattcggttctattcccggtttaaacgtggtatatcgtcgaatacctttatattccacatatatatggatcctacgtagcacaagtcaaaagtcaatcttcaaatgctcgagtactttattttcaggcctcaactttgttgatgctaaaacaaaattgtgcttgtatatattttttactctgaaactggtcttgttggaacagtgaacatggatttgaaggtgacgttatacaaaacttggacaagagctcacatcttgaattccaaaaaagagacgatgttatcatatttgtcacaggtgactaagattttgctcttggctctgtacgtagtagccacctgattaattcatcaactagagtttgagagcacacaactccaatatggaccactaatgaaaagttccttagctcttgaattctggttataaaagatcttgttgaattttgtgggtttctcagttggttaatgacttcaacacgcttatggagctcgatacaaggagagaagaaccattgcttcgattccgagatcatagtgttggatacttaataatcttcacacagtcatgtacaacacatagaatccagagatcaataagagaatggagcgaacgtattttgatggctgttgagttcaactacagcaaactcttgctgtctctatacaacaagaacccgtagtttgcgctgcggtggtctacaaaattatgtcatggcttggccgttttcggaatgctaaagatttgtctagttctgacgaaatttgaggtggaaagtgatgatgaagccacatggacggtcaaaatcgaaatgattgaaatttttgtttataatacacgttctacgtttctttcattagattctttgatgaattcatcagtttttgttcgtttcattcttttgttccttttgtcgtaattttaaacggaataatactatgattttatgaaccttatataacaactaaaagtgtccgaacaagcccttattgacgcacacacgtttttatgtctacaaaattccggatatatcaagcaagtatcatcaacacgtctccaacactcatacacggtcaagccgcctacctaactcaccttgttacaaaacaatatcttatggcatgtgttacacgatttcaaatatgtatatgaataatttataattcttaaatcttcatattactgaaattaactcgttttaacagattgaatgaaaatatatattatccttcatttgtattcgttttttttttggtcacaatgacaataattctactataagaatatcgaaatatatatggagaattccttaaagattagatagacctaccaattaaaagctgctggtaccactaagttttagttcgaacatttgtattaaacccaactctactcttttcgcattttccatctagaataacatctaaaatatgtctataatatatttttatggaaatagataaataattcataattattatatggtgacaaatcaaattaaaagacgttttgaaacttcttttttgactaaacgagctcacagttctctttctcatcacatctctatcattagaaaaaaatattgttaataatgtacatgtttttttttctttttttggggtcaaatttggattcactcaaaatagttaaaacatagaatcccatgtatcaaaaaagaaaaaaataacacctaaccctataaataaaagattttatacaataaagatcttatgtttttttatcagagaaaaacatgtcttgtttttataattctgacttcttagtaacaaatcatgcatatatgaaattcaacaaatttgaacccaaaaatagagaggtgaaatattaaatgaccaaaacaaatgataaaataattcagaggacgtgtgagggaacaagccagaagctacactatcgaaaagatcgcatcaatctcaaccgttggatctttccttcatcatcatctctctctctctctttctcttccatctgacctgtgatgtgagtttgcagatattcaaacaactcaatcctcattccctttgtttcgcctctctggatttcgaagagctgagagattagggtttctcgattttcgagattagagtctaatccccaccaccagcatagctgatatcctggaggagagaatg

SEQ ID NO: 18944 - DNA, 3003 bp, Unknown; identical to SEQ ID NO: 18943
  misc_feature (1)..( 3003): 2750-1469P.txt file - cDNA_ID_1820048; gDNA_ID_2926178; Annot_ID_140452

SEQ ID NO: 18945 - DNA, 3000 bp, Unknown; identical to SEQ ID NO: 3257
  misc_feature (1)..( 3000): 2750-1469P.txt file - cDNA_ID_1820069; gDNA_ID_1620635; Annot_ID_47349

SEQ ID NO: 18946 - DNA, 3000 bp, Unknown; identical to SEQ ID NO: 3257
  misc_feature (1)..( 3000): 2750-1469P.txt file - cDNA_ID_1820069; gDNA_ID_1620635; Annot_ID_162865

SEQ ID NO: 18947 - DNA, 3000 bp, Unknown; identical to SEQ ID NO: 3257
  misc_feature (1)..( 3000): 2750-1469P.txt file - cDNA_ID_1820069; gDNA_ID_2926178; Annot_ID_140444

SEQ ID NO: 18948 - DNA, 3000 bp, Unknown; identical to SEQ ID NO: 3256
  misc_feature (1)..( 3000): 2750-1469P.txt file - cDNA_ID_1820081; gDNA_ID_1620635; Annot_ID_47346

SEQ ID NO: 18949 - DNA, 3000 bp, Unknown; identical to SEQ ID NO: 3256
  misc_feature (1)..( 3000): 2750-1469P.txt file - cDNA_ID_1820081; gDNA_ID_2926178; Annot_ID_140441

SEQ ID NO: 18950 - DNA, 3003 bp, Unknown
  misc_feature (1)..( 3003): 2750-1469P.txt file - cDNA_ID_1820085; gDNA_ID_1620635; Annot_ID_47345
tacagtttcagaaagggaatatcccaaactgattcattaaacagtttactccaaaacctaagcaccacagatttcatatatagacagaaaaaaaaaattaagagtcctctccggttacacctacaagtccaggctccatggttatcacagatgttctcctgcaagaagcatatataggtataaggaaacttaattgacatggttatcacagacgtttctatccctcttgatataattcccctatgtaccagtaccacacccacaaatcacagaaacatatagttaactacagtacattactagaattatcacaaacctgcaaatattttctcttctgcgaccaatgtcttggaacaggaactgtattccggtacgacttcaaaaacactaacagctttggatctgctgaagtcgcgtcccagacctgaaaattgtaaaacagaacttatgaatatacaatagatatctacacaacgagataaaccttggtactatgaacacaatagagaagcatccatacctcaacaacatcaggcctagcggaaacctgcttcagctcagcaatcttcattctccgttgaagctgaggaaacagaaattcagaatattcagaatctaaagaatgcaataaaacaaattgagaggtaataataaggtttgagctatacctttttcttcttattagagatgcctttctctttgttctgattatcctgctcgtcgtcgtctgaatcagaatcagagttaaccttctttttgacatcttctttctcctcagactcatctttcgtaccgtcttcttcagaggcaagaggttcgcggaagttgaacttctcgaagatttccttaaactcatcgttaaaaccatcttcaaattcagcttgctctggaacatactctatcacaatctgctcacaaacctatcaaagagaaacatataccaaaaatcatcagcaaacgataaacaatcacaaaccctaagaaaaaccctagaacacctctccatgaatcgagtacgagaagatgagcacaaagttaacctgtggctggggatctgtattctctttggattcagaagcagcagaaacgtccgatgcatctacatcggcttgggatgctttgttgttcttcttctgcttccgtctgcggcggcgacggtcaatctcacgagatttcttagaggaagcggaggtgtttccgttggagacatcaccgttagaaacgacgctatgaacgagtgcgacggttgaatcggcggtcatattcggtgttctctctgaatcggtgatgtgaaaagagagattgagaggagaaggaagaacgacggaaatcgaggatatacgtatatgaacaagagtcggtttgctgaaattctctctgattctatttccggtttggcataaggcccatataagtagaagacgaatatatctgccaataggcccaacactttatatttttcttcgagtgtaagaattgttttgtagaagaccatctactagtaactaatagaaaatttcaaaggaaatgtatggaacaatattcaaacactactataaatgttggcacgagttaactctacattattcgtaaaaatgttctattgaacttttaaaattataaaattacagtttacacaatgtcttgaaattttgaagaaagttataagtatcaaaattgtatatatgtgggtatttgagatttaaataaaattctctgactaacaacaaaacttttaataaaatttaaatgttttagtttattattcgtaaaaatttagtttttacatgaattgaggtaatttttattcactttgagattttattaatgtgagcacgactcccggtgtatgttatcggttgtttattatgcaattagaacaatatacattgtgcctttttagtttcaaaattgttttcataagacattaggaaagaacacggaaaaaaaagacattaggaaagaattttgtaacggcttttgtacgtaacggttatttttaaacaaggaaaaaaatactgtctataaaaaaaaattatctttacgtagttgtgtattttagaaaacaaaataaatcattttttatttactaaactattattttataaggaaaagattgaaaagagtaggggaaagatatatgtgaaaaaatattcatgcttggtagataaaaaatatttcacaaataaagagacaagtatatgtcaaaaatatcatgtcttttgaataaataatcttctaaaaaaaaagaattagatgaactataaatatcttgtggtatatgaatccttgacactgtaaaaatcaaaacatgagatcagaaacacaagtataaaagtacattacaagtacggtatgaatcgaaaaaaaaacagaatttgacaggttttgagctgataaaaactatttcaggcttttattaatttttaaaaatagtattaattgtttttaaaataagacataaataaaaaaaagaacggttaaagaaaatgaaggggcccttcgtgttttgttttcccttaaaaaaaccaaggacaaaggcataatgccgtattcacaatcttgactcttcgttatctggatctagggtttctctcgatttttagaacgccacaaaacctaataaacttttcccagatacacaaacaaactcatcatcaaccaaggaagaagaaagaaactagggtttttttttgtggattcatcatcggtattttacagatctatattcaaagggaacaaaatcttaaggaacaaacactaaattttcattctttctcttatttacccatttatcaaaaatcttccttttgttttcctgattcttgctaaagaaaaaaactcggatccaattcataaactagtgtggactggtgatcaatctatcaattctggccaagggacaacaaaaagtttagattttgatgaaccaattttgagatgagacaatagacatccattgatctgtaaactttaagaaggagaaggagaaaagaaagtatg

SEQ ID NO: 18951 - DNA, 3003 bp, Unknown; identical to SEQ ID NO: 18950
  misc_feature (1)..( 3003): 2750-1469P.txt file - cDNA_ID_1820085; gDNA_ID_2926178; Annot_ID_140440

SEQ ID NO: 18952 - DNA, 3000 bp, Unknown; identical to SEQ ID NO: 3254
  misc_feature (1)..( 3000): 2750-1469P.txt file - cDNA_ID_1820089; gDNA_ID_1620635; Annot_ID_47344

SEQ ID NO: 18953 - DNA, 3000 bp, Unknown; identical to SEQ ID NO: 3254
  misc_feature (1)..( 3000): 2750-1469P.txt file - cDNA_ID_1820089; gDNA_ID_2926178; Annot_ID_140439

SEQ ID NO: 18954 - DNA, 3000 bp, Unknown
  misc_feature (1)..( 3000): 2750-1469P.txt file - cDNA_ID_1820097; gDNA_ID_1620635; Annot_ID_47342
acggtacacatacagccacaatagctggtggctcatttgtccccaacgtgagctactttggtttagcccaaggtactgatatatatatatatatatatattatttcaccacagaagttagcttaagagtcaaggtactagttttataagacaatagtttgtttcctttttaaccgatgtgtgattcttatcaggtcttgtccgaggtggtgctcctcgagcccgaatagcctcgtacaaggcgtgttggaacgtaatgagagatgaaggaggaggaactgatggaagatgcacatctgctgatatgtggaaggcttttgatgatgctatacatgatggggttgatgttttgtcggtttctatcgggggaggtattcccgaggattcggaagtcgataagctcgattatatcgcggcttttcacgcggtggctaaagggattacggttgtggctgctgcgggtaacgaagggcctggtgctcacactgttgacaatgttgctccttggcttttgactgttgctgcaactactcttgaccggtcttttcctacaaagatcacacttgggaataatcaaaccctcttcgtacgttttactagttagagaaaacagttcaaagtttggagttcttttttgagtaacttgttgttcttttgttcgttcgtttttaggctgaatctctgttcactggaccggagatttcaaccggtttagctttcttggactcagacagtgatgacactgttgatgtgaaggggaaaacagttcttgttttcgatagtgcaactccaattgcagggaaaggtgtagcagcagtgatcctagcccaaaagcctgatgatcttctttctcgatgcaatggtgtaccatgcatttttccagattacgagtttggaactgagattttaaaatacatacgtaccaccaggtctctatcttgaaacaaaaacactctcttaactacacaagtgcatgtatatatatacatcattgatcgtcgtgccaacagatctcccacggtgagaattactgcagctactacactaactggtcagcctgcaacaactaaggttgctgcattctcatgtagagggcctaattcggtttcaccagccattctcaaggttattaagccattgcgtctcttatcaatgtttacttcaaaaggtttaacgtttctgagtaaactttgctaaatatgtggtcatgttttactctgtagcctgatatagcagctccgggtgtgagcatactcgcggcaataagtccgcttaatccagaagaacagaacggatttggacttctttcagggacatcaatgtcaactcctgttgtttctggaataatagctctcctaaaatctcttcaccctaagtggtctcctgctgcagtgagatcagctttggtcacaacaggttcctgcttcttcttattcttcttttccataaacaaaccgttacagactatcatctgtttcttttgtagcttggaggacaagtccatctggagaaccaatctttgctgaaggatcaaacaagaagcttgcagatccatttgactatggaggaggacttgtaaaccctgaaaaagctgctaaaccaggacttgtctacgatatggggattgtggattacatcaagtatatgtgttctgcgggttacaacgactcttcaatctctcgtgtgctcggtaaaaagactaattgcccaattcctaagccatcaatgcttgatatcaacttaccttcaatcacaattccaaatcttgagaaagaagtcacactcacaagaactgtaaccaatgttggacccatcaagtcagtctatagagctgtgatcgagtctcctctcggtataactctcaccgtgaacccaaccacactcgtgtttaagtctgcagctaagagagtactcactttctcggttaaggctaaaacaagtcacaaagtcaacactggctacttctttggaagcttaacatggagtgatggtgttcatgatgttataatccctgtctctgttaagacaacgatttcgatgtaataaaaagagccatatgatgctcattgtgtttgttcttatgtaatttgttgcaaatctaagtctaaaatgtcaaatcaagattcaagatcatcataataaaagatcaaatcacaaataccttagaatctcttataaaagatcatgatcataacctatagctgtaacattacatacaaatatataatcatcatattgactatatattataaagatgtgatattttagtgtacacataaatgcaaaaaatggaactggtttgctctcctgtgatcctatatatattaaagttcagaatataatctgttttactaaaatgagtaattcagacaatcatgatctaccaacttatacagatacctaatctactctattagttagaaatgattgatatcctcttatactcagctgaaattaaagtaggtacactattagtatatctataataagaaagacatcaataataagaaagacgacaattgtaagagttaaaactgagccctcttgagatccatggcgggaaataacgttacacaagagataaaaccggtatgattcagaattaccataccgatattgagccgaataaaccaataattgaattcgaatcttacgcaatagttcactccctaaagacacactatgtatataataaagcttctcttcgacagaatcacacacacttctcactgcataaaatggagaactctttcctaagttccaaacttgtgtttctattggcaattgctttggtcctatttctgaacacagagctgagttttcttacagctgaaggagcctcagatagtaacagcaaggtatgtaaatgtaactaaattaaaacggtgttctattttgcgaaaaatcgctaagaatttactgatatttctaactttttcggtggttttttggcggatttataaggtttatatagtgtatcttggccaaagggaacacgatg

SEQ ID NO: 18955 - DNA, 3000 bp, Unknown; identical to SEQ ID NO: 18954
  misc_feature (1)..( 3000): 2750-1469P.txt file - cDNA_ID_1820097; gDNA_ID_2926178; Annot_ID_140437

SEQ ID NO: 18956 - DNA, 3000 bp, Unknown; identical to SEQ ID NO: 3251
  misc_feature (1)..( 3000): 2750-1469P.txt file - cDNA_ID_1820101; gDNA_ID_1620635; Annot_ID_47341

SEQ ID NO: 18957 - DNA, 3000 bp, Unknown; identical to SEQ ID NO: 3251
  misc_feature (1)..( 3000): 2750-1469P.txt file - cDNA_ID_1820101; gDNA_ID_1620635; Annot_ID_162854

SEQ ID NO: 18958 - DNA, 3000 bp, Unknown; identical to SEQ ID NO: 3251
  misc_feature (1)..( 3000): 2750-1469P.txt file - cDNA_ID_1820101; gDNA_ID_2926178; Annot_ID_140436

SEQ ID NO: 18959 - DNA, 3000 bp, Unknown; identical to SEQ ID NO: 3251
  misc_feature (1)..( 3000): 2750-1469P.txt file - cDNA_ID_1820101; gDNA_ID_2926178; Annot_ID_200008

SEQ ID NO: 18960 - DNA, 3003 bp, Unknown
  misc_feature (1)..( 3003): 2750-1469P.txt file - cDNA_ID_1820105; gDNA_ID_1620636; Annot_ID_47387
aggaaacacgaagacttacgagtgctggacacgagatcgaacttctctggagcagaattctccggtggagaagaagaggaagctgaagactttgaaggtgaaatggaattagccaactgtagctgagaggacaatcggaactcaggaacggaatatctgattccaccgggaaatctccatgaacggtgaagagaacaagggaagatgagaaaaggaggagcttgaagagaaagaatcaaatgatcggccataacttaaacattgaagtctgtaacaaagagtgtcacagaaatggtttagagtagacgaagaagatgataattgggtgacgttacaaccggtggtaaccctctgtttctatcagatgtgttcgcttcacagatattttgtggctaccgtttttttttcataattgggctataaaaatcatatctttttgactcttctcttctctatccattctctgccgaactagtcgtcaatcgaaatcccaaagatcagcgatggtgactctaaacgcttcttctcctctcacgaccaagtcgttcctcccctaccgtcacgctcctcgccgtccaatctctttctcccctgtcttcgccgttcattcgactgaccccaagaaatctacccaatcagcctccgcttcggttaaatggagtctagagagttggaagtcgaagaaagctttgcaattgccggattatcctgatcagaaggatgttgattcggttctacagacgctttcttcttttcctcctatagttttcgctggtgaggctaggaaactagaggataagcttggtcaagcggctatgggtcaagcctttatgcttcaaggtggtgattgtgctgagagtttcaaggaatttaacgctaataacattagagacacctttagggttcttcttcagatgggtgttgttctcatgttcggtggccagttaccagttatcaaggtcgattctttacctggagatttttctgtgtgatgaatctctagttagggatagtttatgattttgtgggttttaagttttcaggtgggaagaatggctggtcagtttgcgaagccgagatcagacccatttgaggagaaagatggtgtgaagctgccgagttacagaggagataacataaatggtgatgcttttgatgagaaatcgaggattcctgatcctcataggatggttagagcgtacacacagtctgtggctacgttgaatctcttgagagcatttgctactggaggttatgcagctatgcagagagttagccagtggaaccttgatttcacgcaacatagtgaacagggtgacaggtttataaacttctctccttgtttataatcttgtttgttatgatgttaaccaattgagaatacacttttcttaagtcagaaacggtttcttatttcttgatgttgttgtgacaaaacaggtaccgtgaattggctaatagagttgatgaggctttgggattcatgggtgcagctggacttactagtgctcacccgatcatgactactactgagttttggacatcccatgagtgtttgttattgccttatgagcaagcactcacaagagaggattcaacatctggactttactatgattgctctgcgcacatgctttgggttggagaacgaactcgccaacttgatggtgctcatgttgagtttctgaggggaatcgctaaccccctcggaatcaaggtatgtgatcatcaagtctcttggtttggttaattggaataggagtaagtttcatagctttgttcgtatagaaaaaaacactgagatgtagactcaagaactgttgttaactctataggataccctgcaggtctcaattgcctggtattaaagatattggaaaaccattacaaagaggctacaacagatttttgtatgagaaaatgacagatgttgattgatgtactttgatgcaggtgagtgataaaatggtccctagtgaactggttaagctgatagagatactaaaccctcagaacaagcctggaaggattacggttatagtgagaatgggagctgagaatatgcgggtcaagcttcctaatttgatcagagcagtccgtggagccggtcagattgtgacttgggttagtgatccaatgcacggaaacacaatcatggctcctggtgggctaaaaactcgttctttcgatgcaatcagggtaatcattcgaacttacttcttcatccaactctatgcataatcttgcttatgattcatgtagttacccattaaattatatggtgtatcaggcggaattgagagcgttcttcgacgtccatgatcaagaagggagtttccctggcggggttcatttagaaatgactggtcaaaacgtgacagaatgtgtcggagggtcacgcaccatcacttacaacgatctaagctcacgctaccacactcactgtgacccaagactcaacgcatctcagtctctggagcttgcattcatcattgcagagcgtctgcgaaagagaaggcttggttccgggaatcttccgtcatctattggagtctagagaacaagaaaatacttatccgagctaggatgtgtgtgtatagaggctgatctctacttattaagttgccaagttaaatgagcttgtgtactgttaaaagtaagatattgttgtttttgtgtgttgggttatgattttgtctgaaataagtggctgactttataaacccgtaaatctctacgtcacgcttgcaacaaaaattcgatatttgattcaatcacagaaaagtcctcccattaaggtgtaaatttttgactcaaataccacaaagcataaaccttttgacaaaccaaaagttgtatgaagaaaattggaaaactctgaatgccatttccacacgtggacactattcgtttagagaacacttaaacaaacgcaggaggcctggaaaaaagaaagataacgggactcgagagattgagattacggagccacccactttcatg

SEQ ID NO: 18961 - DNA, 3 bp, Unknown
  misc_feature (1)..( 3): 2750-1469P.txt file - cDNA_ID_1820105; gDNA_ID_1620704; Annot_ID_165178
gct

SEQ ID NO: 18962 - DNA, 3003 bp, Unknown; identical to SEQ ID NO: 18960
  misc_feature (1)..( 3003): 2750-1469P.txt file - cDNA_ID_1820105; gDNA_ID_1620636; Annot_ID_162921

SEQ ID NO: 18963 - DNA, 3003 bp, Unknown; identical to SEQ ID NO: 18960
  misc_feature (1)..( 3003): 2750-1469P.txt file - cDNA_ID_1820105; gDNA_ID_2926204; Annot_ID_141660

SEQ ID NO: 18964 - DNA, 3003 bp, Unknown; identical to SEQ ID NO: 18960
  misc_feature (1)..( 3003): 2750-1469P.txt file - cDNA_ID_1820105; gDNA_ID_2926204; Annot_ID_202071

SEQ ID NO: 18965 - DNA, 3000 bp, Unknown; identical to SEQ ID NO: 3299
  misc_feature (1)..( 3000): 2750-1469P.txt file - cDNA_ID_1820109; gDNA_ID_1620636; Annot_ID_47385

SEQ ID NO: 18966 - DNA, 3000 bp, Unknown; identical to SEQ ID NO: 3299
  misc_feature (1)..( 3000): 2750-1469P.txt file - cDNA_ID_1820109; gDNA_ID_2926204; Annot_ID_141658

SEQ ID NO: 18967 - DNA, 3000 bp, Unknown; identical to SEQ ID NO: 3297
  misc_feature (1)..( 3000): 2750-1469P.txt file - cDNA_ID_1820119; gDNA_ID_1620636; Annot_ID_47382

SEQ ID NO: 18968 - DNA, 3000 bp, Unknown; identical to SEQ ID NO: 3297
  misc_feature (1)..( 3000): 2750-1469P.txt file - cDNA_ID_1820119; gDNA_ID_2926204; Annot_ID_141655

SEQ ID NO: 18969 - DNA, 3003 bp, Unknown
  misc_feature (1)..( 3003): 2750-1469P.txt file - cDNA_ID_1820131; gDNA_ID_1620636; Annot_ID_47379
tcacctgaattcggaactttgtgttgttccagtaaaattaagcgaacacaaggatagagttctgattccttttacgaaagctcataattaaaatagaccatattatacaacatcctagtctccaagagaacaccttttcatctagtaaaataacgtagcatctatttggcgacactactttctgactcctacaaatgtaacacgttgcacgaatagcttttacaggaagacaaacacgatcaaggaaactaaagacaataattaggctgcttattaaaaacgtattaaaagaagagagtagaatatggtgcatacaagaaacggagtttcttaagtcggccgagagttgatggaataggcccgcttaaattgttcaagtaaagatccaagctcaccaattccgtcagatttccaagctgttctgggattgtcccagtaatgttattgctataaagctccctgtcattaccattctttaatattaatttcaccataagatcggaaagatatataactaataatctatgataatgcaaaattatgcagttatttggaacattgtaacatttttaacatcccacatacaccaaaagttaaaagacggccttttaaagaaaagatgacttacaagtactgcaagtttggaagctgaccaagttgcattacgagctgtccagatagatttgcattcccaaggtcactgagcaaaaatgaagttcaagtaaattctcagtagatgcgaaaatccgaatcatcttggctagatatagaaagaaacttacacacgtgtaacactattgtcgctattgcaagtaacatgaaaccatgtacatggagtaacaagagtagcatcccaactttgaagcaccttattagggtcggctaaactgtttttcagtgcacttagagcatcacctacaattaaccaaagaagaagaaaaaatcaaactttgcaatcatcaagtgtcacgaggatacataatcactggaatcagtcgaaacagatgtaacccaaatataactcaagtcaatacagcaaaacaagtaacagataagttaaaaatgccttctttaggtgagaacaagctctcataagcctatactaatcaaaatactcaacaagggaaactaatttaattggaaagaatgaaaaattgaaagagaatgagagagaaaggggaaaccttcggcgttgcccgagactctgagaaccaaatccaaaacgagaatcaaccaaaagaagcaagggatcattaatcttcgttccattttatcctcaagagattaaaaacaaaccctagaactatccctcatcagagaaaatccatcattgttaaaacccctgataaaagggatctcgaatccttcgattaagctaccacccacacaaggtaataccaagatgatgaaattagaagcagaatacgagaaaagccctctcaacgcgtatccacccgttgacttaatttgaagagaaaatcaaaatacccaaatcgattaatcgcggaaaccaaaaaagcaaaaaaaaaagaaactgaagctagacttttccgattagaaggaacgccgagatcgctgaccgttgactacttaatgctgagaagagagaaaactgagatagagaaaacgaaaggaggaagaagatatttcctggaaatatactaaaaaagggtcgaaacaaagagagatgagagagaggagagaaaccaagttatcgccgagagcaaggaaggaagacgaattttaattattttctttgcttaaagaagggattttactgggttgagttgttgtactgtgaaaactatattaaaaaaatgacatttaagattgagaaaacgacaaagaggatgatgacgtggacgagcattttcaaagcttttttagagctagtcaaagtcaaagacgcacgacttcattccgaatcatgtttgttatgttcgcccaccttatcatcatccatcatatgacattagatataaaccatgatggtcatgaactcatgatagttgatagtgagttatataccatcatcataatcctaattaccggcccagctctattttttcgggcttttattgtttattgggcttggtcttaatagcaagttcgtttattccaaagatgagcaaaagcttttttgatttttttattcttttttaaagattatagctctaaaaaattacaattcaatattgaaaaatgtaagctgaataatccatctggtccaatgaattaaacaaaacaaaaaacattattgtatcatatataatttactggttgatagtttaactatttatgccatttaatatttttaaaagaacaaaagtaattttgaggaaaaatgaaataaaaaacaaaaaacacaaacggacagagtatatgttgccagcaataaaatacggacatataccttagtttggcattaaaaaacaaaacaaaaacacaacaaacaactcagtacagtaggctatttaaaggcccatcagattaagacttggaagtctgacgagattgtaacgcctcacaatccttcctacccgtgagtccgtgaccgattgtgtatcatccatcttctttcttcttctttcttcttctttcttcttcttttatatataaaccaaaatataattcgtgaagactttcactttctccttgccactttttgacgattcacatgcaccatccaatattttagtgcccttttcacgacatatctgtgtctgtatccaattttcttatttactactacttttttctatttatatatacaaaaataatcaaagagagagacgaattttcgaggtaaggtatctatcgactttctatcttcctccacctttgtttgttgtcaccaccacactacgctaatcattgccacacacatgcataattctctccaaccatctaaaagtcccactttagcattcttctgtttgtaattttatctcagagcttgcttcatgggcttttgagttttctctctgtttccaaaaaacaatg

SEQ ID NO: 18970 - DNA, 3003 bp, Unknown; identical to SEQ ID NO: 18969
  misc_feature (1)..( 3003): 2750-1469P.txt file - cDNA_ID_1820131; gDNA_ID_2926204; Annot_ID_141652

SEQ ID NO: 18971 - DNA, 3000 bp, Unknown; identical to SEQ ID NO: 3291
  misc_feature (1)..( 3000): 2750-1469P.txt file - cDNA_ID_1820135; gDNA_ID_1620636; Annot_ID_47378

SEQ ID NO: 18972 - DNA, 3000 bp, Unknown; identical to SEQ ID NO: 3291
  misc_feature (1)..( 3000): 2750-1469P.txt file - cDNA_ID_1820135; gDNA_ID_2926204; Annot_ID_141651

SEQ ID NO: 18973 - DNA, 3000 bp, Unknown; identical to SEQ ID NO: 3278
  misc_feature (1)..( 3000): 2750-1469P.txt file - cDNA_ID_1820139; gDNA_ID_1620636; Annot_ID_47375

SEQ ID NO: 18974 - DNA, 3000 bp, Unknown; identical to SEQ ID NO: 3278
  misc_feature (1)..( 3000): 2750-1469P.txt file - cDNA_ID_1820139; gDNA_ID_1620636; Annot_ID_162907

SEQ ID NO: 18975 - DNA, 3000 bp, Unknown; identical to SEQ ID NO: 3278
  misc_feature (1)..( 3000): 2750-1469P.txt file - cDNA_ID_1820139; gDNA_ID_2926204; Annot_ID_141648

SEQ ID NO: 18976 - DNA, 3000 bp, Unknown; identical to SEQ ID NO: 3278
  misc_feature (1)..( 3000): 2750-1469P.txt file - cDNA_ID_1820139; gDNA_ID_2926204; Annot_ID_202057

SEQ ID NO: 18977 - DNA, 3003 bp, Unknown
  misc_feature (1)..( 3003): 2750-1469P.txt file - cDNA_ID_1820143; gDNA_ID_1620636; Annot_ID_47374
cgtatctgaagcagctctgttggttttttgttattcagttgttaagtacacagctgatgagattaggaaaatggaggaatctattcggattcgaagatcgaaggaacctactctgattcttcaattggttagtggctttttaaaatggaactcgaagatgcacattggctcttctcacaatgtttgatttccttgttaggtgaagaagctcaagcatgaggtttccactgcagaatctagtactgaactatctcctaatgttaaacacaaactagttgatgagatcctccagcgtttgaaaagctttgaggacaaatctaatgttactcagcttagaggtttgtgctactctactatgcccattagcttcatgacatttatttttcaaactgccacaaacttgcatttcatgacttttcctgatctagctgcttaggatttgtcttattacctctttggaatgtcatggtgatttgtcttattacctaacctgtgtaagattttgttggtatcaatagctcagtttagtaaatatttcattatcattcatgtagaagtggatttttgctcaataatgcatatggttatcaggatagtaaaataggctcacaaatttcagacctttctgcatgcactatcacatactagacagaacaattgattttagcgggattttcaatggagattttttcatgcctagtttttctattcttcttgtataagttcatcaggtctatggaacataagctctaacacccacttaagttctgttataatctatgcattgatgatcatatgctatgtacatgaaacatttgagccacagaaactctagcggtggtgccattgtatacataatcttttcgatgttctttagattctcagtagcttacctaacatgttcgtatgtctcaacatgcttctctaattcctttctactgcatcagaaaaagtatgctcaagaattccaaaaagtcatgatatttacctttttgacttgttaaaagtagatttttcattctattcacttcacttgaacaactcttaacatttattatgtgctgactaggctaatgcgcaatgtgcgttaattcttagttatttacaagagttattggaaaaaggtggaaggtaggaatgggttaatttatttggttagagagaggtgacaaaattctaataatccagactttgaagacactggatttctttttgatgcttcaaactgagttctattgttttcccttgtagtattcgtaatgcacgtagacttgttaatgttttcgcctacaatagttttccttttgacacattcatgttatctctgtagtgacctttaataccttcttatcttcatttggcaaacagaagttgtagaaacgtggcgcaatgagaagctggaggaagctaaagagctaattcaagggcaaaatggagtaaattccacccttatagtggaggaagcaggtattactcctttagaaagattactgagtttctcaccttgagcaaagattcatttatggagtcctcccgatactctatccttgttttgtataattagagagaaaactaatttttgttctgtaattatctagggatgcttgtaagagctttggagttggagtgggatgtgctgtctgaagaaatcggtttctggttacctgctgaggttaccaatgtagaacatgatgataaacctgaaggagaggaagagcctggtaatgttttcaaaattttctacattcttgatctctgcttttgcatttatttgggtggaaaagtgtggtgacactggcgaattcaaatctcatgaagttgtgcattttttccgtagaggaaatattggcaggcagaccagtgccagctgtatgtaatgcagagcttcacacagattatggtggtgctgcagtgagatgggggcttacacatcataaagagagtgcagctgattgttgccaggcttgcttagaccaggcaaagcgtgcgaaacctggagaaacgagatgcaatatttgggtttattgcccatctgagtttggttgtttctctccagatatttatgagcataaacatcaggagtgttggcttaaatacgtaagaacttacctcgtacacatactactttacccaattttcagtttccttgagattactcgtccaagttggactggaagcttggctcatatccaatatgtctatgtgaattgcaggcagagaagccaaaacagaatttcaaagacagatattctgagacatacagaaacaaccacccaaaagcgccatctatcgttccatgggtttcaggtgttgtaacggcttgagcaaaacccatgtggacagattgatgggagaaataggagatagttttggtttttttttctcagctgtgttaccattttcagagtcttgaaaattggagtaccgtaccaaagatgcaaacatcttttggccagatgtatacgagggaatagaatgttttgttgtttttgttgattggctttaaacacttgtggtcgaagtcgaatatggtgtaaggaatcatgtttttgttcaagcttgttcgattctatagtggatgattaaaaagctatctataaacatgacgaatgtctgtctcctgttatatgatcagatcaaatgtttatgtctggtctgtaattatgtcacaaaacatcacagtaaaactctgaaatgaaataatggttgaaatataggaactaaaaaaaacaaagcagaaattacggagggaaaagagaaaacagaggagtgtgttcatcttttgcttccggggttgtctctattctaaatatagactttccaattgtgtacctctcttttcttgtcttcttaatcagaaaatcaataattctcttctactttcttcatttttccctttctcttgtaagtctctcttttcattgattctttctattggtggcgagcttcgttcaatcgttttagcatttctcttgtaagtttcggccttgctttcctccgatg

SEQ ID NO: 18978 - DNA, 3003 bp, Unknown; identical to SEQ ID NO: 18977
  misc_feature (1)..( 3003): 2750-1469P.txt file - cDNA_ID_1820143; gDNA_ID_1620636; Annot_ID_162906

SEQ ID NO: 18979 - DNA, 3003 bp, Unknown; identical to SEQ ID NO: 18977
  misc_feature (1)..( 3003): 2750-1469P.txt file - cDNA_ID_1820143; gDNA_ID_2926204; Annot_ID_141647

SEQ ID NO: 18980 - DNA, 3003 bp, Unknown; identical to SEQ ID NO: 18977
  misc_feature (1)..( 3003): 2750-1469P.txt file - cDNA_ID_1820143; gDNA_ID_2926204; Annot_ID_202056

SEQ ID NO: 18981 - DNA, 3000 bp, Unknown; identical to SEQ ID NO: 3274
  misc_feature (1)..( 3000): 2750-1469P.txt file - cDNA_ID_1820147; gDNA_ID_1620636; Annot_ID_47372

SEQ ID NO: 18982 - DNA, 3000 bp, Unknown; identical to SEQ ID NO: 3274
  misc_feature (1)..( 3000): 2750-1469P.txt file - cDNA_ID_1820147; gDNA_ID_2926204; Annot_ID_141645

SEQ ID NO: 18983 - DNA, 3000 bp, Unknown; identical to SEQ ID NO: 3273
  misc_feature (1)..( 3000): 2750-1469P.txt file - cDNA_ID_1820169; gDNA_ID_1620636; Annot_ID_47365

SEQ ID NO: 18984 - DNA, 3000 bp, Unknown; identical to SEQ ID NO: 3273
  misc_feature (1)..( 3000): 2750-1469P.txt file - cDNA_ID_1820169; gDNA_ID_2926204; Annot_ID_141638

SEQ ID NO: 18985 - DNA, 3000 bp, Unknown; identical to SEQ ID NO: 3272
  misc_feature (1)..( 3000): 2750-1469P.txt file - cDNA_ID_1820181; gDNA_ID_1620636; Annot_ID_47362

SEQ ID NO: 18986 - DNA, 3000 bp, Unknown; identical to SEQ ID NO: 3272
  misc_feature (1)..( 3000): 2750-1469P.txt file - cDNA_ID_1820181; gDNA_ID_2926204; Annot_ID_141635

SEQ ID NO: 18987 - DNA, 3000 bp, Unknown; identical to SEQ ID NO: 3271
  misc_feature (1)..( 3000): 2750-1469P.txt file - cDNA_ID_1820185; gDNA_ID_1620636; Annot_ID_47361

SEQ ID NO: 18988 - DNA, 3000 bp, Unknown; identical to SEQ ID NO: 3271
  misc_feature (1)..( 3000): 2750-1469P.txt file - cDNA_ID_1820185; gDNA_ID_2926204; Annot_ID_141634

SEQ ID NO: 18989 - DNA, 3000 bp, Unknown; identical to SEQ ID NO: 3311
  misc_feature (1)..( 3000): 2750-1469P.txt file - cDNA_ID_1820193; gDNA_ID_1620637; Annot_ID_47401

SEQ ID NO: 18990 - DNA, 3000 bp, Unknown; identical to SEQ ID NO: 3311
  misc_feature (1)..( 3000): 2750-1469P.txt file - cDNA_ID_1820193; gDNA_ID_2926156; Annot_ID_139550

SEQ ID NO: 18991 - DNA, 3000 bp, Unknown; identical to SEQ ID NO: 3310
  misc_feature (1)..( 3000): 2750-1469P.txt file - cDNA_ID_1820210; gDNA_ID_1620637; Annot_ID_47395

SEQ ID NO: 18992 - DNA, 3000 bp, Unknown; identical to SEQ ID NO: 3310
  misc_feature (1)..( 3000): 2750-1469P.txt file - cDNA_ID_1820210; gDNA_ID_2926156; Annot_ID_139544

SEQ ID NO: 18993 - DNA, 3003 bp, Unknown
  misc_feature (1)..( 3003): 2750-1469P.txt file - cDNA_ID_1820236; gDNA_ID_1971820; Annot_ID_58325
cttcagaagctgtatcttggttgtaatacttcattcggaagtctttcttataatgatggtttgaagggtggtgagctactggattccatcggcaacctcaaatatttgaaggttttgagtcttcgtggttgcaatctctttggaaagattccttcttcactcggaaatctttcttatctcactcatcttgatctttcttttaatgatttcaccggtgtgataccagattcgatgggcaatctcaactatttgagggttttgaatcttggtaaatgcaatttctatggaaaggttccttcttcactcggaaatctttcttatctcgctcaacttgatctttcctataatgatttcacccgtgaaggaccagattcaatggggaaccttaaccgactaaccgatatgcttctcaagttgaactcgctcaccgatatcgaccttggttctaaccagttgaaaggtatgctcccatctaacatgagtagcctctccaaactggagtatttttatattggtggaaattcattttctggatccattccctcttctctcttcatgatcccttcgttggttgaacttgacctgcaaagaaaccacttcagcgctcttgagattgggaatatctcttcacaatctaaacttcaagtattaattcttggaggaaataatttcaatccggacattgttgatttgagtattttctcacctctcttgtcacttggttatttggatgtttcagggattaatttgaagatcagttcaaccgtcagtcttccctcacccatagaatacttggttttatcgtcgtgtaatatttccgagtttcccaaatttctacgtaaccaaaccaagttgtattctttagacatctctgccaatcaaattgaaggccaagtaccggagtggttatggagtctgccagagttgcagtctattaacatctctcataattctttcaatggtttcgaaggaccagcagatgttattcaaggaggtggagaactatatatgcttgacataagttcaaacatattccaggatccatttcctttgttaccagtagactctatgaatttcttgttcagctccaataatcgattttcgggagagattcctaaaacaatatgcgaattggataatcttgtgatgcttgttttgtcaaacaacaacttcagcggttctattcctcggtgttttgagaatttacatctttatgtcttgcatcttcggaataacaacctctctggtatttttccagaggaagctatcagtgatcgcttgcaatcacttgatgttggtcacaatcttttctcaggagaacttcccaaatcattgatcaactgcagtgcactcgagtttctatacgtggaagataaccgaatcagtgacacgtttccatcctggttggaattgttgcccaattttcagattcttgtccttcgttctaacgagttctatgggccaatattttctcctggagattctttgagtttccccaggttgcgaatctttgatatttcggaaaatcgcttcactggagtcttgccatcagattactttgcgccttggagtgcaatgtcgtcagtcgtggatagaataattcagcattttttccagggatactatcataactctgtggttctgacgaacaaaggattaaatatggagctggttgggagtggtttcacaatctacaaaaccattgatgtctccggaaacagactcgaaggagacatccccgagtccatcagtcttctcaaggaactgattgtgctcaacatgtcaaacaacgctttcacaggccatattccaccatctctatcaaacttgagcaatctccaatcattggatctatctcaaaacagattatccggcagtatcccaggagagctcggggaactcacatttctagcgcggatgaacttctcttacaacaggcttgaaggtccaataccacaaaccactcagattcaaacccaggatagttcttctttcacagagaatcctggactctgtggtcttcctctaaaaaaaaactgcggcggaaaagaagaagcaacaaagcaagagcaagatgaggaaaaggaagaagaagaacaagtatttagctggatcgcagctgcaataggctacgtacctggtgttgtgtgtggactcaccatcggccacattctggtttcacacaaacgtgactggttcatgagaattgtttccctctttacttaagtaagcattcaataaactttctcaagacttgtttgaaaatcatattatcaatctacattctacacttatttgaaagataaaatatctccttgtccttttaaattaatgttctaatatcgtcgtaacgaatttggtctgcaacgttttatatgtagaaacaaaaactgtataatagttatagcatgaaactttgattaagaattagtagtggttacagaggattgttgtattacagaggattaattttatgaacaaaacaaaaagaaaccaatacagtagaaccgaaacggtctaaatttaaatgtttgtgtatatgtgtaactctaatgttttgagttgtattataagtgtgttatgcattcgagttagttctattagtttcctataatttcgttacaatactactgtatctctctgtcctcttctcttctttgctttcatttttttttcagattcagttccatcatcacaacaaagaaccctaaatcaatttcacattacgtttcatcaccaagaaaaaaaaacggaaaaaaatcatttattacgtcttctacatttcttgattttgttttggtgtacaaaaatggaagagatgaaaaaggtttgatacgattcgaatattctattgctacttctctagcttccagatattttcttctttttgattttgtttcatttactggtgatttgattttattattgtggacaaggtaacgtataaaaagtgaaatttttgtgggtctttttctttgattcgctaatcttttgagaaacatg

SEQ ID NO: 18994 - DNA, 3003 bp, Unknown; identical to SEQ ID NO: 18993
  misc_feature (1)..( 3003): 2750-1469P.txt file - cDNA_ID_1820236; gDNA_ID_2926158; Annot_ID_139615

SEQ ID NO: 18995 - DNA, 3003 bp, Unknown
  misc_feature (1)..( 3003): 2750-1469P.txt file - cDNA_ID_1820248; gDNA_ID_1971820; Annot_ID_58322
atgacttaataaagacgtttccttatcctttatcaaatctttacatctgtattcaaagttagaatcaacgatctaagaagaagagcttaccatgaacccactagtttctggacggttaaagggaccagaactagatacaatattcacaagaattgcatctacttgactagattaggtgtatcatatcatttgatgctaactcttggggttataggctaacctttaagcttcctccttcacgttatgagccactgacagcatcaggaaggtccttaagaacctaagcaaatgtaataatgttctccattagcttcttactcaccgaagataacctccaggttttcgacaagtaacagtattataattagaacgatgtgagatttttgcttcaaggtcgttgagtgtgagaagatggtttttcgttgttgttaccttgtaaagatgccatgaagcataagcatccgttgctgcgtattgtaactgctgctttgacagaggataaaactcccagttcccaagcctgattctgtttggcttcaggagctgcaaagtaacagtcagattttcaaagcgaaatagatcaatattctcacttttgatacagcagaacagaagagagttgtactgctatttctaggaagactggaaatatgataaatccagttctcactactgttatcaaaacttaaatcaagcttttgaaatcaaccagacaaggtgaataacagatacctctttgcaaacaagtgtctcagttagtgaggcaaggccccattttttatctccaccaattttttggttggctaaatctgaaagatcctcaacatctttgatactaactccatagtcatggaaaagcttcacagagtcaccatcaattccaatacctacctatatatatgtatcagaactacgttaattgagcatccatggcaaacaacaagaacttcgaccacttcaaaaaaaaaaataacaaacctttacaagtgttgaatcttcaataagatgttggagactttgagggataccagaatgaaaaatatgcataacatcacaataattactatctacacatatctggacagtcgcaaccttccccgggagaacacctgaaaataacacaaagtttcacaaaatattattagttaagatcacaaaaacctcacaaaggttcatgaatgtgtcaaaaagcattatcaagcaactatcattacaacacatatgagtagactagtctaagagatattattagtagaacaaagcttgcagcaatgagattctagactacacaaaactgcaatagtaggcatctacactttcctccgaacattcagaaaggaaacaacgaccataaagctctattcgatataaagcaagagcatcatcattctatcatcaagatatataaagagaaattagaaaagacaacatatgatccatagagataaaatacagttcgagatgcatatcacattgcatactttaagaaatgcaatcgaaaaagacaaaacttgcaatcagacacaaaacggaaaacagaagggttaacaaaagcaccttttctaaaacttggtctccactcaatatccaagccaacaaaagctattccagattcatctctcttggtatcaagaactttaataagctgcattgctcgcttatcaacctcagtagcagtcttgctatacaaaatcctaccaccaaacctcattgctggaaaattcctagctgcaacaaagtatacacattattaagttgctccgcccacataattcaaacaacacactattacgaaaaaaatcttaatcctataaattacggcatgaacagattaatacattgtaaagaacttggaattcgaatcaaatggtgagacaactaatgaattgacattttcaaagcaaaaagaagttgaaattggaaaatagaacagaaagatctctgggatttgaagaagtttcatacctcggcaacgggagagaggaaatcgtttataagatgtagaagaagtgatggaacgaggcaattggcgacggatattattggggatttgatttggatcctcctcgtggccatggacggaggttgtagcttgtacggtcggagcagcagaggaagaagaagaagaagaacgggagaaattgtaggaagcttcgatggcgtcgatagcgagaagctcttcctctgtaaaagcgtcgtcgatccaatttgacgatgacatttcttttactgaaacaaaaaaataaaaattaatgctttggacgagtctcgtcggcccctttaaatgtttgtattgtttgtttttaattttaaacgttcccacactgtacaatatagttgtgtgttttaaattgcccgagacacgctttatacaatttttgtatgattttgattattcatcacgtaaccataacctttgcttcacattagaattgtcccatgttagggatattggcataacgatgtatcagatcatgtcgatgagaaaccaaattcaatctttcagaaacttaaacccatcccatacaaacaaccacacttttgttgacaaatggagcaaccaattcctcttattttcattcaacagtagacactctttcattttcaacaaaaaaacactcctttgactaagtagaaactgtcgatggccacacgcgaaaaatgatgatgaattcttataacactcctccacagatgtagtaagtgtcatccaaggatctagcaattaagagtcagatattcaattttctgtggaagcaattatccttcccaggagacttgtcaagtcaagcaacgatcaattcgtttcacagaagaaataaaacaaggatgcattcttgtagtgagaggaggatgatgacagtaatatggagcttgtgtttaatcttctgcctctctaactcaatacttgccattgctaaagacttgtgtcttcccgaccagagggatgctcttttagagttcaaaaacgagttctacgtccaagagttcgatccccatatg

SEQ ID NO: 18996 - DNA, 3003 bp, Unknown; identical to SEQ ID NO: 18995
  misc_feature (1)..( 3003): 2750-1469P.txt file - cDNA_ID_1820248; gDNA_ID_2926158; Annot_ID_139612

SEQ ID NO: 18997 - DNA, 3000 bp, Unknown; identical to SEQ ID NO: 8613
  misc_feature (1)..( 3000): 2750-1469P.txt file - cDNA_ID_1820259; gDNA_ID_1971820; Annot_ID_58318

SEQ ID NO: 18998 - DNA, 3000 bp, Unknown; identical to SEQ ID NO: 8606
  misc_feature (1)..( 3000): 2750-1469P.txt file - cDNA_ID_1820259; gDNA_ID_1971820; Annot_ID_176137

SEQ ID NO: 18999 - DNA, 3000 bp, Unknown; identical to SEQ ID NO: 8613
  misc_feature (1)..( 3000): 2750-1469P.txt file - cDNA_ID_1820259; gDNA_ID_2926158; Annot_ID_139608

SEQ ID NO: 19000 - DNA, 3000 bp, Unknown; identical to SEQ ID NO: 8606
  misc_feature (1)..( 3000): 2750-1469P.txt file - cDNA_ID_1820259; gDNA_ID_2926158; Annot_ID_198564

SEQ ID NO: 19001 - DNA, 3000 bp, Unknown
  misc_feature (1)..( 3000): 2750-1469P.txt file - cDNA_ID_1820271; gDNA_ID_1971820; Annot_ID_58314
aaaggtatgctcccatctaacatgagtagcctctccaaactggaggcttttgatattagtggaaattcattttctggaaccattccctcttctctcttcatgatcccttcgttgattctacttcacctgggaagaaacgacttcagcggtccttttgagattgggaatatctcttcaccatctaatcttcaactattaaacattggaagaaacaatttcaatccggacattgttgatttgagtattttctcacctctcttgtcacttggttatttggatgtttcagggattaatttgaagatcagttcaaccgtcagtcttccctcacccatagaatacttgggtctattgtcgtgcaatatttccgagtttcccaaatttctacgtaaccaaaccagtttggagtatttagacatctctgccaatcaaattgaaggccaagtaccggagtggttatggagtctgccagagttgcggtatgttaacatttctcataattctttcaatggtttcgaaggaccagcagatgttattcaaggaggtcgagaattacttgtgcttgacataagttcaaacatattccaggatccatttcctttgttaccagtagtctctatgaattacttgttcagctccaataatcgattctcgggagagattcctaaaacaatatgcgaattggataatcttcggatacttgttttgtcaaacaacaacttcagcggttctattcctcggtgttttgagaatttacatctttatgtcttgcaccttcggaataacaacctctctggtatttttccagaggaagctatcagtcatcacttgcaatcatttgatgttggtcacaatcttttctcaggagaacttcccaaatcattgatcaactgcagtgatatcgagtttctaaacgtggaagataacagaatcaatgacacgtttccatcctggttggaattgttgcccaatcttcagattcttgtccttcgttctaacgagttctatgggccaatattttctcctggagattctttaagtttctccaggttgcgaatctttgatatttcggaaaatcgcttcactggagttttgccgtcagattactttgttggttggagtgtaatgtcatcagtcgtggacattgatggtagaataattcagtatacagttacaggaattgaccgggacttctaccataagtctgtagctctcataaacaaaggattaaagatggagctggttgggagtggtttcacaatctacaaaaccatcgatgtctcgggaaacagactcgaaggagacatccccgagtccatcggtcttctcaaagaagtgattgtgctcagcatgtcaaacaacgctttcacaggccatattccaccatctctatcaaacttgagcaatctccaatcattggatctttctcaaaacagattatccggcagtatcccaggagagctcggaaaactcacgtttctagagtggatgaacttctcgcacaacaggcttgaaggtccaataccagaaaccactcagattcaaacccaagatagttcttctttcacagagaatcccgggctttgcggtgctcctctcctaaaaaaatgtggtggagaagaagaagcaacaaagcaagaacaagatgaagacaaggaagaggaagatcaagtatttagctggatagcagctgcaataggctacgtacctggtgttgtgtgtggactcaccatcggccacattctggtttcacacaaacgtgactggttcatgagaattgtttccttctttacttaagtaagcattcaataaactttctcaagacttgtttgaaaatcatattatcaatctacattcttacacttatttgaaagataaaatatctccttgtccttttaaattaatgttctaatatcgtcgtaaggaatttggtctgcaacgttttatatgtagaaacaaaaactgtataatagttatagcatgaaactttgattaagaattagaagtggttacagaggattgttgtattacagaggattaattttatgaacaaaaaaaaaagaaaccaataaagtagaaccgaaacggtctaaatttaaatgtttgtgtatatgtgtaactctaatgttttgagttgtattataagtgtgttatgcattcgagttagttctattagtttcctataatttcgttacaatactactgtatctctctgtcctcttctcttctttgctttcatttttttttcagattcagttccatcatcacaacaaagaaccctaaatcaatttcacattacgtttcatcaccaagaaaaaaaaacggaaaaaaatcatttattacgtcttctacatttcttgatttttttttggtgtacaaaaatggaagagatgaaaaaggtttgatacgattcgaatattctattgctacttctctagcttccagatattttcttctttttgattttgtttcatttactggtgatttgattttattattgtggacaaggtaacgtataaaaagtgaaattttttgtgggtcttaattttttttcttttgattcgttaatcttttgagaaacaattcgaaagatcctagattttgtatagtcgcagctgtttcttgtgacattgtttgtttatatgttaagatttgtcgttttcctttgcttctatctccctgtctcggtgtaatctacttgtgcgccatttgtctggttatcgaattttctgccacaaagaattttttgaaaactcagattttttttgttttcagaacatgattggtgaggcaattgctaaaattaaatagtacttatgtgttttatgttgattttttgattagaaaatggacattttgtccgattcttatttgtttgtgttttttttttttgtagacgcaataagctatcttcagcctaaactttctggaaattttcgtcattagtaacctgaaattatcttaacttgtatataagcaagactataaatattagcaaagatg

SEQ ID NO: 19002 - DNA, 3000 bp, Unknown; identical to SEQ ID NO: 19001
  misc_feature (1)..( 3000): 2750-1469P.txt file - cDNA_ID_1820271; gDNA_ID_2926158; Annot_ID_139604

SEQ ID NO: 19003 - DNA, 3003 bp, Unknown
  misc_feature (1)..( 3003): 2750-1469P.txt file - cDNA_ID_1820283; gDNA_ID_1971820; Annot_ID_58309
aacttatggccattgaaggcaaggtaagcgttgaaattatgtctatatcctgcagagcttctatgttcactgtcaatagcgtatagatatatcttttgatgtcttgtagatcaatgcatttattcactgcttcgttggggctagaagaattgtgaccctgcatgatttggaagtggcaatatgccggaacgagtttgttgattctttcgatgatctggaattgggacctttgctgcagcatccactggttttgctgtattttccatcgatatccagttctactggaccagttaagatcactagtgaggagataatatcatttcttgatagctatctgcacacttatatgacagaagatgttaagctcgatgaatttctgaattttgttgcaagtcaaaagtcagttacaagcaaggaaaagcttggtgtgcgtattcagagcttgcggtatgatattgttcttttttggattatctaaacttggttatgagttaaataattttgatattacagtaaggttggtattaatgttggatctggttgttcttagtatgaactgcattagctgattttatgtgatttaatgcatttttataggatgtatgtatctttcattctagacgcgaagagacaagaaggtgaaacactgaaagtcttactgactgagctgcatcagaagtatcacatcccctcatcaaagaaacaacagcgagataaatctctaactgtctctgagcgagctgactcatttgctttacatcataaggattattgtggcaagcatataagatttgattcttcaagctcagatgaaaatgataatgtttatgaggttagaaatcttaatagttctgaccatatcaatagttgtccatatccatctgttgcggaagagatgaagcgtcttgggggctccaataagaaaaggaagggtgaaagacgtaatcatgaaaaatctgattcctccaaactgcttagaaaatccccctctaaattacaaggacatgcgaaacaagagatacctaaattggctgatgattctgaagctaagaaggttttcagtgtcgatgaggctgattttacactttctgaaggagatttaagattgttcatttcaacttggaaggacacatgtaaagagctaagcatttcaacggtaagttcatgttgagattgtatgactgttttaatctgagagtgaattatcttaagtgaggtgtgagggggcttcatgtttgtttattttctaatactctcttttattattgtagtttgtcgagaaaatgttgtctttttacaacttggggggctctgaaggaagagctcagattaaaagagctaaagcgatgtcatcatttccgtttgttggattactaaatgtcgctgtgagtggtcatactacttttgtttaaagtgttttgcatttttcttgttttcttgctttcattaattcaattgaagaattttgtcaaaaatctctgttaatgcctcctatttacttttgttcatgccattcacattaagtgtacttggaggtcaaatcctcctaatctgacgtcttttttttctttgcaacacttgttttttctctctctgtgaaatagctgttttctggtatctcctaatttggatagaacagatggatgtttggttactactttttttttttaatccatcaaatgtttatgaaaaataactgcacatatattttcaaagtgaaggatgcgagattacgtttgctatatatttacatccatactcattttttgcttcacctttccgtttttactttttttttctttacccatttttttcccctcttattttgctttgtgttgcttttcccagtttgaaaagattttttgtagtttcaccgtgtaacacaggctcactattttctatgatatctccttttaaattctgaagaaatgctgaatttaaaagttagacgattttcactcatacttttacagtgttttaagttgttgctcttgttgtttttctatctctgctcttgaactaagacttagcacccagttgcaaagtcttggagttgagctcagcaaatgtggaaacttccctagttcggctttgctctttgatacatcacaatgtcactgaggcaagctggataaggacaaaaatactacagactgtggatcattcaaaactcgtgccccttgtcacctccagacccccacttattaaattaattaatggaaaccttccaacatctcatgttgcagatgttgctattatgaaaattcctttgttattcctgtttacacctgaaatttaacattgcatttgtagcatctcaatttttttacctggttctgtgtcttgtgcaaaaatcttgttgttcaatgtttgagaagtgtctgcattgtcgttattcgattctctttatttattcctggcaatcagaagaaaataaaaccacaacagtgcaagagtctcttaggtgcagtgggaaatttgtttcaggcaatagcatctcgtgtttcttatttatgatcaattcatttcatttactttgctgattgaaaaatttgcacatgtttgctgtgattgagtagtaactttattttaccccttctattcaggagtttctttatggactttgtttacttcgttttttaatttggtttgtttactataataaagaaatatgatgcattttcaaatgtaggatatagattagaaaattgaaatgtgttacaccttgtttggcgaaagagtgctgttttgtgttgttctgaaaggctatacctttttatttacgttgagcaaaaaaaaagtgaaaatattctctgttaaattgaaagctaacttgccctggaagcatttcatattatgtttaattgtaataataaatatatgaacaaaaagaaatattgatattctctcatttgcttgcatggattgggttctaacttgcttacagatgagcttcctatacccattgtctcttatttttgctttattgtttttcttcctatg

SEQ ID NO: 19004 - DNA, 3003 bp, Unknown; identical to SEQ ID NO: 19003
  misc_feature (1)..( 3003): 2750-1469P.txt file - cDNA_ID_1820283; gDNA_ID_2926158; Annot_ID_139599

SEQ ID NO: 19005 - DNA, 3000 bp, Unknown; identical to SEQ ID NO: 8602
  misc_feature (1)..( 3000): 2750-1469P.txt file - cDNA_ID_1820291; gDNA_ID_1971820; Annot_ID_58306

SEQ ID NO: 19006 - DNA, 3000 bp, Unknown; identical to SEQ ID NO: 8602
  misc_feature (1)..( 3000): 2750-1469P.txt file - cDNA_ID_1820291; gDNA_ID_2926158; Annot_ID_139596

SEQ ID NO: 19007 - DNA, 3003 bp, Unknown
  misc_feature (1)..( 3003): 2750-1469P.txt file - cDNA_ID_1820310; gDNA_ID_1971820; Annot_ID_58301
tactatcaattttctttataaaaaaaaaaaaaaaaaaaaaaaaaaaaaactagactaatttttatttgtgtactgtatacattattttctaaaacaaatgtctagacattatagtattttataaacacttacacaacaccaaatgtttgtcttaaccccgactaaaaaggacatatgtgttgttaatgctggatcaccggtggttttgttagtgtctacccttatttgtatggaaaaacactgccatagcccataaggtaacttataaggacatcaaagcttttggtgtttgactgcttaaatgttcagtctccagattccagcacatgcatttctcgaatacttgactaatggtgaagctagcattttttaataactttgccttaccaatcatggtggttggcggaattaatcatggtggtaagcgagagactttattttatccaaaaaaaaaatgagagacgtaaaattagaactatttttagttataatagttatattttattattttgtctcaattattctccccgcccctctatgtagacgtgtgaatattagagagattgataacgaactcctcacaacatcatatctcaagttcaccacccaaaagaaaaaacacacacacatcttagagagatgaaagagactaattttggcgagaaaacgcgcgttctggtagttggtgggacgggatcattggggaggaggattgtaagtgcgtgtttggctgagggacacgagacttatgttctccagcggccggagattggagtggacatcgagaaggtgcagctacttctttctttcaaaagactcggcgcacatcttgtggaaggctcattctccgatcaccaaagccttgtctctgccgtaaagcaagtcgacgtggttgtctccgccatgtccggtgtccacttccgcacccacaacatccccgttcagctcaagctcgtcgcagccatcaaagaggccggtaacgtcaaggtaaaaggactcatacatcactaaacacttttctttctagtgtagttgttacctttttcatcagagtttaaagcaatttaaaataccgattatcgtagctggtattccaaaaaagttgctttggcatatatacaacataaattaatagtatatgtgttaaaaaaatatgaaggtacaatgtatctgtctgcatcaatgacatatgcatcttttgaaaatagctgatatattacggctatattttgctaacaatcgcaaatgaattgaatttaactctatagacatatactcatttttaaaaatttaataattttcttggaaaagataaagatccgtttgtaagataattgtgtaacacaaaagtcacctttttggcttaccaataacaaagttttaataagcttgcatgcattattgttcaaagactatctaaaggtttttgaaataataataaatcattttagaaaaaaaaacaaaattatacaaccaatcttgtcggatgtttttttaataatattgactgtcttagcttatgttcggtggtgcttacactaaaaaattaaaatatttcagtgaaactacttacaataagttaaaaaatatttcagcgtttcttaccatcagaatttggaatggatccgtcacgtatgggacatgccatgccaccaggaagtgaaacatttgatcaaaaaatggaaatacgaaatgcaattaaggccgccgggatctcccacacatacctcgtcggtgcttgttttgccgcatacttcggcggaaatttatctcaaatgggaactttgttccctccgaaaaacaaagttgatatttatggggacggaaatgttaaaggttagaagaactcttatggaacgctctctcttcatatttttcttttttctatttgtgtcacttttataatcatgaaaattctaaaaaatctatttttgttcccattggttttattatagtggtgttcgtagatgaagatgacatggcaaaatatacagcgaagacgcttaatgatccccgaacgttgaataaaactgtgtatgttagacctaccgacaacattctcacacaaatggaactagttcagatatgggagaaactaaccgaaaaagagttggagaagacctatgtttcaggaaacgactttcttgctgacattgaaggtaaatctaatcatcatctagtaaccaaattaaacaaacctagcttttggattatagatttctatcacatctcttaaataaagcattggattaatgtaaggttggtttagtattaaaaccgaaatgtaaaagttggtcatgccaagtatttattttctatatatcacatctcataaattaaagtagacgtttttgtcttttagattctagtaaattatgagaaagagttgaatttagaccaagtatttattttctattaaatgtgaaaatgtttattatatacatgcagataaggagatatcacaccaagcgggactaggacacttttatcacatatactacgaaggttgtctcacagatcatgaagttggagacgacgaagaagctactaaactctatccggatgtgaagtacaaacgcatggatgaatatttgaaaattttcgtataatgttacatatatgtgaaacacatcgccatttccttatttttatgttttaccatggccttttgttttgtttgcttgaagatgttttccgaatttattttaaaatttaaatgtttcagttatggatatgtctggttatatatagatatacatataatctcaagggtccgaaaatttccaaaagtaaactcaagggtctgaaaagataatttggaaatttaagtccttttcctagaataccaccgataatataagggctttatacacaaatacacaagagatacttcgagaagagattaaaaaataaataacataaaaaaatggaaattatcttcccgccatgtgtatgtggtaactaacaaaagcttcgattactttatcctctcactctctaatg

SEQ ID NO: 19008 - DNA, 3003 bp, Unknown; identical to SEQ ID NO: 19007
  misc_feature (1)..( 3003): 2750-1469P.txt file - cDNA_ID_1820310; gDNA_ID_2926158; Annot_ID_139592

SEQ ID NO: 19009 - DNA, 3000 bp, Unknown; identical to SEQ ID NO: 8588
  misc_feature (1)..( 3000): 2750-1469P.txt file - cDNA_ID_1820318; gDNA_ID_1971820; Annot_ID_58298

SEQ ID NO: 19010 - DNA, 3000 bp, Unknown; identical to SEQ ID NO: 8588
  misc_feature (1)..( 3000): 2750-1469P.txt file - cDNA_ID_1820318; gDNA_ID_2926158; Annot_ID_139589

SEQ ID NO: 19011 - DNA, 3000 bp, Unknown; identical to SEQ ID NO: 8587
  misc_feature (1)..( 3000): 2750-1469P.txt file - cDNA_ID_1820322; gDNA_ID_1971820; Annot_ID_58297

SEQ ID NO: 19012 - DNA, 3000 bp, Unknown; identical to SEQ ID NO: 8587
  misc_feature (1)..( 3000): 2750-1469P.txt file - cDNA_ID_1820322; gDNA_ID_2926158; Annot_ID_139588

SEQ ID NO: 19013 - DNA, 3000 bp, Unknown; identical to SEQ ID NO: 3321
  misc_feature (1)..( 3000): 2750-1469P.txt file - cDNA_ID_1820347; gDNA_ID_1620639; Annot_ID_47444

SEQ ID NO: 19014 - DNA, 3000 bp, Unknown; identical to SEQ ID NO: 3313
  misc_feature (1)..( 3000): 2750-1469P.txt file - cDNA_ID_1820358; gDNA_ID_1620639; Annot_ID_47438

SEQ ID NO: 19015 - DNA, 3000 bp, Unknown; identical to SEQ ID NO: 3312
  misc_feature (1)..( 3000): 2750-1469P.txt file - cDNA_ID_1820368; gDNA_ID_2213670; Annot_ID_132771

SEQ ID NO: 19016 - DNA, 3000 bp, Unknown; identical to SEQ ID NO: 3312
  misc_feature (1)..( 3000): 2750-1469P.txt file - cDNA_ID_1820368; gDNA_ID_1620639; Annot_ID_47435

SEQ ID NO: 19017 - DNA, 3000 bp, Unknown; identical to SEQ ID NO: 3312
  misc_feature (1)..( 3000): 2750-1469P.txt file - cDNA_ID_1820368; gDNA_ID_2213670; Annot_ID_182278

SEQ ID NO: 19018 - DNA, 3000 bp, Unknown; identical to SEQ ID NO: 3312
  misc_feature (1)..( 3000): 2750-1469P.txt file - cDNA_ID_1820368; gDNA_ID_1620639; Annot_ID_162972

SEQ ID NO: 19019 - DNA, 3003 bp, Unknown
  misc_feature (1)..( 3003): 2750-1469P.txt file - cDNA_ID_1820386; gDNA_ID_1620635; Annot_ID_47337
gaacaaataaaccgtggagcattggtcaataacaacactctttactctttcttccgtttgctcgaaccatctagtctaagagaaagaaaaaatactaaagagaaagaagaagaggacttgaatacggaagcttgagagaatgaaagcgatcgtgatctcggagccaggtaagccggaggttctgcaactccgtgatgtggcagacccagaagttaaagacgatgaggttctcatcagagttctcgctactgctttgaatcgtgcagatactctccaaagacttggcctttataatccaccacctggctcaagcccttaccttggtctcgaatgttctgggaccattgaatccgtcggtaaaggcgtctctcgatggaaagtcggagaccaggtagatatatattcctgtgatttcgtttctggaaattagggactaatcctcaattttggttttagggtttggtgtctctgtgttaagttatccgagcttggatttaggatacagaacatttgaatacactgctcagtgctcacactcatgttcttaatgatttaggattcataacatctgaatttgaatgacttggtttctgtctagttgcaattcgtttacatttgtttagctgttgaggcttcttatatttttgtgttggattggatttagttttactctaggcttaagcaagtaaattacttttgaagtataaagttattgtcttggattacttctgactgtctttgtctcaggtgtgtgctcttctttctggaggaggttatgcagagaaagtttctgttcctgctggacaaattttcccaattcccgctggtatctctctaaaggatgcagcggctttccctgaagtggcatgcactgtttggtctactgtcttcatgatgggccgtctctctgttggtgaatcattcttggtatttcaacttctcttctctttttatgtataaaaacagtttctatggtctggtaaaagccaatccttttacggtcaattctagaggcttttatctattactttgctttgcatttgtcttctctcttgggctgttttgttttctttcttgtctatgtccttgctaatgtttgatagtatctgaaattttagattcatggaggttcaagtgggattgggacatttgctattcagatagctaaacatctgggagtgagagtatttgtcacagctggttggtctgagcttcaatatattgataacctttatgtacttttttccgaaattgttcaaattttcttttaactaacagggagtgatgaaaagctagctgcgtgcaaagaactcggggctgatgtttgtataaattacaaaaccgaggattttgttgcaaaggtaaaagcggaaaccgatgggaaaggagtggatgttatcttggactgcattggggcaccgtatttgcagaaaaatctcgacagcttaaactttgatggaaggttatgtattatcggtttaatgggaggagccaatgcagaaataaaactaagtagtctgcttccaaagcgtctcactgtcttaggtacttaacacaatcaatcaatcatctctcaaaatcaatactgagagtctgagacctattgataattcttgatctgttttgttcctacaggagctgcattaagaccaagaagccctgaaaacaaagcagttgttgtaagggaagtcgagaagaatgtctggccagcgatagaagcagggaaggtaaaaccagtgatttacaagtatttaccattgtcacaagcagcagaaggtcatagccttatggagagtagcaaccatattggtaagattctccttgagacttgattctctgcaaagggagaaatgttcagagacaagagtcatggtcaataatcaataaaatctggtcgattctgttcatagatatctctttacaagagttctgtttgttggcttttatgtatctctgatttggtcaaaaagacactgtaactatggaacatatatagtatcaaataagctgttgtataccaaacattgatttcgaagtagaatatgattttgtaagaagtttttatttattttgggcttaaaaagtgtatttatttttgttaattgtttgatttaataaggatttttaccacctgaggcaaagaccatgaatatcaaaggcaacaacagttttgacttctctcgttttcatcggtccgtttgtacttcttctgataaaaacaaaaattttgcaaaatctaacaacaaaatctttgattcgacaaactttgtaacaaaaaaaatcgaaactttgcaatttttacagaatgagttcgtcgctgcgacagtggtttgctagagtactcgtgcttacacagctcatcaatggagctctgtgttggggaaaagaaggtcactacacagtctgcaaaatagccgaggtcaaaattgattcatgtaattagattctgagctcgaactctaaagttgctgaaagcactgtgattcatgtaaatttgatatctttggtaccaaattaaagatcgaattagctctgcaactgtcacaaatactctaggagattactgttatggtggagtctagatagatactaaacctttgatttggattgaaatttttctgtagacaaggtagtaccttttgtgttatctttgataatgccatttttagtcctcagagctactttgaggaagaaactgtagctgcggtgaagaaacttctacctaaatcagctgatggagatctagcatctgtttgctcatggcctgatgagattaagcaccattggcaatggcgatggactagccctttgcactatgttgacacacctgattacagatgcaactacgagtattgtcgtccgtttattcttccctcttccaattgcttacctgttttcatatccgaaatccaatctatatgttgtgtttgtgaaggggattgccatgatactcataagaatcaagaccggtgtgtgacaggagctattttcaattacactatg

SEQ ID NO: 19020 - DNA, 3003 bp, Unknown; identical to SEQ ID NO: 19019
  misc_feature (1)..( 3003): 2750-1469P.txt file - cDNA_ID_1820386; gDNA_ID_1620640; Annot_ID_47477

SEQ ID NO: 19021 - DNA, 3003 bp, Unknown; identical to SEQ ID NO: 19019
  misc_feature (1)..( 3003): 2750-1469P.txt file - cDNA_ID_1820386; gDNA_ID_2926178; Annot_ID_140432

SEQ ID NO: 19022 - DNA, 3000 bp, Unknown; identical to SEQ ID NO: 3331
  misc_feature (1)..( 3000): 2750-1469P.txt file - cDNA_ID_1820413; gDNA_ID_1620640; Annot_ID_47466

SEQ ID NO: 19023 - DNA, 3000 bp, Unknown; identical to SEQ ID NO: 3331
  misc_feature (1)..( 3000): 2750-1469P.txt file - cDNA_ID_1820413; gDNA_ID_1620640; Annot_ID_163021

SEQ ID NO: 19024 - DNA, 3000 bp, Unknown; identical to SEQ ID NO: 3331
  misc_feature (1)..( 3000): 2750-1469P.txt file - cDNA_ID_1820413; gDNA_ID_2926178; Annot_ID_140422

SEQ ID NO: 19025 - DNA, 3000 bp, Unknown; identical to SEQ ID NO: 3331
  misc_feature (1)..( 3000): 2750-1469P.txt file - cDNA_ID_1820413; gDNA_ID_2926178; Annot_ID_199992

SEQ ID NO: 19026 - DNA, 3003 bp, Unknown
  misc_feature (1)..( 3003): 2750-1469P.txt file - cDNA_ID_1820417; gDNA_ID_1620640; Annot_ID_47465
catgtaaaaaagaaatgtaaacttgggtttgatgataatgaattgttcatgttaaggactaataaaaacagagaagaaagtgtactaaaatcgaaatttgagctctccaattactaaatcggtgctaaatgaaccggtcggtcgtttctatatttgattcgttcggtttatcctttaaccggtcgaaccgaagcttcttttgttcgtatgaagaaaactaaaatccaaatctctctctggtacaccatgagaggagctctgttcagaaatgcatctctctgcgctcgcagaatcattctttcttctaggatctcccccaatgttccctttctcactccaatcgccgctccggctcctcccaaattcagatttttcagttccgaatccggtgagaactcgactactgccactgagtcttcgccgactgattcatccgataagaaggatctcgttgtaaaggatgtcagcaacaaaggtaacagactctatcctctcttcaagcttgtttggttacctcacacttgaaatggccttgtattagttgaaatgtgtgagtctaattctcatctcgccatttctgaatgcctcacagttttcaattgatccttcgatataagattcgtagcttcttatctcctgaactactaggtaatcgtttgaaattgactttatatgttggattttgtggtctcagagcttaaaagccgtatagacaagtctttcaatgagggtaatgaagatgctttacctggagttattgaagcacttctacagagaagacttgtagacaaacacgcagagactgatgatgaattgatggaaaaaatcgagagtctacctttcaaagatgatgtcaaggatgaagattttgaatccgatttcgaagaagcgcattctactgacgaagaacttgaggatttgtacaactctcccgagtatgtagctgaaaagatgaggaagaaagaatttttcaacatggacgataacaagtgggatcacatgattagagaaggtatccaacatggctgtcttaccgatactaaacaatgcgaggagattctcgaggatatgctcaaatgggaccagcttcttcctggtaatgctcttttatttttcaatcttcccgttcatcgactcacatccttagacatagattaggttgattaatagactattgtgcctcgttatagctaaacacactctcttagtggaacttatcttttgtagttaacctttctatttggattttaatgaatcatggtagtagaaccattcttcttttcttaactctttcaaggtaatgtactatgtcggatttgttgcttctcggatcagtagggctgtttagagaatatattggtttgttcctgttatgcgtatgtatgaacatcctctaactgtgtatcttcattcagatgacttgaagaaaaaagttgaagcaaagtttaatgagctcggggatatgtgtgaaagaggtgaaattgaggccgaagcagcttatgagcttttcaaggaatttgaagatgagatggtaattcagtatggggatcagatggaagctgagggtcctccccaatttggtgaaacagatacttctgacaggaatactgacttggatgatccctccggtaaaggcccaatcctcaggtggcaatcaaggatagtttttgctcctggaggtgatgcgtggcatccaaagaacaggaaagttaaaatgtctgttacagtgaaagagcttgggctctcaaatcatcaggctaaaaggctaagggaacttgtgggaaaaagataccattcagggaaagatgagcttacaatcacctgcgagaggtatataaactataaatcttaagcttttcgcgagacaagaatgttgaatcatgtaatgtttttgtcctgtcacaggtttgaacaccgagaagaaaacaggaaagactgcttgagaactctttacgggttgatagaggaagctgggaaagccaacaagatcgctgaagacataagaacttcatatgtaaaacagagactccgagccagtccagcttttatgcagaaactacaagccaagatcataaggtctaaagaatcaaatgccatcaacgcttgaaaaaaacttttcccggttcgcgcctttcttcttgtctcaccaaataatctgtggatcgtcttcttttggcaatcatttgatccggtacgggttttcagatcgatgaagaatctttgatggtaactcctattttagtttggtttgcttcttgtatctcatgaagacatgaaccttggctgtgctgttggtaactccatttgtcttcgtcgggaaactataaacagaacagtccgaccactttttcatgctaacttctagattcataatgcaatgttggtaaaaatagacaatgaatgaaactttttcatgtataaaaaatatggaaacttggggttgataatgaattgttcatgttaagactaaaataaaaaacagaagagggtgcttgtgtggttagtctcaattgttaaatcaacaattaagttctccgattaggcgttgaattaaccggtcgcccgtttttaattttcatcgttcgattttcaacttaacctgtccaccagaaggtcccttttgtgcctaattttgatgaaatgtcgtcatttcgtcgttgaagctacaacacaaaatacaaaacgttgtagttagattgctgaatctctttgtaccggtcaaactcggtcataccgagtatcaatccgaatgatccggtaggaccgggattttaattaggaatccgaatctctaaattccagatgctaccttatacgtgtacgtcttctccgcccttcttattcatttctactctgctgcgttatttctccgtcgtcctcaactcatcgccggcgtttaccatccgctagatccgtcgcctctccggtcgactatttatatggaatcgtaaatttacagacactaataagaatagtttgacaaaatctgtagctggaataatg

SEQ ID NO: 19027 - DNA, 3003 bp, Unknown; identical to SEQ ID NO: 19026
  misc_feature (1)..( 3003): 2750-1469P.txt file - cDNA_ID_1820417; gDNA_ID_2926178; Annot_ID_140421

SEQ ID NO: 19028 - DNA, 3003 bp, Unknown
  misc_feature (1)..( 3003): 2750-1469P.txt file - cDNA_ID_1820421; gDNA_ID_1620640; Annot_ID_47464
ggatttggcagatatcatcattgaatttgctaagagtgatatcagagcaagaaggatgttcaatagaagagttgaatgctggcaaaatatgtgattggttccttaaggacaagctgaagagagagcataacattgaatctgctgttcttcaatgggatgatcccgattttcctttttaaatatccttattttttacattcaagccacacaaaagtatgatcattaacaaggtgaatatgtatcgtaagtcttaattagtctattgtggtctgactaggaaaatataaaccttttgttaagtcctacaataaaacgtattcaacaattccaaatattatccatgactgaaatacataaagaaaaggtttaaattttatctagaaaccaggaaaaaagacaacagtaaacaaacaattaaaaaagaaaagactttgaaagaaaatccaaaagttgtagaagaaaagacttaaataaacacaaagagaatccaatacgctgtcgtttttgagcaaagtctctatcgacttttttccttccgttaatcaagccatcggatattaaataattacaaaattattttcagacaaaacacggacgcgaaatcaaccaattaaatccacttctctctcaccatctcacgtccgatctctcctctctgagctctcatcacgagtcaacccctttctccgtcgaaattcgcatgcttaaactctgagagaagaagatgactatgacggaggagaaaccaacttccgacggcaaaggaggttggggtttcttcaagattccatttcgtaactcaagcggtcacagaaacgccgcttcaagtgctgctacttctccgtttccatctggagcttcttcttcttctacttcttctcatctacataaccatcatcaacatcatcatcaacatcaccatcagcaccatcatcagcttggttataacggtcctcacggtgatggatcgggtcaaaatcaacatccgactccttctccttcagtttcatctgttgctaagtcttttcttcctactaaacgaagattgaagcttgatccttctgagaaactctattttccttgtgagcttttttcgaatctcattttgatcggagtagtttctctggaattacagtctttttttcattgtctagggtttgtttctgaagatttgagatccattgacactagtctaaaatttctatcttttagtagaatttgagtatttgactgatctgattatgtggattgatacataagtttgataattgactcaataggaaacataaagtttgaaactttttggaagttaagagcagaatcttgacattggattataattctaacttaccattactctaaatatggtcttcctttaagcattctgaaattaggagtcttttatagatacgaatgattttagctatcaaatgattttgcaggaaggttttggtgtatacttaggccatgttttttttttcttcatgatttggattttggaagtttagttgttttctgttacaagtaatgctgtggagtactgaattagattattactttgttttgaagatgagcctgggaagcaagttaggagtgctattaagattaaaaatacaagcaaatcacatgtagccttcaaggtttgttttttgatctaaagcgttttggttattgggtctttggcattattgtatatgagcttactcgttgctctttcagtttcaaacaactgcgccgaagagttgctttatgcgtccacctggtgctattcttgctcctggagagactattattgctactggtatttgttttttttgttttctcgcctctgttcttattcttcttgatgaggctatcagaacaatggcttattcaatgtttctctgattgaaatgtgcagtgtttaaatttgttgagcctcctgagaataatgagaagccaatggatcaaaggagcagagtgaagtttaaaatcatgagcctgaaggtgaaaggtccaatggactatgtgcctgagctggtatgttgatcttctgatcttatctattagctgatctttgaacatgaaaacagtagtaacatatccgaatccagatagaacataagatattgacccatctctaaaacataagatatcaatgactagactaagaatgtgttttggtctgagtagaggtttccagttaccttttaaggcacaaacatataaccaagcattccactgaatgctgtttccatctaaaagacatatcgattgcttttgtttttgtttttttctcagttcgatgagcaaaaggatgatgtctctaaggagcaaatattgcgtgtgattttcttggatcctgagcgctccaaccctgtgagtatccgaataattttgcttatgatgacgattctattattttacgacctccctctttaataatctatgtgataaatgacataggcattggaaaaactgaagcgtcaattagcagaagcggatgcagcggtggaggcacgaaagaaacctccagaggaaacaggtccaaagatgattggagaagggcttgtgatcgatgaatgggtcagtctcatttgctatccagtgtctcttccattagatgattgtgaaaatctgacattgtttttgtcttacctctaataaaaacacagaaggagcgtagagagagatatcttgcacagcaacaaggcgaaggagctgactctgtctgagagactaaaagagttttctcaggacaaaaacaagtgcgcttgtgaagatgaagaagaagggaccgctatattgaatttatatgctaacttctagattcatgatgcaatatataaggatcatgctggtaaaaaaaaaagacaatgaaggaaacttttttcatgtaaaaaagaaatgtaaacttgggtttgatgataatgaattgttcatgttaaggactaataaaaacagagaagaaagtgtactaaaatcgaaatttgagctctccaattactaaatcggtgctaaatg

SEQ ID NO: 19029 - DNA, 3003 bp, Unknown; identical to SEQ ID NO: 19028
  misc_feature (1)..( 3003): 2750-1469P.txt file - cDNA_ID_1820421; gDNA_ID_2926178; Annot_ID_140420

SEQ ID NO: 19030 - DNA, 3003 bp, Unknown
  misc_feature (1)..( 3003): 2750-1469P.txt file - cDNA_ID_1820425; gDNA_ID_1620640; Annot_ID_47463
acaacatactagtaactagtacttgagtttccttagaacatacaccattcttacaatagttttgttattagatgttcccgttttgtgtataatttgattcttcttctatatggtcttgtattgtggaaaacgattattggggagcaaagaaacatacaccaaaaaaaatatgatcaaaatttttagtgtgtggaacctttcgaaaaccctacgatgttcaagtaagaaattgcaattatatgagatattatatatatatgcaattgttcttagtatttaggtgtttagaatatatactttagaccgttttaagatgtttgttaaaagttagtcttcttctaattagaaacatcttcttttgtttttatgaagtaagtgataagatatacatataatttacctcgaccaagtttgaatacttgctaggttaccatgtcatgtttaatcgtccacatgagatatctgtgtgactgtgtcttcggttcgatgtggctaattttctagaacatgttatcaaaagcaaacgttgttgtaattggctgatactgaggaaaatgcagtttggcaatgacaagaaccacacatatatacaatattgatatctattgaataattatacaatattaaattcctttgcattattcatttgtttcgtataaactaaaacctttgaactctaaatagttgaaaggagcagagtcagcagacaaggaccaaagatcccttcgaccacacatataaaacgatataatttgatacgaaatcgtaatggttgtgcagttgatgttgccacttaagacacttacgtaagacttcatgcaaatataatttaatatacgtacctcttgaatttacgtgttagtttgattatatatatattggtcatttttttggtatttgctcgataatagagttgatgggaaaccttgataatattaaaaattatcatatgaattttggaggaaagacagcaacacactcgagaactctctggaaaattgcgttttcactttttttgttttccaggattagttgatctaaaatctataatatatattaataaatacaacctaataaacaaaaattatttatgtttcagttaatgtaacccattaatatagaagtaatctcgtaaatatggagttgattaaaaatatgtacttaatcaaattcatctatatatatatatatgtgtatatatatatatatatatatatatgaattatattacgatcaaattatcttagcttttaaaataaaatttttttatcttagctcttattcaaaagtctttattccatcacaaggttatgttatcttttgtatttttattttattttatacaaggacttccaagttccaacatttcaatttctaagtacatgcatatcttattaaatagtgatttaaatacacaaaaatatgaaataaattctaaacaaggtccactctataaaagaagaaaacccacaaattccaaagcccaaattaaaacaccaaaagagcccaaaatacaaactcattcttcaccactaaaatattccaaagcaaagcaacgaacataacggataagtgttatcctcatctagtcatcttcaccctctaactcaccgagaaagaaaagtaaagagagtttggtgtcactatgaacattgccattcataattaccgtcactcaaaattcatcgtaaatcctcacatagacaagacttttgcaaggactcgacaggcaagatcaaataatattacattcatgacaagtactcatggaagaagaagaacgatgggactttgtttggtaagagcaagtgccgagaccggagaagaagaatccgacgatcaaaacaagcctgagagaagaagtttcttgagcttagcagaagctggtctagtcgaaatctcaggccttggtgcacacgagaagtttctctgtcgactaacggtaaattaaatcataaatttatccctacatattataaaccctccaataccaaattttaattgcaatctattaataaatctcttacattgttttgaaatatattggtatggttaagataggaaatgaaacattaattttacataggaaattgaaaccatatgtagttgtgaaacaaaagaaaatcttataacacgtcctcaagaaatgaagtgtgattaacagtctatagtaaacatatgtacattaagtaaataactggaatatcatttttcttagaagcatgtacattgatttatagatgtttcgtatgaacttcttcttatattttggaactggatttggcagatatcatcattgaatttgctaagagtgatatcagagcaagaaggatgttcaatagaagagttgaatgctggcaaaatatgtgattggttccttaaggacaagctgaagagagagcataacattgaatctgctgttcttcaatgggatgatcccgattttcctttttaaatatccttattttttacattcaagccacacaaaagtatgatcattaacaaggtgaatatgtatcgtaagtcttaattagtctattgtggtctgactaggaaaatataaaccttttgttaagtcctacaataaaacgtattcaacaattccaaatattatccatgactgaaatacataaagaaaaggtttaaattttatctagaaaccaggaaaaaagacaacagtaaacaaacaattaaaaaagaaaagactttgaaagaaaatccaaaagttgtagaagaaaagacttaaataaacacaaagagaatccaatacgctgtcgtttttgagcaaagtctctatcgacttttttccttccgttaatcaagccatcggatattaaataattacaaaattattttcagacaaaacacggacgcgaaatcaaccaattaaatccacttctctctcaccatctcacgtccgatctctcctctctgagctctcatcacgagtcaacccctttctccgtcgaaattcgcatgcttaaactctgagagaagaagatg

SEQ ID NO: 19031 - DNA, 3003 bp, Unknown; identical to SEQ ID NO: 19030
  misc_feature (1)..( 3003): 2750-1469P.txt file - cDNA_ID_1820425; gDNA_ID_2926178; Annot_ID_140419

SEQ ID NO: 19032 - DNA, 3000 bp, Unknown; identical to SEQ ID NO: 3324
  misc_feature (1)..( 3000): 2750-1469P.txt file - cDNA_ID_1820428; gDNA_ID_1620732; Annot_ID_49418

SEQ ID NO: 19033 - DNA, 3000 bp, Unknown; identical to SEQ ID NO: 3324
  misc_feature (1)..( 3000): 2750-1469P.txt file - cDNA_ID_1820428; gDNA_ID_1620640; Annot_ID_47458

SEQ ID NO: 19034 - DNA, 3000 bp, Unknown; identical to SEQ ID NO: 3324
  misc_feature (1)..( 3000): 2750-1469P.txt file - cDNA_ID_1820428; gDNA_ID_2926178; Annot_ID_140414

SEQ ID NO: 19035 - DNA, 3003 bp, Unknown
  misc_feature (1)..( 3003): 2750-1469P.txt file - cDNA_ID_1820432; gDNA_ID_1971811; Annot_ID_58117
tttactgttgttttgtttgagttcaaagatttaaactttagtctgctatgttattagccaataggactttatgggttatgctgcaaaaatacattttgagcagaaagatatattttttttacaaagaaagattaaaagtttaatctctcaagtaatctttgctccattattggatgtttttaggttgctactttgccttaaaagcgtggcacgcgcagcaagcaggcgcggctgcagttcttgtggcggataatgtagacgagccattgttgacaatggattcaccagaggagagcaaagatgcggatggtttcatagagaagctaacaatcccatcggtgttaatcgataaatcatttggagatgacttaagacaagggtttcagaaagggaaaaacatagttataaaactagattggagagagtctgtgcctcatcctgataagagagtagaatatgagctgtggactaatagcaatgatgagtgtggtgcacggtgtgatgaacagatggactttgtcaagaactttaaaggtcatgctcagatactcgaaaaaggcggttataccgcgtttacgccgcattatattacttggttttgcccttttcagtttataaacagtccacattgtaagtctcagtgtataaaccatgggaggtattgtgctcctgaccctgaggataatttcagagaagggtatgaagggaaagatgttgtgcttgagaatctgagacagctttgtgtgcatagagttgcgaatgagagtagcaggccttgggtttggtgggattatgttaccgattttcattctcgatgttcgatgaaggagaagaaatacagcatagattgtgctgagagtgtcatcaaatctctgagtaagaatcttttttcttttcctttttagattttaaagaaagagagtcttctttgtttaggttatgaatctttaagacttttttcagatttacctattgagaagatcaagaaatgcattggtgatcctgaggctgatacagagaaccaagttctgagaactgagcaagtatctcaggttagtttcttaatctatctttatttagagttttgaagaaacatttcagaggtttggttactaactgtaactatttcaagattggccgaggaaaccggggagatgttacgatattgccaacattagtcatcaataacgctcaatatcgaggtttggtacttgatattttttcagtttcactctctctttatgaagatgctgaagtttctgttgttattggttgcaattgtgaagggagattggagagaaccgcggttttaaaggcgatatgcgctggttttaatgaaacatcggagcctgccatttgcttaaacacaggtctagagacaaatgagtgccttgaaaacaatggtggttgctggcaggatacaaaagcaaacatcactgcttgtcaagtatgtcgtaaaaccgagcttaccacatcacatctcaccactatattgaatatcagtatcaatttgtttggaattgttttgaaaactagagaaaatgtgaaaatctagagagatattttctagtcctataatacttgaatcttttttgtttgatcaggacacattcagaggaagactctgcgagtgtccggttgtaaaaggtgttcaatataaaggagacgggtacacttcatgtacacgtaagttgttcacacatttcacacaacatagctctcaaatgttgagaccggtttcttgaatagtctctggtttgtgattgagctttgcagcttatgggcctgcgaggtgtactatgaacaatggaggttgctggtctgacacaaggaacggcttaactttctctgcttgctcagtttagtgattctcttgtcataagccaaaccctcccttacaaagttcttgttttcagttcaatcatctctttgttatttatgaaaaattaggactctgtatctactggctgcaaatgtcctgaaggtttccaaggcgacggtttgacgtgtgaaggtacataactcttaacttatcgattaaaatctcgaaagaaaccacataatcatattaccaacaatgtaattatgttttctgatttggctctattgcagatattaacgaatgtaaagagcgttcggtatgtcaatgtagcggttgcagatgcaagaactcatggggtggatacaaatgcagctgttctggtgaccggctttacataaacgatcaagatacttgtataggtaaaattttatcaatcaagatttaagagtactcaaattccataacagtatctaattaatatacattgatgattgtttgttacagagagatatggatccaaaacggcatggtggctcacattcttgatactggctatcgttgcagtagccggtttagctggttatatattctacaaataccggttcagggtactactactctttctgattccacaaaagcatttttgtacttaataacggttttaggattaccaaactaacttttctttggtgttcctattaacagtcttacatggactcagagattatgacgatcatgtcacagtatatgccacttgagagccaaagagctcgtgaagttccatcagaagccgagccttttacactctaatagtatatgaccaaagtaaccaaaactgtcatacacaaagaaatgtttgagatcaattaatgtacatatgaattatactgtaaaaataaaagagtgagatagagttgtgtatattttcatggcaaaaaaataaataatttggatgtaaagagacttttgaagaaaataaaacaaatattgctttcattgagagttgaactcaagacctcccgcttactaaacgggtgctctaaccaactgagctatgaaagcttcttgcaacatattattccaaataaattatatcgtaaactaagagttaaaatcttgaaaacaaaggataacgatcttcgtctccctctgctaaacccattttcttctgttgaggaatg

SEQ ID NO: 19036 - DNA, 3003 bp, Unknown; identical to SEQ ID NO: 19035
  misc_feature (1)..( 3003): 2750-1469P.txt file - cDNA_ID_1820432; gDNA_ID_1620645; Annot_ID_47570

SEQ ID NO: 19037 - DNA, 3003 bp, Unknown; identical to SEQ ID NO: 19035
  misc_feature (1)..( 3003): 2750-1469P.txt file - cDNA_ID_1820432; gDNA_ID_2926175; Annot_ID_140290

SEQ ID NO: 19038 - DNA, 3003 bp, Unknown
  misc_feature (1)..( 3003): 2750-1469P.txt file - cDNA_ID_1820436; gDNA_ID_1971811; Annot_ID_58116
gagtcaaaattgtgtacagtcagaaattgtaagtttgtgccctacaagatcaaaagaagcaaagacaaaaataaggatctggtgagagtactccgacagaaacaaagttcacttgaatcgtactagaacgaacgtgtaggaatatattacattttgcagattgtagcaatgaagtccaactctaccgaagaggattatatttggatgaggtcctccatattttgcaatgtcagccctttgtttaatgtagtatttgttataatcaaacttttcttctctctaaacaaaacacagaatctataagctttaaaatgcaaatatctctatgagtgatgagacctaaagttcatacatccacaatcaaatccaattacccgattagcccaaacatgtcgtgggatggaggatgaagattcttgtggtctctgatcttccagcttctcattactctgcgatggttcctcgaccaagtctctggcttcttgcttccacattccgttacccatttcttggcaaatatataaaccctatattaataaacttttaagagacttggaacttaagattcaaaccctaatttggaatacaaatctatgcgcgttaagccaaaccacatcattaattaagaacactgtcaatacacaacatgtgagcagcgaagaccacaacagagggaagtgattgagaacagcagatctaagctcatattcaacatgcatagaagaagaaaaccaattttgcatcaagagatactgaaaaatctttcattcataagagttccaagattccataaaaacaacaactatttggaagaagatgaaatggagacatctcaagttctgttccaatgtaaaatacagaccaactaagttcggtttcagaactcaccttcttcacctatgaaatttgacgagatcgcaagaagaatatacaatggattcagtgtttcgtaatcggtgagaaaaagacaaataaataagcttgatgatagcttgttagaccttagagaatagaagattgggtttaaaggctattctctcctttttctttttcatcgactcaactttatggactaatatatgcaatctcatctctttgttctaatttggacaaatacttttagctttttagacatttgttatatgtcacaatgcaattgataaagatataaatttgttgacaatgaatgcataggttcagaaccataaacaccttcaaattattaaaactcaaaaatagaaagtagaaacccaaaaggtagtttcatcagcacacaaaactcaatcctgttaatttaaaagtaacgaaataaagcaattgcaaaattatagtagtcattacaactccacctatatcatgattgatgaagcctccctaagttacatgaatctttctggtggtgagatcaaaactctacttgttcgaggccttgttagacagcttcttcaccggtttcatgcttcttcttgacggaatctgcctcgactttgcgacagtgaaagtagaaaaactgaagcagaataagaaaatcaagaacagcacatcctcctgaatcaactagccatggtagattcggttcgattttcgaccattcgacgctgttcactagtatgcttgcaacataagtcacattgccaatgaatgcaaagaagaacattaatggattcaatccctcaacatttcctctccttacattcatacatatttgaggaagccttccacccatgtaaatcgccgccattgcccaacccaaccacattccaatattgttgttttctcctaagttaccgctagagacctccaaaagctttcttgctcctgctcctccaactacaaacactctatctttccctctcaaatccatacttcttgaaccactcaatacgttgaatgatccaagaaacaagaacaccgagaccacacatagcaacgatttggtagaaggacgcttagcttcttcacgaagcaaaggctcttctacatcaaccatctgatgattccttcggtttttcatcaaccgcgggtaaatatgcccgtagtatatagattgaacatagagaacaagtgtagccagagtatacaacactgccgtgtagaattgaactggaagactagctggttccatcaagcagccaacaacattaaagatatcaccaagcatccatgttgttaagaaggttatagagactccttcaatggacttttgattgtagttagtcataatctgcggtatctcggcaacactccaactgataacactgatgataccaagagatagtgacaaatcatctcgaatcatcgttcttcacgtatgatacagccgaataaacctgttaaaaccctaaatacgaaattacaagtagctgaataatattgagcaatgaacaactcctcttataaaggtaagaagagagttagaagatgaataggaaaagggttttgaaactacaatgaccagattctaagaggaataggaaaggttttcagaattcagattggagaaaacgaatcctatgaatgaattaggttaaaatttttagtttctttctctatataattaaaatttgatatttatcaaaaacaaattaaataattaaaaggatatatccaaataattagaaaaaataagaatctaagtatatatcttgtttatacacgcaatgtttatctcttcaaagtctaggcttttgatcgagtctcctactatactaataccaccaaccaatttaaaaaaaaaacaagtagaaatttaacaaaagtctaacatcttccaaattttttccattttctaaaattatgttttgagtttgacgtttctttgttatttatataaactatagtatgctatcatcttcaatcagaaacagttccacagaagttttctgttttaacttttcctctgtttttgatttttctctctgaatctctccttcatttccccgggaaatagtaccagaaaggttatcatcgatcaaactcttcttggtggattcttcagagatg

SEQ ID NO: 19039 - DNA, 3003 bp, Unknown; identical to SEQ ID NO: 19038
  misc_feature (1)..( 3003): 2750-1469P.txt file - cDNA_ID_1820436; gDNA_ID_1971811; Annot_ID_175761

SEQ ID NO: 19040 - DNA, 3003 bp, Unknown; identical to SEQ ID NO: 19038
  misc_feature (1)..( 3003): 2750-1469P.txt file - cDNA_ID_1820436; gDNA_ID_2926175; Annot_ID_140289

SEQ ID NO: 19041 - DNA, 3003 bp, Unknown; identical to SEQ ID NO: 19038
  misc_feature (1)..( 3003): 2750-1469P.txt file - cDNA_ID_1820436; gDNA_ID_2926175; Annot_ID_199786

SEQ ID NO: 19042 - DNA, 3000 bp, Unknown; identical to SEQ ID NO: 8464
  misc_feature (1)..( 3000): 2750-1469P.txt file - cDNA_ID_1820456; gDNA_ID_1971811; Annot_ID_58111

SEQ ID NO: 19043 - DNA, 3000 bp, Unknown; identical to SEQ ID NO: 8464
  misc_feature (1)..( 3000): 2750-1469P.txt file - cDNA_ID_1820456; gDNA_ID_1971811; Annot_ID_175755

SEQ ID NO: 19044 - DNA, 3000 bp, Unknown; identical to SEQ ID NO: 8464
  misc_feature (1)..( 3000): 2750-1469P.txt file - cDNA_ID_1820456; gDNA_ID_2926175; Annot_ID_140284

SEQ ID NO: 19045 - DNA, 3000 bp, Unknown; identical to SEQ ID NO: 8464
  misc_feature (1)..( 3000): 2750-1469P.txt file - cDNA_ID_1820456; gDNA_ID_2926175; Annot_ID_199780

SEQ ID NO: 19046 - DNA, 3003 bp, Unknown
  misc_feature (1)..( 3003): 2750-1469P.txt file - cDNA_ID_1820476; gDNA_ID_1971811; Annot_ID_58102
gcatactgtggacaagctgcttatcttgtgattcataaggaacattatcaagacgcgttctatgcatctatcccgggtttgccttaaatctttttaaaacattactggtcttgaagtcatcatacatagtgctcttataaaacagtgaaactcttttttgctttgactccacagatagtgtctattggccaatgtttatagtcgcgacaggagctgctattgttgggagccaagctacgatctccgggacttattcgatcgtcaagcaggccgtggctcatggatgttttcctcgagtaaaaattgttcatacttccaagaagttcctcggtcagatctattgtcctgatattaactggatactcatgctcggctgcatcgcggttactgctagtttcaaaaagcagagccaaataggaaatgcatacggtaagatgacaacaacttcaaaatacaagaaaaattattttagtcaatgttaatcgttttaagttagttatcataagaatttttggataatctgtactaaaagaattttggtttatgataatgataatctttaaccgtgactgttttgttttcttggacaaattagggactgcggttgttctcgtgatgcttgtgaccacattactaatggtgctgataatgctactcgtgtggcattgccactggatccttgtccttatattcacctttctctccttctttgtggagttatcgtacttctcagccgtgatctttaaaatcgatgaaggaggatgggtgccgctcatcatagcagcgatatctcttttagtaatgtcagtctggcattacgcaacagtcaagaaatatgagtttgaaatgcacagtaaagtgtccatgagttggatactcggcctcggtcccagcctcgggcttgtccgtgtcccggggatcgggttagtctacacggaattagcaagtggtgttcctcacattttctctcatttcatcaccaacctccccgcgattcattcggttgtagtctttgtctgcgtcaagtaccttccggtttacaccgtccctgaagaagagaggtttcttgtgaagagaatcggaccaaaaacattccggatgttccgatgtgtagccaggtactgtactttattcttctctgttctttagtagggttgacaaaatcaataaggagttttaagacccttgaaatatctcaaacatttttaacagatatggttacaaagatctacacaagaaagacgatgatttcgagaacaaactgctgactaaactctcctcattcattcgaatcgaaactatgatggagccaacttcaaactcaagcacctacagcagcacgtattccgtcaaccatacacaagattccaccgtagacttgatccacaacaacaacaaccacaaccacaacaacaacatggatatgttctcatcgatggtggactacacggtatcaactttagacacgatagtttccgctgaatcactgcataacacggtgagtttcagtcaggacaacacggtagaggaggaggagacggatgagttggagtttctaaagacttgtaaagagtcaggtgttgttcatataatggggaacaccgtggtgaaagcaagaactggatcatggcttccaaaaaagattgcgattgattatgtttatgcatttcttgctaagatttgtagggccaatagtgttatcttacatgttcctcatgaaacccttttaaacgttggacaagtcttttatgtttagtttagtttttattattttgctttgtaaaacaattacagagaaagggtaataaaaggataccaaatttaagatcataccactgaaactgttactggcctaggtcacgtagaagttctctattgaaagtcctgacccaatccaatcacgcccaagaagcaatccgatcatgtaaaaaacttaagttttatttatcataacatttgcaacatttagtaatttacattatatgcgaactttatatctctagttacatttagatcaccatatttatatttaagactttcatcataaaggttttcacttttcacttgttttggaccaaaacttttggtaattcacaacagtcaagtcaacatgtccgattcaatctataaccacaagaatatgatgtcttatttaggagaggtcaacattataatcaatctttaacttttccctacgcaaattcaactagaggaccaatagaaacaggtatacacaattgccatttttcttagagcttttcctagttgaatattgtagcgaattattgacctttcaacgctatgtaactatatcgttacgatcccctaaaccgaacagtttaaactggcagtagttaaccgattaagcccctacagctgaaccgttgtacttgttgtagcatattataccaaattgggaacagaacctacggataccgagtttaagagaaatgtgatatagttacgtctacctagaatccgaatttgtacggttccctagatcttggtttggtaattatattattaattaagccactaatgactagtttcttagtctcgctaatcgaccaatatgaagtaatctcactcaaatacaattttcccaatcggttcgtcagaacgtgattgtcagaaatcaaaatcgtttacttttctcgccatagcactgatattttcgataaaaacaaatctgttcgcgtattatattgttttattatgctcatttcgacacacaacaaaaccgaaccggtaaaaaatatatgaaccggtttggtcatcatattacactgatatgtatattcaaaggaaacttcccatgcggaagaagaaaatatcttcattaagttacaatcacaatattcgttacaattttcttgacaagttaagttatataattaagggaaataggaaaacaaaattcaaaagaaaaatcaagactattaaatgaggctatataagtaacatgtacaaagaaggaaaaagggattcatagccaaaaccatg

SEQ ID NO: 19047 - DNA, 3003 bp, Unknown; identical to SEQ ID NO: 19046
  misc_feature (1)..( 3003): 2750-1469P.txt file - cDNA_ID_1820476; gDNA_ID_2926175; Annot_ID_140275

SEQ ID NO: 19048 - DNA, 3003 bp, Unknown
  misc_feature (1)..( 3003): 2750-1469P.txt file - cDNA_ID_1820480; gDNA_ID_1971811; Annot_ID_58101
tgtgttttactatgtttgcaagagttttcatcatcaggagattgataaatccgctttgcacgatcatctcggtgggtatctcggtgaatatgtgcctcttaagagcaacattcaaatggagaactttgaagtttgactgcatcatcaaacagagtaaatcaggttttttgcagtttgaaaatgtctttgtatgtttgtaatatttgtaatcttttcactaagtgaatttttgttttttacttgcatatccaatgtaacgagggaagagacttgtttttacagagtttctgttacttgttagatacttcttgttcttgcattcaggttatacaatgatatgagagaatattttgacaaaagaaaatgggctatataatggttcaagagtctggttgtgttctgtttcattgagctaattagtttcaagatgaatactctgcttcattctacattatacttgggagatatatgactttgatcttgtaggtatgagttgtgaattacttccatgaatgctcattattaatgtattaccatgtacaagcaatgactcaaagagtggcaacaacaaattcctcaaaagaacttgacttggggactgtgagcaaaatatcacaccactcaactttcccatacgtaggaagccaacgagactgaggcggaaaactacgacttgtaccgacaccattagattccttgttgtgcgactcttactagactaaaacgggaagtgaaccatcttgaactagggctggggattcgagttggtccacggctcagagtaaaccaacgtggcttagagctaccatggaacattaaacagagataaggacaactctcggtgcttcctaatagtctccgggtacggggtatcgtgaagatccgtggaggcgaggagagagcagaatatcttggaagctaaggagagagttgggtagtacaacctcgaaaggcgggctaaacagttcatccgtatatgttaatttaccatagttttgtttttcgtagtttttctattgaatggactcaaattaatatcgtgtgaaacttttgaaaatactgaaaaggcccttttagtgcaataattcaaattgaatatgaccttgaattgttttaaaatcatttttcttctcttgattgaacctaattgaactacaaaactatggtcaaaatatatgaatggtattgagtctattgagttttgtcctactcatataatttggcagttcatgaaaagaaatggatcttaagtggaatatgcgtcacctgtcataattataggttgaatgatgaatgtttagttttatttgtcaactatttttttttcgaggataatgtttgttttttgtcttttccagtacgataatgcttaaactaacattctcaactatcaaaacattccaacgtataccgaaatgaaagttgacgtgataaatccgatcaagaacacagcttcttaacgtggctactgtcgtcgaccgacgtttattaaattaagttttcttatatacataaaattcgttcaatttaaattaatgtggtgaattcgcaagtttaaaatttcacagaaaaaatgttttttataactataaacgcttaatctcatgcacgttctcttttcaggagatatgtaactaactaatgtattccatgatgaatgtttgggaaaattaattatagtggatacttgttataaaacttgtatgagtcaatggccttaatatttgataagtatacttaaaactttatttggacattaaaccgccactaattttccatagcacatatagtcaacttaacaaattataggttagtgttgtttggtaataaattagtaatttagtaaaccaaacaatttataaccattttattcaatcagtgtaggcaaagaatcttgaaatagtgttttctattcttatgtatatatttgacaacgtggtgttttgtcaaccaataaaattttctaacaccataacataaatctaaacttgacatgttaaatttccttagcttagtgaaacttgattaaattatgcccttccaatttttctcaccatttttaccctccaaaatttcttaaacattccacacatcaactatttcacagctttacaatgacgagccatcactttcgtacaacaacaaaagtaataatagattttctggtacatgtatcgaaaagttgtgcggcctgcgtcagaaaaatctaagaaaaaaacaaagagtaaacaaaaatatccaaacagtgaatctaataataaattctgtttactttctgcaaaaaataggataaaatcgaatttaattctttttatcgaaagtcggaaatatatcctatgtcgcaatcaattaatgtacatatgcaagaaatttaaattaaaaaaaaaagaacgcaaaaaaagaaaaagaaaaagagagagagaaagaaagaaatcgagtttaactgctcgtgtctctctgtgccactcgtcttcagttttgtcagcgtcttcataacttataaagtcctatcgatctctcttcttctttctttggccactctctgtgtctttctttgttaataatatctcaaagaataagaaaaaaaaaaagaaaagaacaaaaaaaagcacaagtttcttgaaaccgtgttgttttcgtgtaatatacacagttgttacagattctctccttttgggtttctttttgtaatcatcatttgattgactgattctctgttctttttttcccaaaaagagagtccttttattacaaaaaaaatattaaggttctgttttgtttggtttagcttttttatccaattccatcagaaccagagttgtttgttgctgctctgtaatatactcgagtcaatctttatacttaaggaaaaaaaaagtttcaatctttggtttcatctcaggcgaaaattgctacaaatggtaatcgatttctagggctctgactggttttgattaaaggaatcaattcaggggaatttcgagttcttttgttacaaaaatg

SEQ ID NO: 19049 - DNA, 3003 bp, Unknown; identical to SEQ ID NO: 19048
  misc_feature (1)..( 3003): 2750-1469P.txt file - cDNA_ID_1820480; gDNA_ID_2926175; Annot_ID_140274

SEQ ID NO: 19050 - DNA, 3003 bp, Unknown
  misc_feature (1)..( 3003): 2750-1469P.txt file - cDNA_ID_1820484; gDNA_ID_1971811; Annot_ID_58100
ccgtgtgcttgtgattttcgatactcattctgaagaatttagtatgctccaagtacctggagatatcttttggaaatataatggtcttctagaatacggtgggaaaatagctattttaaactataccaaagttgatatcgaaggtgtgatggaactatgggttgtggaagatgaagagaagaatctttggagcagtaagatattggtggtcaatcctttgcaactgcagatggtcaatagcattattagtttgacggtactaggaacaactcgaaacggcgaagttatcttggtacctggtcctgaagacaaaactgttttcaacattttactctatgatttacaaaagaatcatattagaaaaatcgaaatcaaaggaggaccagaccgctatcttaacaatatttgggaagtcgttggaatggatgatgttgagaacttaatgtatctttaagttcattggcttgtgtgttaattttttttcttttttaccaatttgtttttctattattttagttgttttgttatgctacctaatttaattgtgaagaattcgaaaaatattggacacgattagggttgtcaatcgggcctccccgcgcccaaatggaccatccgcatcctgcccgcttttcttctgatccgcgacggacctgcctgccaacgaccgcggtcttgaaaagcgagtcctaacccgccccgcagagcccatcggttagacgggctggcccgcggacattagtaaaactcctttttttaatcctccgtctgctgctttctagtgtcctgacttgtgcgaaatagggatgagcttgtcatcaattcataaaaccaatttaaccaatgtagttcttgattggtttaatcaaggttcaacattgaggggtccgaattcttgattaaaccaatttagattagctaaatagaatcgaagcataatctcaagccaaaaactaattcgattttggtagattctcaacaaaaaccgaatcactcaggaacatcataactatttcaataccaaaactcggaatcaaaagtgatcaagcacaaaaacagatcaacattagtaatatttcacaaacatcaatcgatcttgctagagtaacataatttttggcaagaatcaatcacagatctaagatcaatcagctatgtgatcgattgtaagtatattagagcatcgaaagcataatctcaacacaatttggtcgaatctagcaaaaaaacacccaaaatttcacacaaaaacctatcaattttggtagatttcaacaattagaactcaaagaagctaaatctactctttagaaccatgatcgatccctattacaccaaatttcgaaacaaaaacgcaaaatctgatggaattttggatcaaattcaactttggatctatctacatgaatcatcaagcttccacaatcgaattgaacaatatattatccaaaactgaagagaaatggttaccagaagaacttgggagagaatttctcttcatggcttccttgagagagagtgagaattagaaattttgaaatttgtttctgagagagagagtgcgcttaacggcaaatgaaagtttctcgtctcagatatttatttggcttaagcgggaaagcccacactttatttttccgtacaacagaaaaaacaaaaataaatactattgtttcagacggacacgtgtaatatcgcattagcccagtggctttgatacctcgtctgcccagccctgggttcgaatctggtttaatacccatattcgttatctttttccttcttccacgctcaaactatttcctcttttaaaaactcatacaatatcatattcgaaaaacaaaatgcgacctctttttttttttttttccctgtttctaccattttttaaaaacacatgaaagaaaagaagaaatgcaaagtctccttttaattcaaatatatctacaaatatccaaaaaatatgaataaaaacaaaccagattcaaagctacacatcaaacaaaaagcaagacaacgatccaataatcatttgatctctcatattggcaacgttgtcaatacttaggaaacgttggagagaagaagcaacatatttgatgagatggtttccctgtttatatagaggaggatattttccaaatttttttggaaaaagcagagcataaaggctaataaagctcgcaaacaaaaatcaaaagcaaaaaaaaaatagtttttctgcattttcaaaagtttgatttttatgtcacaacttgttaatgtttggagctgatgttgcgctgagttttgaatgttttgatttaaatgattcgcttccttatctgaagctgttttgcttgcaattttgaggtttttgtgctctgattttgctgactccaagtttgttgtacgcgatatggaagcaagaaaagagaggaaaggaaaggacatagatgctggttcagttaaagaccggatttaacatccctctcaagcaagaaaacggaaaccctttttgaaatactaaatttttaagtccactactacaaaaattaaaactcattccttttatatgtagtctcgattcatattttcaaaaaatttaaacaattgaaacaaatagtatctgtataaattaataaaatattatgatccaacagtaataatttatagaatttttacggtgtagtgttaaaaaaaagttttactgtatataccacttcttatatcaatctaggaatgaataaatattattatcctgagttatttattcttgccatcatatatatatatatataatatttttttctgatcaacttattaatcttgttctctaatttgtattaagtaataaactaattatttcctaatatagaattggtctctatcccaataaagaaaatgaagtcaccttcttcttcctcttttctcctgtgttgatgaaaaagcttcaagattcaatcaaatcatcaaaaaaaaaaactataacttctattgatcttgatatctaaatccgccatg

SEQ ID NO: 19051 - DNA, 3003 bp, Unknown; identical to SEQ ID NO: 19050
  misc_feature (1)..( 3003): 2750-1469P.txt file - cDNA_ID_1820484; gDNA_ID_2926175; Annot_ID_140273

SEQ ID NO: 19052 - DNA, 3000 bp, Unknown; identical to SEQ ID NO: 3355
  misc_feature (1)..( 3000): 2750-1469P.txt file - cDNA_ID_1820514; gDNA_ID_1620642; Annot_ID_47519

SEQ ID NO: 19053 - DNA, 3000 bp, Unknown; identical to SEQ ID NO: 3355
  misc_feature (1)..( 3000): 2750-1469P.txt file - cDNA_ID_1820514; gDNA_ID_1620642; Annot_ID_163074

SEQ ID NO: 19054 - DNA, 3000 bp, Unknown; identical to SEQ ID NO: 3355
  misc_feature (1)..( 3000): 2750-1469P.txt file - cDNA_ID_1820514; gDNA_ID_2926195; Annot_ID_141229

SEQ ID NO: 19055 - DNA, 3000 bp, Unknown; identical to SEQ ID NO: 3355
  misc_feature (1)..( 3000): 2750-1469P.txt file - cDNA_ID_1820514; gDNA_ID_2926195; Annot_ID_201372

SEQ ID NO: 19056 - DNA, 3000 bp, Unknown; identical to SEQ ID NO: 3353
  misc_feature (1)..( 3000): 2750-1469P.txt file - cDNA_ID_1820526; gDNA_ID_1620642; Annot_ID_47514

SEQ ID NO: 19057 - DNA, 3000 bp, Unknown; identical to SEQ ID NO: 3353
  misc_feature (1)..( 3000): 2750-1469P.txt file - cDNA_ID_1820526; gDNA_ID_1971821; Annot_ID_176187

SEQ ID NO: 19058 - DNA, 3000 bp, Unknown; identical to SEQ ID NO: 3353
  misc_feature (1)..( 3000): 2750-1469P.txt file - cDNA_ID_1820526; gDNA_ID_1620642; Annot_ID_163066

SEQ ID NO: 19059 - DNA, 3000 bp, Unknown; identical to SEQ ID NO: 3353
  misc_feature (1)..( 3000): 2750-1469P.txt file - cDNA_ID_1820526; gDNA_ID_2926195; Annot_ID_141224

SEQ ID NO: 19060 - DNA, 3000 bp, Unknown; identical to SEQ ID NO: 3353
  misc_feature (1)..( 3000): 2750-1469P.txt file - cDNA_ID_1820526; gDNA_ID_2926195; Annot_ID_201366

SEQ ID NO: 19061 - DNA, 3003 bp, Unknown
  misc_feature (1)..( 3003): 2750-1469P.txt file - cDNA_ID_1820530; gDNA_ID_1620642; Annot_ID_47513
tatgtgtcccagctgaagtaacaagtgaagaggttccctcgtcagaaactcccaaggtagtagaagaagaagtgatagctaccaaagctgaagatgattcgccggaaaaagaagagcaaacggaaacacttgctgcagcagctgaagctgaagaggtggttcctccaattccagaaaccaaaagtaagttgactaaaaatcactagattgtaattttttttgtgtgctacttctcatattggtttattatgatcagtatcagtttatcagaatcatttaaaaagattatacaatgtttgtatcttagaactctatccaaggtaacatatacagctaaagcgttggggatactccaaattatagtagagaccttaaccacataaatagtcacatgaactacgtgttctaaaaaaatccagaataatcaaattcatgaagttttgtttgatggagcaaaaggtgataagaaacatataagaccacaaagataaagacattttagttcattgtgtaatgattactagcattgacccttttcttctaccggtgaccaggtgaagaggaaattgttgagaactctattcctccaaactcagccactgatgaagtttcatctccagaagctttagcaagtgaagaggttgagaaggagcaagtggttgccgaaacacctgttgatgaagtcaagactcctgcacctgtagtcacagaagcttcttctgaggaaagtggcaacaccgctactgctgaaagcatcaaaggtccttcttttgtccatcctttacctgttttacttcctgactcatgacctaatggtttatgtgagattccatctcctaacacaaaaatgtaacaggcatttcaccagctctagtgaagcagctgagagaagaaacaggggcaggaatgatggactgcaagaatgctctttcagagagtgagggcgatatggtcaaagctcaagagtacctccgcaagaagggactagcgagcgcagataagaaagcaagcagagccacatccgagggaagaattggtgcttatatccacgacagcagaatcggtgtcctcttggaggttaattgtgagactgattttgtctcacgtggcgacattttcaaggaacttgttgatgatctggcgatgcaggtaactccaagtttctagctgaaacattttcttcgttttgctataactgagaatataatttgacctgacatgtaggtggctgcgtgtcctcaagtagagtatcttgtaacagaagatgtttcagaagaaattgtgaagaaagaaaaagagatagagatgcaaaaggaagatcttttgtcgaaaccggaacaaataagggagaagatagtggacggtcggataaagaaaaggctagattcacttgcattgcttgagcaaccatacattaaagacgataaggtgatagttaaggatcttgtaaagcagaggattgcaaccattggagaaaacatcaaagtgaagagatttgtgaggtacactctcggagaaggccttgagaagaaaagccaggactttgctgctgaggttgctgcccaaactgcagctaaaccgaaagctaaagaagagccaaaagctgaagaggccaaggaagctgttgcaaggtgagaaattttttatagtctttgctcttcttgacatgaattcttataatgttggctatagaaagattcaaactttttgcaatacggcactgcagcccaccaactacagtggtttcagctgctcttgtaaagcaactgcgtgaagagacaggagctggaatgatggattgcaagaaggcattggcggcgacaggaggagatcttgagaaagcacaagaattcctcagaaagaagggtctctcatcagctgataaaaaatcaagccggcttgcatcagaagggagaatcggttcgtacatccacgattctcggattggagttctgatagaagtgaactgtgagactgactttgtcggaagaagcgaaaaattcaaggaattggttgatgatcttgcaatgcaagcagtggctaatccacaggtaagaaaatgtcctcagctgaaacaatggcataaattggttgttggtctctgacctgaaatgtctacgtgcaggtgcaatatgtttcaatagaggacattccagaggagataaagcagaaagaaaaagagattgagatgcaaagagaggatcttttgtcgaaaccagagaacataagggagaagattgtggaaggaagaatctcaaagaggcttggagaatgggcattgcttgagcagccttacatcaaagacgacagtgttctggtgaaggatctggtgaagcaaacagtggctactcttggggaaaacatcaaagtcagaaggtttgtgaagtttactcttggagaagataactgatgagacagacgaagtaaagttttcaaataagggagctctgttttgtgtcatggagtttaaagtaaaagtcttcctttttgttttgtagacaaaatcttcagtattcacattttgattagtttttaatcaaaacctgtaattttttgttcatgaaaatatgagatttgcattatataaatgtgcatttagtgacaatgtgacattatacactaaattcggagaaagattggttataatgaaattttaaaccttattttaaatagaagtttcaaatgaatttccctgaagaagtgaaactaaataaaataattttttgtttccttttggatattatatctaaatataaaaatcaaaccgaccgaattactacatacactacaataatgtttttttccttttataatttgtgggctaaaaaaggtcggtcggcccattttgagcccaataaaatttagggatagataaagacataaagtaacgaacgatattccgaggttgtcatttgctaaggaaaaaaaaaacgaaaacgtgtgtctgtctcttctcgtagcgtctctcaagctcaggttcgtgaacattccaatctctcaatg

SEQ ID NO: 19062 - DNA, 3003 bp, Unknown; identical to SEQ ID NO: 19061
  misc_feature (1)..( 3003): 2750-1469P.txt file - cDNA_ID_1820530; gDNA_ID_2926195; Annot_ID_141223

SEQ ID NO: 19063 - DNA, 3003 bp, Unknown
  misc_feature (1)..( 3003): 2750-1469P.txt file - cDNA_ID_1820534; gDNA_ID_1620642; Annot_ID_47512
tttcggtaatctattgtgcaaacatcggctaaatagtaattacacaggttcttttaagttttaacaaatcgaaacttacttcataatgtgaagagaggagataattcaaaagttactaagtgtcgcttagcgcccatgcgagacaaatggttctgtaaacgtcaatgtagccaccgaacagggctctgcaagggactcagctgcttcaccgaagccttcaatggctccaacgttctccctagctttcacaatgtcaaacaagttgtttggtagctgagccacaccgtccaagaactggatgacgctcgacatgcttggtctgacggctgcaaccggatgcgaacagaacaagccgagcttcagaaccagtgctacttgctcctcaaggtacttatcatcctgctttaccctctcatcaaccacttgcaatatgtcatcttcccaacaatctagcacccaatccgtaagaaccatctcgctcggcgaagatgctcgtggcaagacgggtcttcgcccgcaagtaatctctaacattagtattccaaacgcgaatacatcagaacttgtgcttgccttccctgttcttgaaagctctggtgagatgtatccaaacgtaccagccacgttagaggtttgaggatcaaacccgtgttcacagagctttgcgagaccaaaatcaccgagctttccgttcatagaatcatcaagaagaacgtttgctggcttaatgtctctgtgaataatgacttgaacccactggtggtgtaaatagcagagaccagaagcaacatctttgatgatcttgaatctttgtgaccaatcaagactctgttctggttggtggtagagaaacttatcaagactgccttttggcatacagtcgtaaaccaaatagagttctcctttgcgcctacagtagccaagaagccgaactagattaggatgtctgagacgcccaatggtcgcgatctctgccacaaactctctcattccttgtcttgaatcatgagaaactttcttcaccgcgatgtccatgttagacgtcgataatgtacctttatatacttttccaaaccctcctttaccaagaagctcgctgttcctgaaaccctttgtggcaatgtaaagatccttgtaagcaaacctatgtggaccaaactgaacctcccagtcttcaagaacttccattaacttcttccttttcaagaaaagcatatagcttatggtcaagaagacgaggatggcgaggctggttaaactcaaactaatagccaagatctttttcacacttgtactccgagagtctctaggaagttttggaagacgagaaatatctatatttgaagctgtcccattgagcttgaaggtccaaccaagaatatagtgagatgaacgaagacggcctgtggctgaagtgaagccaacatacatagagtcgaaaagatatggagataaatctttggttagagaaagcaatggaatctttggcttagggagatgaataggatggattgtgacgttaagttgtctccttgaggaatcatattcaatccaggcttgtataggtttttgatttatgaggcggatgtttttgaaagtaccatcatcgtcttcgtaataacctgctgtagaagctttctctgagctcaagctattgatgtcaataccaacatggttattatccatgtcatcaaattcttgattttgaaatgtatcaaactcaactgctacaatatgattagagggatctccattgtttgtcaaattaaagagccctagatattgtgaggatgaactatagggcaagcctttggtgggagagatgacaaatgcaagtccatggccatcaagtgcattaacattagagactatagcgaaaacaaaggtagtggagaaagacgaaacggtaccgtttggtgagttcttgaatctaactggagagttgtagaaaacgtgaccatatgagaattcagacgaatttgtgagcttcatcaagcctttggagttagtaattgcaattccagagttgtcgtacaagtaaccattaaaaccaaactctccttcttcactctgagaaagtgctttgttggagaagaattgcagcaccagaagaagcactagtacaaaaaatttcatcgttttgcaattcttttttcctctcatgaatgatcttaccataagtttttctttttttggtcaaaaccatatgattataatatgaaaaagatctaaataggctttatctgtatgacttggagggtcaaaaactaaagtcttttagactcttagtaataaaatgttgaataagtcttgttcgacgcctcttattgatttattaagaaattgaccagcatgaaaaggaggcattgctactatgtaatgtctgggggggagtttcacatcgatataggctattgatgggccttagtatgaagcccgtaagcccatattgaagctcgagtcttgatggcgcaggagagagagaaaaagacaatcacctgtagtaatctttgaagactcttatctcctctatccaccaagagagggaaaacgaaataaaaatagcacaggggagagacaaaatgagataaggatttgaagcctctcaccactctcctcgttttcgcttcgtgcttatttgtcaaacgcgaacatttcaccgaaacttagcgacttttctcgctttactctttctgggagcaatttctcagagcataggcgagcttaaaggtagctccttttcttagctttgctcaaatgggtttcttagttactcttcttatgtttccgtgataagatggttcgaaatttactagctttcttaatggaaatttttgagtttttctagttagactacaatgaaatttcaattcgaaattgagaaaaagagtggtccttttcttcatatgctttcagattagtctgtgttgttgtctgaggaaagcttgtaattttgacagtgtgtaatggttttctatgtgtaggtgacagttcttagctatg

SEQ ID NO: 19064 - DNA, 3003 bp, Unknown; identical to SEQ ID NO: 19063
  misc_feature (1)..( 3003): 2750-1469P.txt file - cDNA_ID_1820534; gDNA_ID_1620642; Annot_ID_163064

SEQ ID NO: 19065 - DNA, 3003 bp, Unknown; identical to SEQ ID NO: 19063
  misc_feature (1)..( 3003): 2750-1469P.txt file - cDNA_ID_1820534; gDNA_ID_2926195; Annot_ID_141222

SEQ ID NO: 19066 - DNA, 3003 bp, Unknown; identical to SEQ ID NO: 19063
  misc_feature (1)..( 3003): 2750-1469P.txt file - cDNA_ID_1820534; gDNA_ID_2926195; Annot_ID_201364

SEQ ID NO: 19067 - DNA, 3003 bp, Unknown
  misc_feature (1)..( 3003): 2750-1469P.txt file - cDNA_ID_1820542; gDNA_ID_1620642; Annot_ID_47510
gatgaagtcattttgatttattttttttttttttttttttttttttgtgtgtgtgttttcctgcttatgaaatagaatagttcaaaaccttgcactatataaatatagagtagtttactatatatcgtttctcagaaattcagaatatatggattaatgtttatttatatgctatatatgataggatatgttattgactgagagtcattatattctataactttgattatttgttatggttatttttttcctggtcaacttctcttttgttttaaaatttaatttaattgataattttgtttaggtaagtagtttatgaagagacaaactgaatacaatatattttggaaaaaaatactgcaaataaagagcattaatttcgttacagtttgttactattgcatttcaacgaatccaatatattgttattaatttcaataacgtaacgtaaaactctgaatactttaccagctacttttatatagttaacaaaaaagtatgccaatactgtatatataactttagtttaagtaaaactaggttaatgaaagaaacagttactttaacatatttattactttatacattaaatttattcgattatagatttcaaattatagtactgttcataatcacaatctaaaccacaatattaaaaaaaaaaaaaatcacataataaactcaaaactaatactagcttacaccacagtataaattagaatttttttatttttaatatattatcacacaaccatctagtttcatcatttaatgtgaccaacctttcagcttcaattctaattaacctatgatcacgtaaatgatttgcagcatgactcttcattaatgcgatgtaataatatcaaaattaccgtttcactttcccactataaaaagaagtaacaataaaaattcttcctaaagtttttgcttgcccggaaaaaaaatgaattacatcaaacaatttatcttggcaatttgcttttatctagtcttaacatgtcaagatcatgttttagcccgcgacaccaccacgagagacatcgtagtcccgaagatttccgagtggcaagttacggttgctaacggtttgaccactggtgaaactcttttcatccattgtaagtctaaggaaaacgatctaggtgatattaacctgaagttcttagatagattttcttggaattttggagaaaatatgcttcactcaactttgttttggtgctatatgagcaaagatgatggtcatatgaatgtaaaagtgttttgggatgatgttattctatttcatagatgtgattggaagaattgtgtttggaccgcaaagaatgatggcctttatctttggaattctgcaatcggtgaagatgtactgtcggagaaatggaaatctggatggtgaaaacatatttttgatttgttggtaattttttaactattatatgtatctgttaattttggcaggcaaaaaaaactgaagtaatactttacttttgtcataaattctctcttatttttttgtatttttcatcgaagatttttgttttcttcgatcgtgtcttggattcaattgtttttggactgttcaagacaatggtttgctgctttataatccacctcatcatagaggttttagattgatatataaaggggattcaccatgattcaattcattgttgaagtcgagagatctttgaaagtttattcgagtataatccatattaaagaaaattcaaccatgtattttgatcacgatatactaataattaattatcagtatgagattttatgtatttgttatttatgggggactcatgggtcaatcatttctaagaaagtatggatcatggattcgttttcgttcaacttatttatgaccatatatacaagtactaatggtgacactagaatacattgtatgacaatagtctcttgaaaacaaagtcaaagcattaaatatagagatcggagtcaacaatttagagtttatagaattaaaaggaaaggaggataagaagaagaagaagaagaaaaacttagcaaatatatgaacaaatatataaagacattgtaacacatttacctctgacataagtttttttacatttgacaagaaagattttagaaaaatgggaaaatctttgctaagtttatttgttatcctcctttcgtttgattctataaactcttatttgatgcctcctctcttcagaaaattcaatgtccaaatagtaaatcaacttgagtttcacaagatactgaaagttcattgcaagagcaaatctcacaatttcccaatcacatatcttaaaattggtgaaagttttcagtttaaatttaaaatttatccaaaaactcagtattggtgtaatttatggcaggtgagaaaacacatttttaacttttttatacatttctttacatattgtcatgtataaaaattaagatgagtatcagtgattgtactataaatttttgaccaactttttatttcatctttgtttgttatagggaccaaattacaaacaccatgtggtttttgatgcgtttcgtccagacaaagattttatagatggtacatgtactggtatgcatcctaatgtatgtagatggactgcaaaagaagaaggagtctatgtccgcaacaaaaagttcgaaggagaatatttcatgtatacatgggatggtccatcaaaacttggaaacatctctccagtgtctgcacctacaagtgaatcagaattggactcatcagtctaaccccacatagatctaaaaaaaattatatcatgatgtataatctttggtatcaataattgtatgttggtttcaattacaagcccaactattgtttgggcctaatatttatatatgggccttagtcaaagattaaaaaaaaaacatttcttcttcccaaagccagaaaatatcagtacaagagtacaagagagaaagaaaggaacctcgaactcagagaaattgagagaagagagaagaatcatg

SEQ ID NO: 19068 - DNA, 3003 bp, Unknown; identical to SEQ ID NO: 19067
  misc_feature (1)..( 3003): 2750-1469P.txt file - cDNA_ID_1820542; gDNA_ID_1971821; Annot_ID_176184

SEQ ID NO: 19069 - DNA, 3003 bp, Unknown; identical to SEQ ID NO: 19067
  misc_feature (1)..( 3003): 2750-1469P.txt file - cDNA_ID_1820542; gDNA_ID_1620642; Annot_ID_163062

SEQ ID NO: 19070 - DNA, 3003 bp, Unknown; identical to SEQ ID NO: 19067
  misc_feature (1)..( 3003): 2750-1469P.txt file - cDNA_ID_1820542; gDNA_ID_2926195; Annot_ID_141220

SEQ ID NO: 19071 - DNA, 3003 bp, Unknown; identical to SEQ ID NO: 19067
  misc_feature (1)..( 3003): 2750-1469P.txt file - cDNA_ID_1820542; gDNA_ID_2926195; Annot_ID_201362

SEQ ID NO: 19072 - DNA, 3000 bp, Unknown; identical to SEQ ID NO: 3349
  misc_feature (1)..( 3000): 2750-1469P.txt file - cDNA_ID_1820546; gDNA_ID_1620642; Annot_ID_47507

SEQ ID NO: 19073 - DNA, 3000 bp, Unknown; identical to SEQ ID NO: 3349
  misc_feature (1)..( 3000): 2750-1469P.txt file - cDNA_ID_1820546; gDNA_ID_2926195; Annot_ID_141217

SEQ ID NO: 19074 - DNA, 3000 bp, Unknown; identical to SEQ ID NO: 3373
  misc_feature (1)..( 3000): 2750-1469P.txt file - cDNA_ID_1820574; gDNA_ID_1620643; Annot_ID_47537

SEQ ID NO: 19075 - DNA, 3000 bp, Unknown; identical to SEQ ID NO: 3373
  misc_feature (1)..( 3000): 2750-1469P.txt file - cDNA_ID_1820574; gDNA_ID_2926213; Annot_ID_142104

SEQ ID NO: 19076 - DNA, 3000 bp, Unknown; identical to SEQ ID NO: 3378
  misc_feature (1)..( 3000): 2750-1469P.txt file - cDNA_ID_1820585; gDNA_ID_1620643; Annot_ID_47532

SEQ ID NO: 19077 - DNA, 3000 bp, Unknown; identical to SEQ ID NO: 3378
  misc_feature (1)..( 3000): 2750-1469P.txt file - cDNA_ID_1820585; gDNA_ID_2926213; Annot_ID_142099

SEQ ID NO: 19078 - DNA, 3003 bp, Unknown
  misc_feature (1)..( 3003): 2750-1469P.txt file - cDNA_ID_1820589; gDNA_ID_1620643; Annot_ID_47531
atgagttatgggttgacccaacccattttattatgagttgagttgagttggattacccattttgacacttctaatcttatgtaagatttttttcattatagttatacttttgatgggaatttttttttttttgttaaacatttttgatgggacatccgatataataattctggtgaagagctattttttttatctaaagatttttagttagagaggtgttaatagttatacttaactaataaacgccgagaaaacaacagtaacaactcaattaacaaagactcgttaaaagtaaaatacgtttatattaaagatttaaagtgataggcaaaatgaaaaagaaaatggctaaccatgctcatcgtttatattatttaattttcggatcttcattaggcttataaatttatttttagttgttaacaaaaagatttctctttatactttagcttttgtaatcttgtttggccaaactctttttgaatatatattacatttattggtgagcacattgattattttatgtagccaactaaaccatcatcactatattggtgtctacgtactgtctacttaagtactgttaatggaccacgatttttaagatataaacttacaaaatacatgtttcaatcaaataatgataatcgttgatagttcaaccaattacactaaaaaacattagaggagaaagtggaccaaatcctgaatttgattgccaatgacgggggaaaacatagtgaaaatgtttaagctccgaattaaaaagaacatagaccgtcgtttgaattggtttactatctttacgttcaatcttatatcgatttgttttggtataatttcattttgataaatccaaaatggtttaaatcagattgtatcctatgttcctaactactagttagaataataatctatttttaatattgattttaattcttctgatggagtatataatagtgctcgacaatgtcataatcagtacaaaataaatcacctaccaacctgaactatatgttatatattttgaggggccacgtcaagtgtgccgtttatttttgtgtttatgattgtttaatatttgtgcgtgtgatggtgtttcttgcttagtttccacttaatacacaatcaaatatcaagtggaactatttatgaaaattgttcttcgagaagaattctgaccctaaaaggtcatttgagggcttgaggcttattgtttccaaattacaccagtaaacaagggtttttttttgtcaacaaagattattgtaattcgaatttcgtctacaataaaacaaattttcttactaaaacaaaacaattagctgacggttgatatttcggcttttgagtttaattaactaattggtgattatgttgatgatctttcacacctaatgaagtgtcatgtatatgtatatatgtatatacttatgtatatataaaacgtacatataatcatttgtcatatatatcatcatgtattgcatgactaaactacccttaaaagaggaatacgatagacatgacctttaggaatttgtttttttcttctaaatggattccttcgcttctttttagcctcgtagtgaatttgaacattgcagttatttctagtaagatattttttctgtatttttcggaaaatgttaaaaactaattatacacaatttactttctctctcaactcttattttacgttactgttttttttttcctcttgcaaaattagagctgctgtatttacatttactagtaatttggtagatagacagttaatgtagtatatagatggggttgagggcaaatgattacttgggagatggtgcaatgcatcagagtgatgatgtggaatttaataagtgtgaatttatgggcaaaggaagggaactagtagtagaaagggaaataaatacagtacaagtaagaggaaaacgaaaagagagatagaaaccataataatgagttaacgcagacatagccgccattttcaacttctcactcccacttacaacttctccttctgggcaagttttccacatcaatgctcgtcttaatcaccattaatctctactcatcattaatacgttgaagcccactatttcaaaatttactaggagtatttattcgtgaaaaacatttaaatgtccctaattataagagatttaatttcatatttattgtattaaagagaatttacattagctgtcaaaaaaaaaaaaaaaagagaattaacattattttacagaacataaaattttgaaaatagatagcgccactgcatgtaagaacatacaaatttctttttttcaacaaaatctatttatatttcttctttttttgaacattatgtgtagtttgtagtaaactaaaaagtgtgaccaacacaatttaaatcattcgattttgtagcaaaaacatttttgttccaatttccaagcagcaaatatggtaggaatataaattctttactatttttcctcttaacacataaaagtaaaaaaagcattcaatgatcagttaaaatctggttagaattctaccttatcatttagaactagctaatatttaaattcatatatacaaaaaataaaatgggaactgtagagactagagactataaatagaggattgagaagaagaacttttaaagctctatcaatcatgaactactcgccttctccaacttttaaaactcatcataaatagtaaaaaagtagccggaaaaataaaataaaaagtctatttctctttcctttaaaatccaaatcctataaactcatagctttctctgttctttacttatacctcacgttatacatatatatagagtttctataaatgcttctctttcctctcgaacaaatcttcctcacttctctcatttccacactcaccttcctctctatatattaaaccctatctacttaactcttcttctaactctaatctctctctctatttactctgcttctgttctcactctgaaagaaccaaaacatg

SEQ ID NO: 19079 - DNA, 3003 bp, Unknown; identical to SEQ ID NO: 19078
  misc_feature (1)..( 3003): 2750-1469P.txt file - cDNA_ID_1820589; gDNA_ID_1620643; Annot_ID_163104

SEQ ID NO: 19080 - DNA, 3003 bp, Unknown; identical to SEQ ID NO: 19078
  misc_feature (1)..( 3003): 2750-1469P.txt file - cDNA_ID_1820589; gDNA_ID_2926213; Annot_ID_142098

SEQ ID NO: 19081 - DNA, 3003 bp, Unknown; identical to SEQ ID NO: 19078
  misc_feature (1)..( 3003): 2750-1469P.txt file - cDNA_ID_1820589; gDNA_ID_2926213; Annot_ID_202783

SEQ ID NO: 19082 - DNA, 3003 bp, Unknown
  misc_feature (1)..( 3003): 2750-1469P.txt file - cDNA_ID_1820595; gDNA_ID_1620643; Annot_ID_47529
aaaacgtctcaagatatggtgaaatctgcaatctttttttactgtctttttgttatgatagataaggaatctgcaagaaccaatgatcactcttttcactgtatcaaggacaaaagaaagagagaaaacaaaagagttatacagagagaaaacgtgaatagagagatcactgtacttattgggttttgatctttgatggctccactgagtccaagagtagtggtgaaggtggatttgaagaagaagccatggcagcaggaccagccattgcacaatagatggcatccggagataccaccagtagcagaggtcaaggctggtgagtttttccgggtagaaatgattgatgcaatgggaggtgttatcaaagacaatgactctgcaagcgatatcaagaacctagtcctaactactgtaagtgggttttgtgagaaacatgtgaaaaatcaataatgaaacaatgagtttacttttaaagaaaaacaacttttggtgatatattgtacagactcatcacctaagtgggccgattagggttgtagatgaggaaggtgttgcagctaaagcaggtgatcttcttgctgttgagatatgcaacttgggtcctcttccaggagatgaatggggattcactggttcgtttgatagagagaatggtggcggtttcttgactgaccatttcccttgtgcgaccaaagctatttggtactttgaagggatctatgcctactctcctcagattcctggtaagaagaaaacaattcaatgtcttctatcaagaaacttagtagcataaccatgtagctttccttgttatgattcgttctgttgaatattcaaatgctaatattaccccatcatggcaggagtacgatttccgggtttgacacacccaggagtcattggcactgcaccatcgaatgaactcttgagaatatggaatgatagggaaagacaattagaagaaagtggtgttgagtccctaacactatgtgaggtagtgcatcagcggccattagcatgcctaccaacaactaaaggatgtctcctcgggaatgtacgctattttctgatgctataacaaagtttttgaactgtataaatagtgcttacctctgaattcccagggattcttacataatcctcttgtagattgaagaaggaacaccagaatgggaaaggattgcaaacgaggctgcgaggacaataccaggaagagaaaacggaggaaactgtgacattaaaaacctaagcagaggctctaaaatatatcttccagtatttgttgaaggggctaatctaagcacaggagacatgcatttctcacaaggtgatggtgagatctcgttctgcggagccatcgagatgagtggatttctagaactcaagtatataacaaataagttctctcgactatgcattctcagatgttcttgtatttgtgcagcgtattataaacaattctgaccagataccatgttgtaactccttaataggtgtgaaatcataagaaatgggatgcaagagtaccttacgccaatgggacctacccctctccatgtaaacccaatctttgagataggaccagtggaaccgaggttctcagagtggcttgtcttcgaaggtatcagtgtcgatgagagcggaaaacagcattacctagatgcaacagttgcttacaaacgggcagttctcaacgccatagactatcttttcaaatttggttactcaaaagaacaggtacttgtctttgcagcttgatgtttcttccagaatctagttgatcacacaccaaacatccataaattaaaactacaaagacagaagtgatcaagagaatatggtgtgaacaggtgtacctcttactctcatgttgtccatgtgaaggaagactatctgggatagttgattctccgaatgccgttgctacactagcaatacctacagccatctttgatcaggtatcaattttgcccctctgttctttgcataagtcaaaaagcttctgtataaacctcttgagtttactctgttcttcaccctcgtctctcaataatttgttagcaactgaaaagataggaatgcaaatatgttaattgcgtttgtatgttaatgcaggatattaggccaaagaatcggaaggttccagtaggacctcgggttgtgaggaaaccagatgtactgaagagcacatatgatggaaagcttccaattacaaagaatccaagttcttcctcttagcttctacaaaaaaattaaaattaaaatttagaagctaataccaagattgtataatcaagcatatgttccaataataaagcaataacttggtgttttctttagttggcgtcttggagattccacataaagcaactcacgaaacgagaaagcacacaaagggttaaatttgcaccattcaccgagtaaatccaagatcttcgacataatatagacaagcaactctctagatagtataatcagaaatgtttaaagagagaaatggtttttttttgttggttgcaaattccaaaatcaagaaactatagaaattggaaggtaaatgatatgcgtccttaatctatatgcactatctacagattctgtctcaaaaatagcttactttgaattgcaaaactgcgcaattactaagtcgaatgtaatattcctctctccggacattagaaagaccttattcagaacataagttaagaaaatgtcattttcaacttcttgtcatctatgcattaccacacacagacacaaagagacatacgtgtcttatggcattataagatgaatgacagtcatttgtctagatatagaaaagtctacaatatggtgaaagagggatcttttactgtcctttagttgtagataaggaatctgcaagagcaatgattccttaatacaagaggggaaaacaaaaaacaaaaatatattaacatagaacgtgtgagtagagagagaatataaattaccgtacttattgggttcggtttgatg

SEQ ID NO: 19083 - DNA, 3003 bp, Unknown; identical to SEQ ID NO: 19082
  misc_feature (1)..( 3003): 2750-1469P.txt file - cDNA_ID_1820595; gDNA_ID_2926213; Annot_ID_142096

SEQ ID NO: 19084 - DNA, 3003 bp, Unknown
  misc_feature (1)..( 3003): 2750-1469P.txt file - cDNA_ID_1820598; gDNA_ID_1620643; Annot_ID_47528
atttatagaggggagtgaataataaagagagtgtgccaacttgtgtttcttttttattcctttgtcctttcttttccattatttctaattaaaaaaccatgtgtattaattatttgaaatttattatggggaagacagaaactcaaaggagattgagataacattttgaaaagttaaaatacttatgtgaataaagaatgggtcatattgacacaaataaactagtttttcgatcattaattcaaacttgagttgatttataagttgctggtttcaattttattggtgtgtagaaaatgtaaaaagagagaaagtgaggacgaaaggacaggacagagttagggagggattccaaaggtattggcgttgggggaagagagagaaagagagcgtttccgtttctccgcgaacacttgtcgctgactcagactcctcttatattagtattactttcttcttttaagttaaagtattaaagatgtgtactcttctcttttttataagagtacgtactatataatgaaaacaaagctgaatttgggatttgataagttatagacaaatcttacgtcaggagacgatggggtgcacgtggattagaggaaattattggttcagagttgtttgtatttttatgggatgtttaggattttagtatagaaaaatgaaaactaggttattggtagttattgtgtgttacttgatgatgctaatcttcgggtggtgaatgaatcacatttttttagggtttaatcatttggagggaattattgatacaaaaagatactgaaatcaataagcaaatcataagaggacaatgtgttaaaagaaagtaaaaaaaagagaggaccaaatgttgtgcgtatcttgctacgtattcttcttctagtattctctagctagtagctagacacacaataagaccaccctaatacaaatttgaaatcactgttttatgtctcaactttaaacgtttgttattaaatgttaacgatgttcgtaaagaggggcatacatgagcaatatccacgattgcctaactgtgtaaaacttgcgtcaatgtacttcacattcctccaatcactttggaaatgtaaaatgattatcaataaataactagagaggaacgtggtgttcatgagtcatgtcctcgtcgtcttccacaaacgcatgtgtctccataggtataaatcagaattgatatagtacaaaaaagactcttaacttattatatattgagtgtttgactctacgtacctacgacacaacataagtatttgcaatctcttggaactacaaaagccgttattgacttattggcccttcgccatattcaaaggttcttctctatgcgtgcgcctttccctttctcgtacgtatatataggagtatagtttttaaaacattttttttctgtcgtcgtctattttttaaaacatttatttatctgcggcgtagagaaaatgtaaaagggaaagtgatttgcaaatttctcagtggcgaatttacaaaacttctgacctaataagagaaatttctagctcacatcatcttccacactttgtcggaataggtctcaaactactaaaagtattacaattattcatttataaatacgatatttctacctgcaaagcaaatgataatttaatggactagtgagtattgacactggttcagtatttggttgatattttggtttaatgtagaaaatacgaaagaagaagaagaaaacagaatagtgatgtaatggactgatcatttaacttagataacgatttcataaaataatagcaattccaaaatttgagaaaattatcaatcaactactacatgtatttcttttttctaatggtcaggattcaggaagaaaatctggaagtgtatcttcgctttctgctttacgattgattaaatatataacatttcgaagagttttctactaactgttggcaacagtctgttgctgtcggttccgacgttgcaaacttatccaaaacagcatttagttctgtgtaccgtacagttgaactcgctggattgtaacatgcaaagttacaatcatttttttttttaattcgcctgatatatgacctgattagattttagtttttcatagaaatttaaacactaatctcatcattttcaaactaattaataacactagcttacgagactccggaatccaaacttttctttctttcatattttcttactcccacaacaatatcaccaccatttctcctcgtactgttttgtattttatctcatttaactttatcatctttaaccctttatcaaccatgccaaattgcaaaatatttttttgttttgtttttgttgttatcccatttcagttgtcaattagaagcaatgatacaacacctttcattcaataaataaacaaaatttgatggtagccaccaaaataaaacttgatgacgccaagcgtgtaagccacaaccacgaaaaaaacccaacaaataaacataaatgaaattaagtcaaatgaagattcgattagattttttggacaaaatctgtcggatgcttattcatagcatctcctctgttacagcaagaatgaggaagtacggatcaaagagtgtttgaatggttgacctgaagaaggagaagcaattgagcttaagactctctgattcttttcataacataagtcaagaaaatgtcattttcaactttttggtcatgcatgcattgccacacacagagggagacacatgtcttttgatactatccacttggttcagaaaaaaacaaaaagtcacactttttgaaaaagtgaaaacgtctcaagatatggtgaaatctgcaatctttttttactgtctttttgttatgatagataaggaatctgcaagaaccaatgatcactcttttcactgtatcaaggacaaaagaaagagagaaaacaaaagagttatacagagagaaaacgtgaatagagagatcactgtacttattgggttttgatctttgatg

SEQ ID NO: 19085 - DNA, 3003 bp, Unknown; identical to SEQ ID NO: 19084
  misc_feature (1)..( 3003): 2750-1469P.txt file - cDNA_ID_1820598; gDNA_ID_2926213; Annot_ID_142095

SEQ ID NO: 19086 - DNA, 3003 bp, Unknown
  misc_feature (1)..( 3003): 2750-1469P.txt file - cDNA_ID_1820602; gDNA_ID_1620643; Annot_ID_47526
gccgtaacttctacgccggaagttgtcctaacgtcgaacaaatcgttagaaacgccgtacagaaaaaagtccaacaaactttcaccaccattcccgccactctacgcctctatttccatgattgtttcgtcaatgtaaaacatattttttattgatattattttcttgcgtaaaattatccattatttggtctaaataattgattaatattcataggggtgtgatgcatcagtgatgatagcgtcaacaaataataataaggcggagaaggatcatgaggaaaatttatcgttggccggagatggattcgacaccgtcattaaagctaaagaagctctcgatgccgtcccaaattgtcgtaacaaagtttcatgcgctgatattctcacgatggccactcgtgacgtcgttaatcttgttagtaactcaagcttatttattctattaaattaaaacattagtataagttattacattaaattcaatataggcgggtggaccacaatacgacgtggaattgggaaggctagatggactatcatcaacagcggctagcgtcggagggaagttgccgcatccgaccgacgatgtcaataaactcacttcactcttcgccaaaaacggccttagccttaacgacatgatcgctctctccggtaagatttgaactacttctcgatcataaatagtatcattcgaaccaaactaatagctatgtgatttaatattccggtttagctaactggatatcggacccgaatttgattagtatttaagttggtttatatatacccgaatttgattagtatttaagttggtttatatttccggtcctaatttagatttcgtttgatcttaaacatctcaggggcacacacattaggattcgcgcattgcacaaaagtgttcaatcggatatacactttcaacaagacaactaaagtggatcccacggttaacaaagattacgtgacagagctaaaagcgtcgtgtcctcgaaacatagatccaagagtggctattaacatggacccaacaacaccaagacaattcgacaacgtttactacaaaaacttgcaacaagggaaaggattgttcacgtcggatcaagtcttattcacggatcgtcggtcaaagccaaccgttgacttatgggctaataatggacagttgtttaatcaagcttttattaactcgatgatcaagcttggtcgtgttggtgttaaaactggtagtaatggtaatatccgtcgtgattgtggagcttttaattgatttaaatatatctgtattagattttgtttattgtatttgggtataggatgggtcatgggtctcataaagctggttcagctaaattgaaaattgtaataaatctctgtcttgggtttcagtttgcaaaacctaaactgtaattatagagtggaggaaataagaagtatcgtataatatttatcaagggataaatacaggccatccattatgggccgcgtaagagccaatgccaaattttaagaattttcttaaacaaattattatgaaaaaggaccaagaatgctggatgctcctacatacatataaagttttgataaaattaaaataattaacgtctatatccagaataaagtcaatgagcattatatatccaaaactgatctttccacaactatacaatatggatgtgttttttttttcttttggttgcattctgatatgttccttcctcttgtctgcagcgattacttgttattttgggttattcgtggaaatacaattcaaccatttgttttgaacgtgtaagataagtaatatatggttaaattatttaccatttttctcaatcgattagacaaaggacctggtgttattagaatataatataaatgacaaacaacagaaagaagcgtgattgcccttacttagatttttttggacaaacccatacttagattagatgcaagagtagccctttttgaatgactgtaatcttgtcaactaaagtttttgtttctttttaaaacgtcaactaaagtccatatcaatagctaatcgcctaatcatagataaaaactttaaaatctatattaaaccattagcttctgaaataaagtaaaacagccctaaataaaaccatgaccatgtcaactaattcggacgaccatgtgtccatgtgtagcttttcttttctagaactacgagatccaaaattaagcagtgtttcataacgaaataactaccgaatgtaatgaatttgatggatagatgatcatgttattttcttaagataaaggtgtccagaagaaattaataaatatcttaattgttcaaaaagtgttacatttttgccatcaaaatagaaaaatgatgatgaaatagcgctagacgcaaatcggaattttgtaaaaaaatggtatggtaagtaacaagaatatgagagagagagactatatgaagtccttctatcatctttagttgttacttgttaagattgaggttaccgtagttgattagactaattaatattagttgatccaaaaaagtatgatattcaggagtagtgtagagatttcggaaagattcaaggtgaccattacacaatacttaaatactattcgcaatgacaagtgaagcatcgttatcaacttctccctctcaatccccaccaccactctctattacctcatatagatagatcatcctagtgatcatacacacaacattgatagcgaacaccaatagtatgctatattcacaacaaaacaaaaatggactaattcatttgtttttttgaagtaaaggaattgaacaataattattttattttttttgggaaatactattcaagtatttgaaattagaaaagtatttagtctttttctctttaaaatatgaatgcaagctggccgctggccggcacacacagcacaaagcatgtatataagatctctcactccatttatgtaattatacatataaagagaaattgttttttttttttaaatg

SEQ ID NO: 19087 - DNA, 3003 bp, Unknown; identical to SEQ ID NO: 19086
  misc_feature (1)..( 3003): 2750-1469P.txt file - cDNA_ID_1820602; gDNA_ID_1620678; Annot_ID_164325

SEQ ID NO: 19088 - DNA, 3003 bp, Unknown; identical to SEQ ID NO: 19086
  misc_feature (1)..( 3003): 2750-1469P.txt file - cDNA_ID_1820602; gDNA_ID_1620643; Annot_ID_163097

SEQ ID NO: 19089 - DNA, 3003 bp, Unknown; identical to SEQ ID NO: 19086
  misc_feature (1)..( 3003): 2750-1469P.txt file - cDNA_ID_1820602; gDNA_ID_2926213; Annot_ID_142093

SEQ ID NO: 19090 - DNA, 3003 bp, Unknown; identical to SEQ ID NO: 19086
  misc_feature (1)..( 3003): 2750-1469P.txt file - cDNA_ID_1820602; gDNA_ID_2926213; Annot_ID_202777

SEQ ID NO: 19091 - DNA, 3003 bp, Unknown
  misc_feature (1)..( 3003): 2750-1469P.txt file - cDNA_ID_1820609; gDNA_ID_1620644; Annot_ID_47563
cctcaacttgtacctttggaccagtactatatagtagtgtttatgtagagacactcatgtgggtgagtgtatgtagaggttgatggggtataagtgtgggcaaaagggtaagaataatgtgttggctttatagataagcagcttaggtttcctttgtcttttttaactccttcctctcattttcttgatttgatagctactctctcctttgctttcaatgcccccaaattgacttgttttggttttggtttcacacccggtttgatctggtttagaattcagggaacttaaacaaaagcataccgggtatgtaagtcaattagtatacgttttaatcacaaattacattaaatttcggtttcatagaaggaggcagatattataattgataggaacttgacggtagtactagtatgattaagttagttaatttttgtttcatttaataacactgagaactattaattggtagttaagctcatttgtttctttagtttaaatgagtcttaaactcttaatgctttagaaaaatattatgtaatttatacgaatgtaaggaaaaacaaaaatgatgaatcagtttaattgtttcttttatattaccgaaataggtaaagaggcctagaagtgggaacttttaaggctcttatggaagaaaaagtgcaaaagtggaatttaatagtacaatctttttggtctaaaattcatctttttagtcagatgctagttaatctaattaatagaaacgacaaaaaaatcgaaataaaaactaattaaagaaatggaaaaggtgggggaactttgagaaatggccagctcttcatgccagcttttgtcttccatcatccatgtgtatatctacttccttttttttttttttttacctcaataaataaatatcgccgctctttttttttatatagattttatgtgtattagttgaacaaatagtataaattattgaatggcaaatccattttccaatcttcttcatacactcaacaaacactgccatgtatttgatattggtttcggtataaacctaaccaaccatagcttatttaaaaaccatagctttatgaacttcaatttattcttacagattttggttcagtttctattccggtggtttgtatcggttctgtctaacttgattgaaaatggtacaatatgctgtaatcgttataaagtggccttaatgaccgttgagaattgagatttagacatgatctaattgtattaacaggctagacatgatcatcgcttgttcatgtatctttttaatgaatgaaatttcttaaatgttctcgtagtaatcccaataaccaaacatactcgtattaatataagctttgcggtcatgtcggccatattgttcgaatttaaatgagtttttttttggtataataaacgctgaatacttttgatataaaataagtagagtggatctgatcttttgaagaataataattttagataatatataatttatgaggaagaagacgacaaaaaacacttttagaggaagaagatatggatgatctctctcgattctcgaatctttcccctcgttacttattttttttttgtcaacttcccttcttgcattaaaaatctatacattcattttgactgactctttgaagaaaatttttaagaatttttgagtttgggtttcaacgaagtaacttcgtcaggacttggtactaaaaaacgatattgttgatctcatttttttttttttttatccaagctgctgcgtggaatcatatcgtcttttggtttgcatttgatgtacataaagaaaaacaaacaaaccaggtaacaaatcgttttcaaagaaaaaaaagaaaaggttctttgcgtgattttaaaagagatcaaattttttatataatatttgtagatcttgagtcacatggatgtactactggactttttgaaaaggttcttcgtgcactttttagacattccttcttataaaatagtatgcatgggacctttaccaattaactactaccatcaattattcatcgatggactccaattaatttcaaatttgtttccatatttttgtgtaacctaacaaaatccaatcattcatcgatatatcactgtccttgttttgtgttaaataatgctaatttgctctgctaattgactattcttcgatttcgatatctattttcttgttaccaagtttaatctcgaattgtcacattaattttcatatttttgatcagtcggtgcgtcaatttttgtgagcggagtattaattatatcgtttgtctttgtctttgtcttaaatccaacaatgggttcgtggaccatttcctgacatgtttattgcttctttcaatcatgtccgtccaaatcccgtagatctcagtgtatattaatacgtacaatcccactttagcttttatttctgtcttcaaaggaaaataagaaaaagaaaaaatcgtatgagagcttttgtggtccaaattgtgactaatttttttgaaaatacgtttgtgtttacgttatatacacatttacgatttacatctccaattgttatatgctttcttgaaatttcgaccgggatattatatgccttgtccaagaaaaaagaaagagagacctgaatcttggaactaagttatttgggggtgtcactcatgggccaatattgggtccattttgaaaagcacatcactatttcaacccaattaatgagagtcccatactaacgctgatgttactattgtaccgaaccagttttgaagcccattaaaagcccaatacgaaagtacgtttgtaaatttgggagcccaagaggggtaaatatggaataaaaaatacgcgatgtggacaaaataatttacagctactatctctcctccgtcttggcttcgtggtggtctctctgacattatcgtcagacaaataatttctaaatatctctcctctcctctcgtttgattccaaaaaaaaaagctcatcgacgaacgaacgatg

SEQ ID NO: 19092 - DNA, 3003 bp, Unknown; identical to SEQ ID NO: 19091
  misc_feature (1)..( 3003): 2750-1469P.txt file - cDNA_ID_1820609; gDNA_ID_2926217; Annot_ID_142278

SEQ ID NO: 19093 - DNA, 3000 bp, Unknown; identical to SEQ ID NO: 3388
  misc_feature (1)..( 3000): 2750-1469P.txt file - cDNA_ID_1820613; gDNA_ID_1620644; Annot_ID_47562

SEQ ID NO: 19094 - DNA, 3000 bp, Unknown; identical to SEQ ID NO: 3388
  misc_feature (1)..( 3000): 2750-1469P.txt file - cDNA_ID_1820613; gDNA_ID_2926217; Annot_ID_142277

SEQ ID NO: 19095 - DNA, 3003 bp, Unknown
  misc_feature (1)..( 3003): 2750-1469P.txt file - cDNA_ID_1820619; gDNA_ID_1620644; Annot_ID_47560
ggtttgggatgtcggagaagattgtggataaggtgagtcgatgaacaagacgctgacgctgtcactctctccattgcaccaaacactctctaactttggtttctggtttctttttattataataaaccctttcaaatatgattatttcacaattaagaccctaaatgtttgattatttagaaagtaatctcacctaagtatctcacggttcagattgcgccgtggttgttttgggtcgttgtataatgggccaaattaggcccaattcgacccatttaaaaaatgatattctctccttcttttttgttggtgggtcactcaacaatgacattctctactgttttgcacacgctttcctgctaaaacaaattaaaattggtacggaccgacacaaatcggagattgatgacgaatttttataaaacataatttaatatttgatagattgtctttttctagccttattaatttccatttcaggtatgtttaagctagtaatttactaacaccaccttttttttttgcttttactaataccacgtattgttttattttctcttttatttcgacattagcaagcaagggaatttaaagatcacaccacatggcacgtgagaaaagaaaagcatacacgtgagccagctgtgcaacgatgctcaaaaaggtcctatgacaactacttagcttcgagaagcaggcactatatatttatcgcataacggtatttatttcattcaataatctttttgttgcataaatttacaaaaatttgagtgtgtgatgtgtacatatttctgacgaatactttttgttgcattatccaaatttttacatgttcccgagccgagagtctaagacgacgatttccaaattattgtcgttgctgttattataattgttaataatagtaagaattattattattatttaggacacgcaagattccacatgatactgcttaagcactacgtcgagctaaaatgaaatactcgatttaaatgaactaccccattagttacttgaagatgaaacgaaacaatttggttttggtcttttggatcatatagttaaacgttatgtatcttactcagtttattttaatgaagtttgttgtttggtatatcaattagccttagatgtcaaatcaaaacgaaacaaaaacatgaaaattcaatttggcgttaaatcaaaataataattaatattccatggataattaatatacacttagcaaattaccgaagtacccttgctatctcgttgtcgtcaataatcaaaattacagtattaacccaattaagagcgtttagcgtctacgtgtaaagcggtatcaggagaaaggagcagcgatcacatgggtggcttaaatctatatcctccggttcctcaccggccaattattctcgcgcgtgtctccgctcctctctgatgcgcgtcactcaaaaagtttgagtcaaactccagtaatatttttgatttattttgtattttcaagaatttcttaaaaattgctgttacgtaatttacaatgcaatgtctcgcggtaaaggtagagccggaactcaagtcagatcaatctccgtgtatgattgtgttcgcatccaatgttaataatttcaggatttgtattttccaagttaaaggatactattgttaactaacgtatatgctgacaaaaaaaataaaaaaataacgaatattataaatttatatcagtcgcataatgaaatgtgtaatttcacccagacaaaaatatctctacagaacaaaaaaaaaacgtttgttatatatgtttattctgtatatttaaaatgtagtctaacgtttgttctatatgtctacaatgtgtatttatatttaaaacatattccatccttaatttgctttatattattgttacaccattcatagtaatggaagaaatatctattggcattctatactttatgatatatatatatatatgaaccaaagtattgtatgtccaactgggacattttatatgacggcggacgaataaagcttagcagatatatatgtacgtgctggtaactccatattcattattttggatttaagttgtaactccatacacaatacacattgatggattagcattgcattttttttatggcattttatatcaaaagattctcaatcaaaacttagatagattcctaaagcttgtaattaaagcatcaaacatatttgttaaccagttattatttttgaaatcgagtagtgttttgttgatgctacatattattccatcataaaaagaaaattaatgtgtgtgtaagtgtgtttgaaataagtcaatatcttagtacagtaattaactaattatacgaagaagaactataagggtaaaaacggtaattacagtatttggtcagccatagttattcccgctcgtctcttgaaaaaaattcaaaccggtaaaccattttggtcatacacgttacagtaacacggtggtctggtcttcaataataaccacgtcagcagcatacagtaaaaactactttaaatgtttttttttattctcacccaagaaaataatttatttttgttttgtcgttctccttcctaaataatttttcaactaccacaattaatttaaaaattaaaaatagagtatatttggaaaggcacaaaaaaaagaaacaaaattcaaaatctgaaatttctcagcctcctcgtttcttcacccagaggagagagaaatctgaggaattcgatcttcgcttaaagaagacgaaacaatctctctctctttctctcttcaatggtctcaccatctctgtctaccatctcctagccaaagaagaagacgagaagaagaagagagggtcacaacaatgctttattcttcttatgtctccagccatgtgagctcccactgacacattctctgcatcttcggaagttttgttttggtttgattcttctcaccgattcctgcgaccgagtttgaccctcgagtttcgaggttagtggatg

SEQ ID NO: 19096 - DNA, 3003 bp, Unknown; identical to SEQ ID NO: 19095
  misc_feature (1)..( 3003): 2750-1469P.txt file - cDNA_ID_1820619; gDNA_ID_2926217; Annot_ID_142275

SEQ ID NO: 19097 - DNA, 3000 bp, Unknown; identical to SEQ ID NO: 3391
  misc_feature (1)..( 3000): 2750-1469P.txt file - cDNA_ID_1820647; gDNA_ID_1620644; Annot_ID_47552

SEQ ID NO: 19098 - DNA, 3000 bp, Unknown; identical to SEQ ID NO: 3391
  misc_feature (1)..( 3000): 2750-1469P.txt file - cDNA_ID_1820647; gDNA_ID_2926217; Annot_ID_142267

SEQ ID NO: 19099 - DNA, 3003 bp, Unknown
  misc_feature (1)..( 3003): 2750-1469P.txt file - cDNA_ID_1820651; gDNA_ID_1620644; Annot_ID_47551
ttagcatatttactgcagaaaatatattcaggacttgtgaaagaacttcaaaagcaggaaggacccttattttccaactaatcacaaccataaataaatggaaaaactcagaaatctgatctcaccaaactaaaactaagagactaaaacatgaaacatgcctggagaaggaaaagcttctgtgttgtgatgaaagagaacacttgaacattttatatgaaccacaaagacacaaataagagaagacttcttgtcattataatattaggattatacaagacagtttacttagaaggtgatcaaccacaactgaagaagaagaagaagaagaaaaacaaaacaaagattaccgactttatctgtaatggtcacccactatgcttgaggactaagtcacgttttaccaaatctaaacattgtttaatcgaataagagaggtaatgcatggtcccacagaccatgcttctccttataaaatgcatatacatctagtgtagagaacaaaaaaataagttatcatactctaaactttgaaaagtaacttggattataatatatgtacacgcaaaatcaaacataaaaataatagctttgtagtttttgaattcatcaatggagagggagacaaggtcagtcacaaatgcgtgtttaaaggttaaaaaaagtaacttggagtttacttagtcaaaactcaatgaaaccttatcaattgcaccaacagaacatttaatcattatcacaaaatgcatctcaatcttgaaccagaatactaagattttgcgtctataaagtgcgtgtcttgtctacatctctaacaagcaagataaagaaacatgcaaaggagctgtttttaccttgtgagtgagttgtcttcttcttcctcctctaaagggaataatgcggttccagaaagaatcctcttgtgtctcactcttcgcactccgaagctctaaactgcaagcaaacatccactacagaattcagcaatgacaacacagattcgaaattttgcaattgttttgtacttctccattagtgactttatcaatgaatgacacaaacccaaacaacaaaaccagattttgaaaaagtaactattatcttttggggcacatgaaaaaggaaagtagtcagaagtagtaatccaagatgtcacggttgagagaaacaacaatgtgaagttttcttctgaaagggaaccctaaagagtgccggaattggaaacacaacagtgctcaccggaaaaccaaaagaaaacaaaacggaaagatttgtaaaagaaaaagagagagaaatgacaatgttaatcccacccacttcctcctgctactgcctacaagtttggtagttgtttgttcttcgtcgtagtcgtcgtcgtcttcttcttcttaacttttgtctgaagggaccactccattgatttggtcccaaagattctctcttttcttctattcgccggtttctcagactctctctctctcggcttgggtagttaatgaccggtttacccctgaaacttaattaggaaccttaaacccgccacgtggacctcacactccacttcatcgtagcccattagtgagagaccttttctcccggcccagaaggtcataatgatattttgataacaaatataatggatatctagcccaacattacaagtaaagcccaacatttagcaatgatgcacatggcaggcaaactctcttctttggatgctctgttttttataaaaaccataatctatattttcaacagaagagaacattgtaattatgcaaatattgattctcgtgtttatgaatagggtgcgtcaaaacttttctttcaaattttacaaatgccaaagtgtcataaaacaagctacaaaagaatgtttatggaggagagaaagaataaactttgggatgaaaagaaaaaaaaactaagataattgtgaagatgttagttaaatgaaattgagaagatgggcaaggaaataaaaacaacattaaaccaaggccactagtagagttttgagagttgctttcaactacttctcgaccaccaattttttaaatggctggtgacatttggcccacccacctctttgtctttttttttaattccttttgtggctcttattttttcccccttttttatttattttagtttatatttttacttttaaaaatagtcacacgtcctaaatcttagcacattatgttgcctaaaactatttcagctgccgtcaaaaaaaggaagaaaaaaaatcagatataggatccaagaaatcatataaagattgtgacaaaaaaaactttttcaccaaaacaaaggaaacaagacaacgaatgtgtttcagggagacacatcaatgacctcccagatggcattgagtctttcgtcttcactttttagtcgatatcatttttctttttgtctgataatggtctctgatataatggactttaaacaatcttataactcaaaaccatatccactataaaagatttggtcttcccaatattttctcctaaatcatactacacacatttcttgttaggtactactttaatcataattttcgttagtcaaaacacacaattaaagaaaaaaagtaattgattggagaaatttactcaaagtagtaattaacagattttgccttgtcacagcaaagtatgcttatttgatactctcggcgcgtggatttggtcgtcgtctcttctggtctctcaagcttctcctccatcgtagaaaaagattttaaaggagcgatttttataatcttaaataatttcttccctttcttcttcttcttctagttccttgataccaacgcgtaatcctaacccttaatctacttcctccttaattaatcagaggtttctacttattatttccacttctcatctctttcaatcgcaatctgagttctggctaaagattttgtcttgaaggtgagattcattgttccgaatagagtgagaaaaagacttataagattgaaaaagcaagatg

SEQ ID NO: 19100 - DNA, 3003 bp, Unknown; identical to SEQ ID NO: 19099
  misc_feature (1)..( 3003): 2750-1469P.txt file - cDNA_ID_1820651; gDNA_ID_2926217; Annot_ID_142266

SEQ ID NO: 19101 - DNA, 3000 bp, Unknown; identical to SEQ ID NO: 3384
  misc_feature (1)..( 3000): 2750-1469P.txt file - cDNA_ID_1820655; gDNA_ID_1620644; Annot_ID_47550

SEQ ID NO: 19102 - DNA, 3000 bp, Unknown; identical to SEQ ID NO: 3384
  misc_feature (1)..( 3000): 2750-1469P.txt file - cDNA_ID_1820655; gDNA_ID_2926217; Annot_ID_142265

SEQ ID NO: 19103 - DNA, 3003 bp, Unknown
  misc_feature (1)..( 3003): 2750-1469P.txt file - cDNA_ID_1820677; gDNA_ID_1620645; Annot_ID_47585
ggtggttggagatgcgtttccagctaagtatatgtggattgatgattggttttcaaatcggttcatataaaatcagttatgttcataatgaagttagatcagtcaaatctatctcagctccaacatatttaacctacatggtcaaaggagtgagccactaccggacctagactatgaaatcaagactttttttaactaatcaatataaaaccaaagatgtcagtattggattactccattccgtgaaaacatgtttagttctcatacacaagtagatagaaccgagggttgtatattcaaattcaaaaacccggcaaataatttacttaagtgtttttagtttctctaatttcattctgaaagtttcatatatatggaagaaaattaaaagtaaaagattgagacgttcattttagaaaaataaagtagaaaaaatcaactggtctttggcttttctttttcactttaggcgagtaaagttgatgggggagggcctcctctttgttcttctcaaattttaggcatcttaataatctaaaaacaaagcaaaatcgaataaactaaaaagagcccataaaattgctaaagatggatagatttgtttcagattttctctgttaaataaatcaacttaaggtattccatatcacacttttccacgccaagtactttcgaagttcaaacccttcttgctatcatatgaaagagatatgtattcttgctaattaatttgtcgactataattttataacccacaacatgaatttcttcaccattatacaacctggaattactttatctattttagatgtttttcttacaaaaataataatttccctttagatcacataccacattgatctgcttccctagtttatctaataaatctgatgagtccttttcatagaaatacatattaaaaatagaaaaggagaaaaacaatcgtaaaggggagattacgaaataattcgataataattgtagattggcatgtacatatactactatctttttgcaggttcatggtgtgaaaacttcgaggagtataagctgatgaaacattgggtacagaaacagaatccttgacagagaagttattaatttctttcttctacgacaacaaaaaaacaaaagtagctgcatgcacaattaccaaagattctagttactttggagtttggtttgtacttatttagtggttggacaaagacaatgcatggcctcttaattaaacctgatggattagattttgattttttagttaatggagcataaaacgttagagtgacataaaggtacgatgtttaatgcagggtaattatatgatttatagctagtacataaattccacccgaaataaaacaaaaatcgattcatgcgttcgacaaaatgataagagtgagacagatggaaatttaatatattaaaataaagtatttcagcaacatgtgatattgtgtgtttcttaattttatattttacgatttctaaggttttcttaaaacccttccaatatttttttgttttttttctttcttaataatgttttaaaattattttgctttattattttatttttctaataatcgaatagaaaaaataaatttaatatggttgcctttaatggactgaatagacattaatcacgtaagaaaaagcattgatcttcaaacaataagcttaaatagtagttattttttgattcgataaggtaatttggttttactttatttgttgtttattaaactcacaaattcattcaaatttggattgcttaagaatgtgtttttcatcttagttcaatttattcaaatttggatcacctatgtagaggatttccatatttctacaaagtacaaatcaaaaggggaacacaacaaatttctatgaattaattatttattaaaaagttatcaacgaaaacgtctcccaagcgtatatacaaaattagcatatgccataggtaaatttaaagcttgaaagtatcattttatttgcaggaagcggcaatttagtaagaagtactcaaagtatcatttaccaaaagtatatggttttgggaagagttgttagggatgtattctttctaaacagatgatatgacgatgttcttgaaaactaatgttaaagacggaatctctggcatcttcactcgggagatatattaaaccgttgattgtagttagccatgtacttagcttagtgcacaaataatctgctgcaagaaatctttttctattataatatctctcatttaaacattagaacatattgtttaacttgttcttctagaaataaaactgctaatttcttatggtaaactattttcctttagattgcacaatcgaactcgaaaatctagtggagactatgtgactatgtttatatatatgaaacctaaatcaaattatcccaataattgggagacacaaaagaaaaattacgaaagaaaacaggaaatcaaatcaaaagataaagagaaggtaaaaaaaggcaagaagcactaatgtttaatatttatagttttctccattaaagaaaaagcgatgatgtgtgttctcatcttttgtgaaagtatatatattgcttttgcttttctcaaaagcaaaagactcatccaacaagaacaaaaaaaaaaactaaagctcaatccaaaagacgaagaatgcattggatactacaacttctttttcacttttctttcaaatttacaattatgattttcacaatacagtttattcaaaaataaataaaaaaacgaggcatgaaaataatgattatcctcttcacttattaagccactcactataagcagagcaactccagaacatagtgagcccccaaaacattaaagcatgatgatgtctaatgatgatgatcttcttcgttccatttctctaaatttttgggatttctgcgaagacccttcttctctttctcttctctgaacttcaagattcgtgtcggacaaatttttgtttttatttttctgatgttacaatg

SEQ ID NO: 19104 - DNA, 3003 bp, Unknown; identical to SEQ ID NO: 19103
  misc_feature (1)..( 3003): 2750-1469P.txt file - cDNA_ID_1820677; gDNA_ID_2926175; Annot_ID_140305

SEQ ID NO: 19105 - DNA, 3000 bp, Unknown; identical to SEQ ID NO: 3410
  misc_feature (1)..( 3000): 2750-1469P.txt file - cDNA_ID_1820696; gDNA_ID_1620645; Annot_ID_47579

SEQ ID NO: 19106 - DNA, 3000 bp, Unknown; identical to SEQ ID NO: 3410
  misc_feature (1)..( 3000): 2750-1469P.txt file - cDNA_ID_1820696; gDNA_ID_1620645; Annot_ID_163193

SEQ ID NO: 19107 - DNA, 3000 bp, Unknown; identical to SEQ ID NO: 3410
  misc_feature (1)..( 3000): 2750-1469P.txt file - cDNA_ID_1820696; gDNA_ID_2926175; Annot_ID_140299

SEQ ID NO: 19108 - DNA, 3000 bp, Unknown; identical to SEQ ID NO: 3410
  misc_feature (1)..( 3000): 2750-1469P.txt file - cDNA_ID_1820696; gDNA_ID_2926175; Annot_ID_199795

SEQ ID NO: 19109 - DNA, 3003 bp, Unknown
  misc_feature (1)..( 3003): 2750-1469P.txt file - cDNA_ID_1820708; gDNA_ID_1620645; Annot_ID_47576
tctgattcggtcaacacttggcctgtaaaagtctttgtgcattctgtattagtctcctatgtcggtcacgatctttacttttattgaacatcacatgattttactgagaaatgttttcacatgattttagtgagaaatgttttcacatgattttagtgagaaatgttttaaagattctatcttttgtttgtatcttttttgtttaatcagaataacaattgaattgtgatgtagattagtttagtattgaacatctctaatggttcatcttaggagggaacatatcggttattgatttggtttagttcagggactgatctaaatggtatttggttttgtgtttcaggaaatggggaattgagaaactggcatatagagacgtcaagaaggttccaagacgggatcgaaaatacgctgtccagccggagaatgtattcgcgacaggcgtacacatgtctcagaatctacaagggaaaacataccacaaggctgaaagcaaaatccgttacttccactaccatggttcgatctctcagcgccgcgagccttgtcgtcaactttttaacgattctcgagtcgtgttcgagaacactccttatgtgctagacactacaatatgtgatgttggccttgctgtgagaacgttcgagttgagaacgatcggtgatcggctgctacggacaagacaatgaagagatggcaaaaatgaatagtgaatgtaatcaatctttagaaagaagaattagaaggtgttaagatgagttactttgtattattttcttttgggggtatattcttttattgtatcatataatttgggtaatgggttcattaatacagcttgaaaatactctttggtatatatattctgtatgatgtatgatttagaaaaaaggtctctgagtatataatctagtgatgataattgtggagatcaagtaatatcactgtttgtatttgattactgtactcttagttgacaaaaagaaaatgtcaatatccattggtgttactccagtaatccatatggaacgttgattatttgttatgtttgtggacgatttttataattgtttgtttgttgtattccctatgaattaattattaacgacaaaaaagatagcttttgctttttgtggagcgaaggaacgtgcgttgaggcttttcttgacgatcaccgaatgggcctaaacgtgtgggtccacttagaatgaaacatatgggacccacgtttcgtggttgttaatctcgcaagtcgcagaccagaggctagaaagctgtcgtttgttgcactagataacaagtgttttcataatcataacattacactatattatgcggtgttaaatcacccgagatttacgtttggacctacacacttcttttccccaacggttcattttaaaaatgattaacatcgtaattgttatgaataaaggtggatgcccattataaggcctatcatctaagcccattatttagatgtttctagggttttacccctttccttgtacttctatataaagaaccctttatctcaatggaataacacactcatttcttctatctctttctctgtttataacacgttatcagcacgctctaaaaggtagatatagagattcttacattttttttaagaaccatgtttacttatcgactcatggttcatagtacttattttctattattgaaacaaaacaatatgagccgatcgatgattatagtatagatcggtaaaagcaggttttcaatgattcaataaagaagagaatcatgcttatcatttgtttctataattactatcgcatgattcaatgattctacaaagaaaatcgttaaagaagagaatcatgcttgttaattgttaatttttgtgatgtactattacaatattgaatatataaattaccaattttataattatataactaattttgtaactattcatagtccggtggtgggtgatgcaagcatgtattaatgttttagcattctagttttgaatagttgcatctatattcaatatcattttataaatattatattgtctaaaattcatttatgattgatatgatatctcttatttaactcctttgattaaaacgttatacatatcttatcacttttagatattgacttttctatattaaatatttgatttccatatatttgattgtgttattattatttttactaaaaacgttgcaagataatttttttttttataagatttcatatatctaaatctttgtgttattattatctaaatctttttataagatttccatatatttgattgtgttattattatttttactaaaaacgttgcaagataatttttctttttataagatttttttctctaaatctttgtggtatctaaattataaaaaaaaaaaaaaaaaaaaattgttcatggttttgccctaattttgcacgaaatcattttacccaaatcttgcacgaattcatattaccctaaataaaagttttgtcaagatatatgtaaaatccagattttgcacaaaatagttttattctgattggttttacaatattgcattaaaattgtattagtatataatacttgattattttatgaaataaattgattgataaataacttaatttaaaggtataatcacttatagaaattttcatgaatgactagtttaatgtatcttaaaaagatatcatatttttgatggtcaaatttttttttaagaacttaaattatcactagaagttgagaaaataaatatggtaaaaaacaaaaaaaaacaaaaaaaaacaaaaaaaaaaaaaatttctaacgatgaaataatctaatatatcaagtagtataaaatcttattaaaagactctagaagagcatatacattgttttctatgggaatacaaaattaaaatcatcgatgcggtatagttctccaaatctcaaagttaatatgatgagatataaatacattatgattctagagtggaattcaatacgagatg

SEQ ID NO: 19110 - DNA, 3003 bp, Unknown; identical to SEQ ID NO: 19109
  misc_feature (1)..( 3003): 2750-1469P.txt file - cDNA_ID_1820708; gDNA_ID_2926175; Annot_ID_140296

SEQ ID NO: 19111 - DNA, 3003 bp, Unknown
  misc_feature (1)..( 3003): 2750-1469P.txt file - cDNA_ID_1820712; gDNA_ID_1620645; Annot_ID_47575
aagaaggtagaacgcgaagaaacgggagaaaacgtggaagaagcatcagtagagtttgtaaatgattgggatggaaacgaaatggaagaagaagaagaagaagaatatggagattattttaatggagatgatgattggattcacgatatatcgcggccacgaagttactgggaagatctaaggaaagaaaggtatcttgaggttctcaacactgaatcagagaagaaagatatttgcaatctcattgagaggtatatatttctatgatcattcatcaaatccctcaaaagcattaaacttgaaactttacttgacttttgatgtttagactaattttaattttgtataccgctgtgcagacgaacagtttccaactttttgactagtgatttgcgacaaaagattgataatttgatgatcactcgcgtgcaaagtcatataggcgtaccactcaatcaaatagaagaaggagacgaatatgaagaagagtgggaagttgagtgttcagcaagaaacgaggaagataatgaaacagaggaagaaccagagaagacaaatcttgaagctccaagcgatgtttgcagccaatcatcagcaaggagtagtaccatgatgtcgtggaatttcagagaccaggacattgacaaggataacgaaccgacaacgtctttgtctcttcctgaacctttagttcccacaaatcaatctgtgagttttgttcttgttttttttcgtcaagtttaggttacgtgttggtgaagtaacctgaaatcttaacttattagacacaggacatgcagacgataagtgatctcaaggaacaaatggagcaacttcaacgagaaatgctcgagctacgaaataccgttaaatcttgcatcgatatgcaacttcatttccagaaatctgtaactcaagatctgtctcgttctggtcagttttatcatcatcatcacattaaacacattttagatttattcgttacaaagaaatcaaactgattaataatcttttaggctcatcagcagaacaacgagtagacccgaagaaagatcctttgaaacgcaagtgttgcgtttgctctgagatgcctgttgattcgctcctgtataggtacttctgtttgatatatcgcaacttcaaatcggaaacgctgaaataataactggcggtcttggtcttccttttaacaggtgtggacatatgtgcacatgtctgaaatgtgctcatgaattgcaatggagcagtaagaaatgtccgatatgtatggctccaattgttgacgttgtgagggcttttcttgattcttaggacccaagaaaccacaaaacattgctagtttctccattgatttgaaaatgtgtcacatttgaatatacataataaacattttgtttgtcttcacgtgttatgccgacttctaaagactttattattctcctattcttctatgaagtgaaaccattactttgtagtaaattcaatttgttgagcaaaagctaaaagtacattaaagaggataataatgaatcttggtcttcttggtgatatggataaggataaacattgtagtatttggaggctatggatgtaagaaaatactttttcgaccgttttgagctttggaaaagttaaaaaaaaattataaagaatttgatttttatgttaaaatatataaaagaaattgaagaaaaggcaattgaaagtttgaaacgttagagagaagccaagcaaaaagacacgtctgcgccatgtgtcttacagattttggaagcttaaaacgaaactgcgtaattttaaaaaagtatacaaaacgatattaacaaacaaattatagaaaaccatattaaaaagccatgtaaatccattttctatacctgcaatgtcaccctcagaaaactcgaaattatacgccatcaaatttagaaacttacatggttaaagcaaactcattaaattgttacgacaatgccaaaaaaaaaaaaaagacacaatcatttgagaaattagctgtgtataccataagcttttcattatgtggttgatttttagtggctgctctgctaataattttctgttgttgattgatacatgacttggctttgagcacatgtcaactttgcgatacgaaatataatggttgttccatattattaaattatcatgaacaatttagattttgattctatgattatatactaaacataggaatcaatagttgttaatcatttttcataaagttgataatttggtcttcaataatagcttaaattgctctctctcttttattgtttacaaaatacactctccttttgacctgaccttcccttcactatacggtttcctctggtgacgtctgcaagtcaaaataatacagaaataaggaatgtgttattattcagccaaatgaagaaacataattattttacatgactagaatttttttttacttttcaataaaaaaagagacttaaatcaaaaatgaaaaaacagagattgaaattaagatttggcatagaattttttcatttaatcaaacacgaaagtcgaattaaaatagtacagaacaaaagaaaaatagaaataaagtaaacactcctagctaaaatctctcctttcataggaatgtctggtaattctacatatgaatggattcagtagttgtcttttgtaagtatcttttttcgttgtactcaaatagcatattaattctggaaatatcattgaacttacatattacagtaattaaaaaaaacataattaagttgtcaaaaaataacaaaacaaataaagaaacaggtgtgttcacactcaaaaaaatacagactagtagaagaattaaaaacgactcttctcgccgactcgttgaaaaagtgagagacacacaacttcggagcgaatctattcttcttcttcttcttcttcttcttcttcttcttcctccgtttttttcatcttcttctctgtttcgagagatccactagtgaaagagtcagcaccatg

SEQ ID NO: 19112 - DNA, 3003 bp, Unknown; identical to SEQ ID NO: 19111
  misc_feature (1)..( 3003): 2750-1469P.txt file - cDNA_ID_1820712; gDNA_ID_1620645; Annot_ID_163188

SEQ ID NO: 19113 - DNA, 3003 bp, Unknown; identical to SEQ ID NO: 19111
  misc_feature (1)..( 3003): 2750-1469P.txt file - cDNA_ID_1820712; gDNA_ID_2926175; Annot_ID_140295

SEQ ID NO: 19114 - DNA, 3003 bp, Unknown; identical to SEQ ID NO: 19111
  misc_feature (1)..( 3003): 2750-1469P.txt file - cDNA_ID_1820712; gDNA_ID_2926175; Annot_ID_199791

SEQ ID NO: 19115 - DNA, 3000 bp, Unknown
  misc_feature (1)..( 3000): 2750-1469P.txt file - cDNA_ID_1820720; gDNA_ID_1620645; Annot_ID_47573
tctttggaaataactttctccttcgtctctcgcttttcgcctttcccttctacagtttctttctggatagtttctcctgcaagtttctttaaaccattcctattctctgaaatttcacttaagacacctttcttcgcattctcaaccgcagaaaccacctccttaatctcctttactccactcttctctattgtctcctgcaaaaccttcttctctgtagctttgtgagggtctttatccataatccgaccccgagtagacgcatgactagttgaagctccagtctcaatgttctcagaatttgccttatatttctccctgcatttcatttcattgattcaaacctcattatatactaaaccagaacaaatcaacaaacattacctgagaagatgcatcacaccagaacctcgtgacgatcggtttgaatcagatcctgctgatgttgatttagaccgatgtctaccttgaatcgcaaggcacctttcgtaacatcgaattctaagcgtagactaaataccacaaaacacaaatcattagccctaactaaaaccctacaattttaacatcagtcttgatgagagatcaccaattacatacctgaatccttccacgattcgtgaactttgaaacacaatgacgttctcgtaaacaagccaagtctttttctcgatcacgcgtcatctgcaccaacaaatcagccaaagcttgacgacctctgattcttggggaacaagcaacctgaggaaaacttcttgcttctgttgtttgaacttctttactattgtcattgccgctgcttccattgtcattattagtaattgtctccgagtcgttgcttagtttccgaataatatccataactctcacaccttctctatctttctctccagattctaaaggtggaggtgcacattcaatctcttcttcttcctcctcattgttacattcttcaatcggttgaatcatttgagattctttcacggattcgagagactccgaattctctagagcgtttgatcccatagaacttgttctgctatcgattagggattggttcgagcttggtggttgctgcgttgtcctcgcctcccatatctgaacgagagaagaagctgcgtttcttgacgggttctcgggttgacctgaattcggatccgagtcggatcctaaagaagaagacgatgatgggacgtcttgccgagattcctctgttttcgagagccgatgatctgaaacagaggatttgttggaagaacattccggaacagctttgatggaatcatcaacaacatcatcaacggagacgctacagttttcgagatgatctcttacaaaaacattgagattcttctcgaaggcggcgacgtgtatgtttcggacattgttgttattgttgttcttcttcttgttgttgttggtgttgttgtctctttgggtgcatctctcgtgaggacgactcaagacgcaattaaaagtttggcatgaagacatttctacctcagaggacgccatttccatcaacaaccaaatcaaataaaagaaaaacacaaaccctatttaatcggatctttcttttatgtcttttttttttttgatattttaatgctctgttttcttattttttgaccccttctggggaagaagaacatgagcatcgaaacagattaaaccccatttgatgacagagttttttcaaacacaaacaatacaatgaaactttggataatagataagaggaattcgaagagacagaacaaaggaaaacgaagagacagagcaatggagaaaaaagtttgaagaaaaaataaaagtcttgctgtttttctctattcaatttttttttagatttgatgttattaatatcatccaccaatattaatttaggtaaataatattaccttttggagaaagaaataatccaaatatagattagtcgatgattcatgtaacactttaaaaacttgaaaaaaggttcataggggagaagagagacagtgtcaaacaaagagggagagcataattatggcattctctaaattaaagttgacttattaaattgatacatgaatacactctctatttttttttcacatttactgataagtgataacattagaagcacttttacattgttcttttctttgactcgaatggatttttttaaaattaattaaaaccattggatatgcttcattggtttgtattcaatcctttgggattttagtgttatgtcaaagattttgagttatctaactttttacaacaaattcattaattatatgtaacagaatctgtgcatatcccatgattatgaaatgaaatctacataagattaaccatgcatataatgctatttctagaaaaattactataaaaataccaaatgaagttccattgattcattgtactatatatggtaacttaaagtaataaatttacagtctttgactcatgtaattagttaaaatataatatggtagctatttttatagcctatcagaatcaaaataaatttagattctttgactaatctgacgggaaaggttaaaaaaaaacagatagagagttttggcgtaaattacaccggagtcaaactttgttccaatttaaaacgaacttaactaatttaattctatccaaaagatatgtgtatcttgcttaagtatagaagataattcacctaaattttagcatttggtagtttttaactttctgttaatgttaaaaaaaaaaaaaaaaaagtagtgcttctttttttactgtctaaacttactaacattttccaaaacaactaaacatagcagatagcgttccatatcatttatgtaacccaaggtctaggcccaagcccaagcccatatgagggcgatacactgaaatggcaatgtatgtggggaaaacattgtgaagctaagtccgagtagtcacttaaccggagatcggagactcatcgttgcaacaacaacaaatttcagaagatccgaagacgaaacgatg

SEQ ID NO: 19116 - DNA, 3000 bp, Unknown; identical to SEQ ID NO: 19115
  misc_feature (1)..( 3000): 2750-1469P.txt file - cDNA_ID_1820720; gDNA_ID_2926175; Annot_ID_140293

SEQ ID NO: 19117 - DNA, 3003 bp, Unknown
  misc_feature (1)..( 3003): 2750-1469P.txt file - cDNA_ID_1820724; gDNA_ID_1971811; Annot_ID_58119
ttctgtttcctctctattccttgacaaaagatggagaaatgagcaccaatgttacctaaatctgtggcaggcgagttatcgaggggcgatacttttgttgatggagcagttatcgctgcagcaagaacattacctacttggtcagacatagatcttcctccaataccgagtgcggaaagaaaagcagttaaagaattgcaagatgaatgtcgaaagatgcttgcggaatatcccacaacagcagagcaagaccagaagttgctaggtattacactaaagatatatacaccaatgtgttattatctattatcgctcatatactaaaacttaagctttccctcttgttgttgtgacagattcaatgtcagaagcaaggacaacatttgcaacagcggttaagtatagaatgcacagaaagatgttcatcggaaaaattatcaaggcacttgacatctatcaagaacggttactctattgattcaagcaaaaaataattatgagctgagtgagattcatacttggtgctcactcccttgagctacttagaaactgcaccatgtaattgaaaggttcctgtttttttttttgtttagtgtaaggttatgtatttgtatggaacagttagactaagtgtgttagtttgttttaatcgcaatcacaaacaaatcataacctcttcttttcttggctgctttaatgagtttgattagccaacaaacgctttggaatcatctgtgttttttttttctcttttgattaattcatgttcatgtttttagtccctaagcatgattagtgtctcaaatgttttagggtaattgtgtctcttacgccgaactataatgttgattagtctcaataattgattattacttatactatttattaaccttgtggttacactaatcaatcaaatcatattgcgtttcttctactctttgtctaacattactattttcaaaaaaagttacggtccaaaccaaacaaacctactctgagttatacagaaccataagcaatctatttcttacctttggctacttatttgatactttacattgactaacttgattcttaataattatcttcaatatgttgaatattttatttttgaagtaagaccactatgcgtttcataattcttgccatgcataatgaaattattcctttgaatttaagattaattaaagtataaatcaaccaaacaatagacaaaaaaaaataaaaaaaaataagcatcttgatctttttggtggatcgaagataattcctttgtctcattcttttggatttagaatctcgttcagtagaatattaacatttttaattatagattatcaattatcgaacaagttgttgtacgtaaacttgattcgatctagcgttattacagtcaaccaaaatttatataataataacaatttatgaaaatgacaatattattcgatgtattattccttttttcctataattagataggtgtgattaaattcaagctagattccgaatcgacaacaacatattatatctattattaacctcaatttttgaaggcaaaaaacacacgaaattattcaaaactcacgagttgattctttacttcgatgaacatataaattgggaaagtatcaccgaacttatttgggtaataaagaaaaagatggatgaaaaaattatgtttgcaaattttaataagaattatgtttgacttggtaataaaatatagggcataatcatatgatgccatgttaatgtacgatcataccacaactgctctccttgtcgtgaaaaggttgaagtgatgagaagctaacacactttgtgacataaccaaagccaaaaatatatacttcaaccaagtcattttctcaaccactcttttctccttgtccaaggtcaaagccatgcatcaccattttattttctattattcattattgttacttttcctttatataactaataaaaggtctattactaataaacaactaaacttttcttttctttttgataaaattaaacaactaaacttgtcgaaaagaaataggagaacaaagaactctaacttctcacgaaattgataaatcaaatgattgcgtatcacaaagacactaaaaagaaaaattaaggaatcgtgtagagttgacactctatacattcagagtagtaatcatgtgtttgatagataataaatagataatggaagtatgaaatgagaaaacttgttgggatcatttatcatttgtggaatcctctaaatcttttctaacttaactccaagtcgttagagtccaagagatatgaatcgatcggaacttcaatacagaatttaattagaatatagtggaacaacatccacgaatctaaatgtcataagttgttaattgatcaaacgaaatagaatgtacttattataagcttataattttacaagtttgatgtgaatgtaaagtgtactactccactatttatttatatattctgtggtttctaaagaagaccaaatgtttttttttttttctttcctaagaagaccaaatgttatgtcaaagtttaggcactgttttaattatataacatgtctccacggacgaataaatgtacacacgaacatcatagtacgaccgttgacctttgcccctccattgattgataaaaggctaaaagccgaaacattttcattctacgagccttcccattccatttccccacatctctcctctgacctctctttgacccctctctcctctctctctagatctctcaataaaacagtgaaatagcaaaaaagaaacacaaaaaagagagagagaaagaaactttgttctctctgcatttactcttctccaactcagagatagagtccctatgcaccgtttctaatgaccaatcatctttctccctcttcatcattctctacaacaagaatcacacaaatgccataaaacctccattcttcttcctcagtaaaccaaaccataagacgacgaagaagaaaacatg

SEQ ID NO: 19118 - DNA, 3003 bp, Unknown; identical to SEQ ID NO: 19117
  misc_feature (1)..( 3003): 2750-1469P.txt file - cDNA_ID_1820724; gDNA_ID_1620645; Annot_ID_47572

SEQ ID NO: 19119 - DNA, 3003 bp, Unknown; identical to SEQ ID NO: 19117
  misc_feature (1)..( 3003): 2750-1469P.txt file - cDNA_ID_1820724; gDNA_ID_1620645; Annot_ID_163185

SEQ ID NO: 19120 - DNA, 3003 bp, Unknown
  misc_feature (1)..( 3003): 2750-1469P.txt file - cDNA_ID_1820724; gDNA_ID_2926175; Annot_ID_140292
tctgtttcctctctattccttgacaaaagatggagaaatgagcaccaatgttacctaaatctgtggcaggcgagttatcgaggggcgatacttttgttgatggagcagttatcgctgcagcaagaacattacctacttggtcagacatagatcttcctccaataccgagtgcggaaagaaaagcagttaaagaattgcaagatgaatgtcgaaagatgcttgcggaatatcccacaacagcagagcaagaccagaagttgctaggtattacactaaagatatatacaccaatgtgttattatctattatcgctcatatactaaaaacttaagctttccctcttgttgttgtgacagattcaatgtcagaagcaaggacaacatttgcaacagcggttaagtatagaatgcacagaaagatgttcatcggaaaaattatcaaggcacttgacatctatcaagaacggttactctattgattcaagcaaaaaataattatgagctgagtgagattcatacttggtgctcactcccttgagctacttagaaactgcaccatgtaattgaaaggttcctgtttttttttttgtttagtgtaaggttatgtatttgtatggaacagttagactaagtgtgttagtttgttttaatcgcaatcacaaacaaatcataacctcttcttttcttggctgctttaatgagtttgattagccaacaaacgctttggaatcatctgtgttttttttttctcttttgattaattcatgttcatgtttttagtccctaagcatgattagtgtctcaaatgttttagggtaattgtgtctcttacgccgaactataatgttgattagtctcaataattgattattacttatactatttattaaccttgtggttacactaatcaatcaaatcatattgcgtttcttctactctttgtctaacattactattttcaaaaaaagttacggtccaaaccaaacaaacctactctgagttatacagaaccataagcaatctatttcttacctttggctacttatttgatactttacattgactaacttgattcttaataattatcttcaatatgttgaatattttatttttgaagtaagaccactatgcgtttcataattcttgccatgcataatgaaattattcctttgaatttaagattaattaaagtataaatcaaccaaacaatagacaaaaaaaaataaaaaaaaataagcatcttgatctttttggtggatcgaagataattcctttgtctcattcttttggatttagaatctcgttcagtagaatattaacatttttaattatagattatcaattatcgaacaagttgttgtacgtaaacttgattcgatctagcgttattacagtcaaccaaaatttatataataataacaatttatgaaaatgacaatattattcgatgtattattccttttttcctataattagataggtgtgattaaattcaagctagattccgaatcgacaacaacatattatatctattattaacctcaatttttgaaggcaaaaaacacacgaaattattcaaaactcacgagttgattctttacttcgatgaacatataaattgggaaagtatcaccgaacttatttgggtaataaagaaaaagatggatgaaaaaattatgtttgcaaattttaataagaattatgtttgacttggtaataaaatatagggcataatcatatgatgccatgttaatgtacgatcataccacaactgctctccttgtcgtgaaaaggttgaagtgatgagaagctaacacactttgtgacataaccaaagccaaaaatatatacttcaaccaagtcattttctcaaccactcttttctccttgtccaaggtcaaagccatgcatcaccattttattttctattattcattattgttacttttcctttatataactaataaaaggtctattactaataaacaactaaacttttcttttctttttgataaaattaaacaactaaacttgtcgaaaagaaataggagaacaaagaactctaacttctcacgaaattgataaatcaaatgattgcgtatcacaaagacactaaaaagaaaaattaaggaatcgtgtagagttgacactctatacattcagagtagtaatcatgtgtttgatagataataaatagataatggaagtatgaaatgagaaaacttgttgggatcatttatcatttgtggaatcctctaaatcttttctaacttaactccaagtcgttagagtccaagagatatgaatcgatcggaacttcaatacagaatttaattagaatatagtggaacaacatccacgaatctaaatgtcataagttgttaattgatcaaacgaaatagaatgtacttattataagcttataattttacaagtttgatgtgaatgtaaagtgtactactccactatttatttatatattctgtggtttctaaagaagaccaaatgtttttttttttttctttcctaagaagaccaaatgttatgtcaaagtttaggcactgttttaattatataacatgtctccacggacgaataaatgtacacacgaacatcatagtacgaccgttgacctttgcccctccattgattgataaaaggctaaaagccgaaacattttcattctacgagccttcccattccatttccccacatctctcctctgacctctctttgacccctctctcctctctctctagatctctcaataaaacagtgaaatagcaaaaaagaaacacaaaaaagagagagagaaagaaactttgttctctctgcatttactcttctccaactcagagatagagtccctatgcaccgtttctaatgaccaatcatctttctccctcttcatcattctctacaacaagaatcacacaaatgccataaaacctccattcttcttcctcagtaaaccaaaccataagacgacgaagaagaaaacatg

SEQ ID NO: 19121 - DNA, 3003 bp, Unknown; identical to SEQ ID NO: 19120
  misc_feature (1)..( 3003): 2750-1469P.txt file - cDNA_ID_1820724; gDNA_ID_2926175; Annot_ID_199788

SEQ ID NO: 19122 - DNA, 3003 bp, Unknown
  misc_feature (1)..( 3003): 2750-1469P.txt file - cDNA_ID_1820728; gDNA_ID_1971811; Annot_ID_58118
ttaactttctctgcttgctcagtttagtgattctcttgtcataagccaaaccctcccttacaaagttcttgttttcagttcaatcatctctttgttatttatgaaaaattaggactctgtatctactggctgcaaatgtcctgaaggtttccaaggcgacggtttgacgtgtgaaggtacataactcttaacttatcgattaaaatctcgaaagaaaccacataatcatattaccaacaatgtaattatgttttctgatttggctctattgcagatattaacgaatgtaaagagcgttcggtatgtcaatgtagcggttgcagatgcaagaactcatggggtggatacaaatgcagctgttctggtgaccggctttacataaacgatcaagatacttgtataggtaaaattttatcaatcaagatttaagagtactcaaattccataacagtatctaattaatatacattgatgattgtttgttacagagagatatggatccaaaacggcatggtggctcacattcttgatactggctatcgttgcagtagccggtttagctggttatatattctacaaataccggttcagggtactactactctttctgattccacaaaagcatttttgtacttaataacggttttaggattaccaaactaacttttctttggtgttcctattaacagtcttacatggactcagagattatgacgatcatgtcacagtatatgccacttgagagccaaagagctcgtgaagttccatcagaagccgagccttttacactctaatagtatatgaccaaagtaaccaaaactgtcatacacaaagaaatgtttgagatcaattaatgtacatatgaattatactgtaaaaataaaagagtgagatagagttgtgtatattttcatggcaaaaaaataaataatttggatgtaaagagacttttgaagaaaataaaacaaatattgctttcattgagagttgaactcaagacctcccgcttactaaacgggtgctctaaccaactgagctatgaaagcttcttgcaacatattattccaaataaattatatcgtaaactaagagttaaaatcttgaaaacaaaggataacgatcttcgtctccctctgctaaacccattttcttctgttgaggaatggcttcttcagtctctcttcagttcctgaccaacacctttatctccaaacctcaggttcttaatcttatctctctgtatcacctaatgtttctatgtcatgtgtgtgtgtgtgtgtctgtctttgtctgaattttctgagtactcctcatgttttttccggtcggacaaagggtttctgcaacggaattgtgtcagcaccaagacccagaagcaatttattaagagacagacaaaatggtgtacgacccatcaaagttgcgtctattgagacacaacctttccctctgtttcaatctcctgcttccgaagaatcttcctcgtccgaggttaggattttcagttttgagtgttttagggtttatagagttctaaaaggcagtacctttgacaattctttgcattgcccctatctgggagattgatttagagtacaaatgagttctaaaggtagtacctttagacaattctgttcattgcccccatatgtgatattgatttagggtacatatgagttcttaaggcagtaactttagacaattctgtgcattgcctccatctgtgagattgatataggggacttcttaaggcagaaactttagacaatcttgtgcattgccctcatctgtgagattgatgtagggtacaaatgagttctaacggcagtaactttagacaattctgtgcatttccctcatatgtgagattgatttagggtttttgtcttttgtttcttcactagctggagacagcagatccggatttctacaaaattggctatgttcgaagtgtgagagcttatggagttgagtttaaagaaggtccagatggttttggtgtctatgcttctaaggatatcgaacctcgccgtcgagctagagtcagtcttcttagttaaaaagttgacaactttttgttttgttcttctctttagattattttgttttcttttctctctgcaggtgattatggagattcctcttgaactgatgataaccattagacagaagcacccttggatgtttttccctgatattgtaccaattggtcatcctattttcgatatcattaactcgactgatcctgaggtagtaacacatttgtgctatttcgatatcatcaactcgaaagttcttatctttctcaaagtcctttcacatttgtgcttacagattgattgggatatcagattagcgtgtcttctgttattctcttttgatcgagatgatcacttctggcggctctatggcgatttcctgccggctgctgatgagtgcagcagcttgcttttagctacagaggtggattgaattgatatgattgccatttgaaactggtcacatttacttgtgtctttaaactaatgcttgatgatatctaattctgtgtgtttttctataggaagaccttgcggagcttcaagatcctgatcttgtttcaactatcagacaacaacagaaacgaatcctagatttttgggaaaagaattgggtaatgaggccttatatatgtgtttccagtatatcttgacatttggttattgctttgtttttcattggcaaattgtattccgtctcagcattcaggtgttcctctcaaaatcaaaaggcttgccgaggatccagaaagattcatatgggcggttagtatggcacagacacgatgcatcagtatgcaaactagggtcggtgctttggttcaggaattaaatatgatgattccttatgctggtaaggaagagcatgttgtgtagttattgataaattaagatttagtatcaatgaactttttgttgaggaactaaataagaatctcacgattgatcattctctgcagacatg

SEQ ID NO: 19123 - DNA, 3003 bp, Unknown; identical to SEQ ID NO: 19122
  misc_feature (1)..( 3003): 2750-1469P.txt file - cDNA_ID_1820728; gDNA_ID_1620645; Annot_ID_47571

SEQ ID NO: 19124 - DNA, 3003 bp, Unknown; identical to SEQ ID NO: 19122
  misc_feature (1)..( 3003): 2750-1469P.txt file - cDNA_ID_1820728; gDNA_ID_2926175; Annot_ID_140291

SEQ ID NO: 19125 - DNA, 3000 bp, Unknown; identical to SEQ ID NO: 3441
  misc_feature (1)..( 3000): 2750-1469P.txt file - cDNA_ID_1820743; gDNA_ID_1620646; Annot_ID_47612

SEQ ID NO: 19126 - DNA, 3000 bp, Unknown; identical to SEQ ID NO: 3441
  misc_feature (1)..( 3000): 2750-1469P.txt file - cDNA_ID_1820743; gDNA_ID_2926179; Annot_ID_140483

SEQ ID NO: 19127 - DNA, 3000 bp, Unknown
  misc_feature (1)..( 3000): 2750-1469P.txt file - cDNA_ID_1820747; gDNA_ID_1620646; Annot_ID_47611
tggcgataccgatgaaagcaactttcttcatcacgtatataatggttgatggttgggcaggagttgcaggagagattctaatgctgaaaccattgattatgttccatctcaaaaacgccttcttggttaagactgataaagacagagaggaagcaatggacccgggaagcattggttttaacacgggtgagcctcggatacagctctactttcttctcggtcttgtctacgctcctgtgacaccgatgcttcttccttttatcttggtcttcttcgcccttgcttacattgtatatcgccaccaagtaagtttcttcttctttccttaatagggtcgaatttgttttaaagcagtttcttaaacaaatttttgtttctgtcagatcattaacgtatacaatcaagaatacgagagtgctgcagcgttttggccagacgttcatggacgagtcatagcagcattggtaatatcacagttgcttctgatgggtctattgggaacaaagcacgctgcattagctgcaccgtttctcattgctttgcctgtgcttaccattggtttccaccacttctgcaaaggtcgttatgagccagctttcatcagataccctttacaggtttgtcgtttcttctaacaaccatttaacattttagattccacaatcataccaaacacgaatcattcttgtatttgtttactcgtgttacaggaagctatgatgaaagatacattagaaaccgcaagagaaccaaacctgaaccttaaaggctacttgcaaaatgcttacgttcatccggttttcaaaggcgatgaagacgattatgacattgatgacaagctcgggaagtttgaggatgaagccattattgttcccaccaaacgtcagtcgaggagaaatactccggctcctagcataatcagtggggacgattcgccgtctttgccctttagtggtaaactagtctaagagaagcttcactcatggtcaaaagaaagtatatatacatatgctactttcaatgtatacagagagtaagagaagctaccaaagtgagaaaatttgactaagatttgttgatgttgatattttataaggtttctgggttgtgaatggtgaatcctaaatttcggggtcgttttataagaaattgattttattgtggttttaatcataattttagctcagttgtcctaactctatggttcaaatgtatgattcaaatttggtttagatttttggttcggttagttaatttggatttcatttggaaactgtgctcctaaggcacctatatcttttatcttttcagcaattaaatagcaaagcctaattaaggaaagggtatcatattctatcattgaataaaatgttaaatacaaatctgtaagtttctaaaatctcttagattttgattaactttatcaataaattttgtatagaactaatcaatcatagactagtggatcatatataatttgaccaaatcaatatacatttttcaaaattaaattaaagattaccttccaaaactaattaaagataccttgtttggaaaaaaagagattaaattatcttccataattaagtaatatgtagagaaaaagattcaagtaagtaatttatggctaccaaaactttttgttgaatatgtgtatatataagttgacaagaaaataatatgtatatcgtccattgaatcgaggaaggaggaacaagggtgaaagaagataaattttcagtagcacaaaagagtgaaatatacacaacaagaatcatgagatctgctactttattgttggtttcttgtgttcttttgtctttcattttgggcaatgttaaaggtaaaatcttaaaaaaaaaacctcaatttctatcaactgcgaaattgtatgttcttttcataaacaatggtttgtataccatggtctaattataatcttcttgcatgatcaatgactaagatctttaatatttaacaattcttttggttgatataaaataacagaagtggaagctgtgttgaagccaatggaccaatgcggccggaaggatatatttttgggaggatgcggcagcaacggaagcaaaacatgcataaacgactttgttaagaaaggaggtgtagccgctaagcctagtagttgcgagtgtgatgactttggggaagaacatttatgtagatgttatgttccttgctagtttttgttatagttctacaaataaaatttacaatgaattatataatataacgttaacgaaaccagtttattgtgatgtgaaattttgaatcttcttagatgttggcaatattgtaatgaataacagtcgcaaaacttataatacctcaataaaaagtttcgtttccgtaagactactctacttgactcttaggtttgaatctcttctcaaaacaaccatttccattatttcgttttttgatcttcatgagtatcttcacgtggttcttcttgaagcaaagatgttatttctttgtatccaatggtttaatttggtcttacttaccaggaaccatatgaatgtaagaatgttgccatctcaaaaaaaataaaaaataaagcgttagttagttggaatttaatcaaaattaaaatacaagatactgtatttattagttggctttgtcttaattcaccaaccacgatctcgagctgtgctttccattaatacaatatgtcaacagtttcatattcttaagattcagtagaaaaaattgaccacaagacaaaatataggtaggacgtttcaatctttacacctattttgataataaattagagacgagcttaattatataatcagtcaactagaaatgattattataaaattacagtgttgattaaaaaaattaaaaaactatgtaattgttaatttgcatgcagatacaactatacagaaagagaagataggatgaacaagtgagtctcttctctctctcaaatccactccgtaataagttcataatctatcatccaccatg

SEQ ID NO: 19128 - DNA, 3000 bp, Unknown; identical to SEQ ID NO: 19127
  misc_feature (1)..( 3000): 2750-1469P.txt file - cDNA_ID_1820747; gDNA_ID_2926179; Annot_ID_140482

SEQ ID NO: 19129 - DNA, 3003 bp, Unknown
  misc_feature (1)..( 3003): 2750-1469P.txt file - cDNA_ID_1820762; gDNA_ID_1620646; Annot_ID_47605
atctggagaaccatctagtggttgaggaatggttccatcaaggaaaccaaactttttcctagaccgcaacgccgtcttgaaaccacatgcccactcttcatagttatttgtcttcagtatcggatgggagatcacagctcccgaattgtcagctgccgttaagtcgtacggcaaaattgtgcgtcggacctcaattacagatggaggtggtggtggagcatcagccatagcttcagagaaaactcacttgaaatactcaattcgaaaaacccagattgcgctctgataccatgacaaacttaagacaagatgtagtttggtttatgttgtcttgtcttattaaagaggcgttaaaaccttacttatacaaagcaaaagatataacctaaagtattgcacaaaggaaatgactaaacaggacaaatatatattgttgactaagctaactaaaatattgacgagcaatagcttcaacacttttaatataccaaccaattaatactggaccctaccttcatttttactactatggttatgattgtttgcgagtaaatgatttgattaatatgtattatatgtatgtcgtatgtatctgtaggtacaagaaaaagttggagcttgactcgagatttctatctgatttttatgacgaaatcaaatgttgtgttcttatttaaagtgaaaaaatattttgttttactagccatcagtgtagagtttttctggatctatagttttcagtataacctgcaaatttgagattagctaactaaaaataaataacactttgaaaatggaagagaaattatgttaaatgtaaattgatgaactttaattaggaaattttgttgtatacaatttttttttggatgaagtatacaatttgttttcattcaactgtttacagatgaataatttgttatgtgatatgttatcataatgttgacgtgtaaattatctttttcttcttctttttgttgctgttgttgaagttgatgtataaattatctaataaactttataccttaaaccaaaattctactcccttaataaattagagcaataacatgttaccgtccgtttcttaggggtcgtcaagattggtccgccttggttttaggggtcaagattggtcgcgattataggccagatatatttagtaaatgaaaattttggaatgaccccaaaatgtaagaccaagaatacttggattgaaaatttgcataatgtttataatgtttgaacatctgcatcctcacaatttttataatgttttgtttaagggaagtttatcaaagtttttgggagtaatttcttttgagtttctaacctatttccacaaacgacctatcaataaataaaactataatataccgtagttatgattaagaaaaaatcaaacatactcatataagtataaataagtggagttgttatttttcttcaagaatatgatatttactggttattgacgagaggaatggattccatatgacttaatgaataattatgattagaagaagaaaagaacaggaaaaaagctaatcttagtttgtagagttcaacgttcagtttggaaaatggatcaataactacttcgaaaggtataaatgttacttgagattgtaagaaaatatatttcatttatttctcgtgaaatcgtacctctttcacttttatccctttgtttcaccttgagctaatttttcctcaaaaatccgattaatcatataacaatagatatttttcgagtacgtagaatataagttcaaaatccgaatcatcaatattataaaaacatagaatgtacatggtaactaaagtaaaatacagctgattttaacacattcccaacaaacttgactactccatatttttcttcgaagtctacacacttacgacaaatttgcattatatgcgtggcactaattttgtcttaaagactctattgcatgatctcatgcatgccaattaatatcgtatcccacttgcggtttgcacatgcaccggttaaatagttttaatatttgatttgtttatcaaagtatagatatcagaataatacacgttgtgactaaaaaatagaatatttcgacgatccttagatactttgtaaacataaaataaaaccttactagaagtttagatgcatgatttcatcaaaaaatgttaataatcattattgactcatggtttaacgctatgaattaaaacaaataagataaacttgacggctcgttttcatatttctttttttttgaagagaggaaagttaattatgtgagagagagaacgatagtcaaaatgctttttaataggattattactcaactttccagtttaagacaatggaaccatcaactgtgtcaatatcgccattacacagcctggtagaagaataattaggtatgacttctgcgtttcatcaagtaaaaggaggtggagcctaccttcttttttactagtagtatgttttggttgtttacaagtaaataatttgattcaagtataacataacaattaccatgttcaatgaacctagcatgttctgtaagataattttgatgagactttaaagttgaagttacaaattgagtagagcaaataggaaaaaaaaaattgaattgtcgaatttgattatacctactcttgttgtcatttcgtgatattgaagaatatttctaggtggtacatttattcaaataaaacaaattctaaaaattaatacttgaattcaacatcataaaaagtagaggtcagatattaaaatgaaaattcctaattgcaaaaccatcttaaaatagaaaacataagatagattcaaaaatatttctgtctttttgttgatgcgaaactttacaaacttcaacacataattacatcctttatacaagtaaaggctagattagtaattaattaatttctaatgtcccttatgtaatcactatatataacgtacattctcaacctgataatatcactgagcctcacatctcaacaatg

SEQ ID NO: 19130 - DNA, 3003 bp, Unknown; identical to SEQ ID NO: 19129
  misc_feature (1)..( 3003): 2750-1469P.txt file - cDNA_ID_1820762; gDNA_ID_2926179; Annot_ID_140476

SEQ ID NO: 19131 - DNA, 3003 bp, Unknown
  misc_feature (1)..( 3003): 2750-1469P.txt file - cDNA_ID_1820776; gDNA_ID_1620646; Annot_ID_47601
tgaatccaaagagagatcatagtgagagtgaacttgacacaacatttcttacaaatcaaacgcagattggttgaaatgttgttaaaagaagagtctttggagactaattcttgatttactacgcagaaatgtgatgcaaatggatctaaatcctctaaaattagggtttgataagctcaacgcaaggatttagtgactgggtttcgttaactaaacatcatcacaatcgatttcgattccaaatctaagcctctcgagtacgggagcaactaggttcatcaatctcttatagcttaatacgaatctacttagagatcgatacgaaacttggaatcggaatgagagaaagaacttacataaaattggagatcggagactgtgagagcaactttgagaacgcggcgctgatgaagaacgcagacaagggttgggttttttggcgttagtaaacccttttcctatttcttttttgttttctcacccaaattatttgtaattacttagtataaatattttaaaaatcatgtatatttccaaataaaattcagaagacaaaaaaagtataaatagtacaggttactctcacattctcactatacaattctaaactagtgtagtatttatatttaatttatacaattccatcttcaaaattttttttgcttaattttgattttgattttttaatatacaaatgcaatgtatttaccacgccttaaacttttactgaaataacttatatatactatgctagatatagcgtaaaatcattaaattacatatttgagtttttgaaaaaatgtaaatatatataaattaataagcttaattacaaataggaccgtccattgtgtatatagtattgtgattgcatagtctaaagtattatcttaaacgaaattgaaaaataaccaactttcttttttctagacgggtcacgataaatggttaatttttaatagatcactaatacagtaaatcactgtaaatctgataacttatttcatccataagtaagtttgtattgcatttgggctactacagaaccaaaggatacattattaggaataggtggagagagacaaaaaaagagtattactggccttcatggcctctttgtgaattgtggccttatatattaggtaatcaattggcccattccaaagaatgtttcgttcattcttatacattactactacattgctaagtgctaagccccccaaatagcaaattctagaataacttttacatgttttgccacttttttattccgacaaatcacgatttatccataggaaaagttgccaactcacccaaacaaacgctaacatccttagaaattaagcagttgatgatcattacatgtgtttttggtgtcatatgacggattcatcaaatcatgttagaatgatgatgttggaaaagaaacacgtaagtagatagcattgattgagatctaaaattgcatttagtaacgaagatcccgtcgattccgtcgtaataactaaagcggtgcatggcaatatgtatattattaatattcattgaggaatgaggaactttcctacacgtaacgaatatacaataatattcctagttagtccaaaatgttggataaatgttcattcatgagttgtgaaaaaaagaaactaaaataatttcaaaaattgttagtattattataattattttttaacaaaatgtttcggttggtgtcatattcttaaagaaaaaaccaataatcaccattacaactaattaagcttaaaacccataaatcacaaacttttcaaaggactgacttccttctaccgaaattatcggaactcattgatgacataaccagacttgcttttgtcgaatgtacctatgattacaaaacatgacacattatacattcacacatacatgagttttggttatttccattatgatatataatatcacacttcaaataacagactttttcttgtttgtctttttcttcaatctttgctaatggtgcagaatggtactcaagcacgtgaaaacgcagaaactcgtatcatccgcttcatttccacggtacaccctcaccttcataactccgatctgtgatctccaccgtccaatagcattgacttcagctcaatatttaatccggcggtccaactattcaattcaagatttaacagaagcatgtgattcttacctcctgacagctcacacgccgcgtttcaaaacaccttcacttgcggacaatacggagcaatggtcgatgtactcttgacccaaagaaggcccaaacatctttaaataaaattaattgtaaactttttgatgagtgagatctaaaaagagtaaaaagacagagaatcttatgataaatttaatatttgttttgctattgtatataaccaactattatgacatagtttgcaatccaaggtgttacaccgaatcggtaaataactaaatactagcttgctcaatctaatagctagagctaataagaaaaatgtatttcgttaggataaataaaaatatcattatgtttacttgaatatttgaaaaaaaatttggtacatgtaaacgaaatttcccaaacaatattctaaagtgtgaaaggatttaaaaatgacgttgactttaggaaaaagtctcttcagttttagttaaaacatattgttaataatgcaaatcaagctcgaaattcaaccaaaagtttataagtgtaaattacttgaaaataatataaccaaataaatttgatgattttgataacattcgaggatatatgttactacatttacgtattttcttaaaattatttcttcaatacaaaaaaaaaaacatattaattacgtcggtgccactgccactaatatttaagagggcatcattaatagattctccattccaaaatcctctgtatatggatctacacctctcctcagtctcatactcaaatcaataatccaaaccccaaaaaaaagaaaaccagagaagagagtttaaaaaatg

SEQ ID NO: 19132 - DNA, 3003 bp, Unknown; identical to SEQ ID NO: 19131
  misc_feature (1)..( 3003): 2750-1469P.txt file - cDNA_ID_1820776; gDNA_ID_1620646; Annot_ID_163235

SEQ ID NO: 19133 - DNA, 3003 bp, Unknown; identical to SEQ ID NO: 19131
  misc_feature (1)..( 3003): 2750-1469P.txt file - cDNA_ID_1820776; gDNA_ID_2926179; Annot_ID_140472

SEQ ID NO: 19134 - DNA, 3003 bp, Unknown; identical to SEQ ID NO: 19131
  misc_feature (1)..( 3003): 2750-1469P.txt file - cDNA_ID_1820776; gDNA_ID_2926179; Annot_ID_200080

SEQ ID NO: 19135 - DNA, 678 bp, Unknown; identical to SEQ ID NO: 3471
  misc_feature (1)..( 678): 2750-1469P.txt file - cDNA_ID_1820787; gDNA_ID_1620647; Annot_ID_47644

SEQ ID NO: 19136 - DNA, 3000 bp, Unknown
  misc_feature (1)..( 3000): 2750-1469P.txt file - cDNA_ID_1820787; gDNA_ID_2926188; Annot_ID_140904
aatttgaagaaaattagatcaattgtctcttaagacaattgatctaattttcttcaaatttaagagacttatctaatatttaaatcatataaaatatttattatttgtttagagttttactaagagtccactattgtggatgctcttaatccttacacattaaaatccctacattaaaataataattatttatttaattttgaagataataaaaaaattaaactaattaataaaaatatatagtaattggcagtatataactatatatatagaaaaacataacaaaaaacaaattaatacttgagaagataaagtaattcactggcagaaaacataacaaaaacaaattaatacttgagaagataaagtaacactggcagtggagaacttgtgttgcagagtacggcaacgtgttcgtacaaacacgtttgaaatattcttgcatgtcataacgcgttttgcaatattatactgtactactattgttttgggttctcattgaattcaagaattaagaaattaaaaatgccaatatataaatgcaaagtttgaaatacgtatttggtaactcgtttattggtatacgattaaatattatttagtatggtgattgatctgtatacacacacacgcacacggaaaactaatgattgtatactaaagtttgttctccattttgatatcaatatgaagagaaataaacttagagcagcaaatagtggtttgtgttcgtgttcttgatgtgtcattgctttgctacaattatgtatagtactgcatgtttgctaaccaaaacaattagagaagccaaatcattaatagttcccttcttagtatagggtttccaacataaaatttgatgttaacacttgcattatcagtccaaactgaagcaattgattagaattattatactcatcatatatatggtgttggaacttgtgaaaaatggatttgtatatacaattggggacttcattaatttttcgacagatatggctgtgtttttttatatgtataaatggctgtataataattgttgattagttgtaaatataatcaagaacacaaaagtgcctcgagaattaaaaacacacatggagtatggtcaagttgtaaattttgtaataatatcttataattaaggagtacactttattacaatcttcaatcattgctgaataatgcatgaatgggtcacatatatatgaagctttacatttgcacatatacaaaatgaattatcaaccaacatagctaatagcttccacttggacactgattctcatgcccaaaatataaataaaaaaatacgaacgaaagaaaaacaaacactttcgtgtaagaaggtaaaatacgacagtcagtctattctcacgtatgtatgtataatctactcactgattgagcaattaacttttattgaacgattaattagattgatataaagctttagaaatgagaagaatcaccaaaacgttacaattagctgtgtcaagtagtttaagaacaccaagccgttatgattagctccaatttgcccaattgtgttaaaatgtgcttattgtacaaatgcagataaagcatgtgatagatggaaattgttgctacgcgtgcaacttagtttttttctataaagttcaagttgctttacaggtttattggcagataatttcaaataccgagttatacaataaacccattgtgatacttaaagaaaacatgtgttttggttttggagcatttctatatagagataaggtatgttgctacctttcttttacagatttactgaagactcgaaagcaataatctatagacttgagaacacaacactgatcaaaatcttcaggggtctctcttttagtcaaatatacagtatgggttttattggtcaaagagatgcaaggagcttaaatccaaaactttgacggttacaaaaagataaaactagtactttgcagttcttaaatcattttttgcatgcttcgtttacaaaaaaaaaaaaaagtaccatttacttgtatgaattaaacgtgagtcacgaactttagtatgactttgaattttgatgatcaatatgatgagtaaatttcttgatttgatgaacagaatcaaaatagatatataaatgggccacatatatgggcctaattagttgggtttaaattaaaacatttcagttgtgattcacaaaccaaaaaacctggttatttggagtcatgcttgtaaacctgaatggttattgataatgttttggttttcaatataaaccggaagttttaacacaaacgaagattcagttaacccttgctatcgaattcgccgcgcctcttcgtctccttcacagagatactcttcgtcaatttgaaaacttccaggtaatctcatctttttcttcttcttcttctccttctatttgtattaagcgtagcctgagaaatctcctggtcggttttgagacagtgccctgtgctctaatttcggttgataccttgacatgtccgtctcttcttcgagggtgatttttgtttttcaaattcagatttaagatgtgacccagttactaaaacttctggttttaaggttgccatcatttatgtggaatatcctcagctcgattgaatctggcagtttttcgtttttctcttgttaatggtttttgttaagaagcgttttggtgttttagtgaataagaacactgccaatcatcatttcacgaacaatggtattagaaagtgcataattttctggatggctgcttctttggttggaattgtttgattcacatttaatacatagtctctattgctcagtttccaatcacttaagagctccgtgttgggttttctagagctaccgtttgatggatttatgtgaggcatcttaatttatccgttctttgtgaatcatcacttcacttgtgctaaacttgagaaaacgtttcccttgatagttttgaactgcagctgatttccgactaaattaaaggagtaaatg

SEQ ID NO: 19137 - DNA, 3000 bp, Unknown; identical to SEQ ID NO: 3470
  misc_feature (1)..( 3000): 2750-1469P.txt file - cDNA_ID_1820791; gDNA_ID_1620647; Annot_ID_47643

SEQ ID NO: 19138 - DNA, 3000 bp, Unknown; identical to SEQ ID NO: 3470
  misc_feature (1)..( 3000): 2750-1469P.txt file - cDNA_ID_1820791; gDNA_ID_2926188; Annot_ID_140903

SEQ ID NO: 19139 - DNA, 3003 bp, Unknown
  misc_feature (1)..( 3003): 2750-1469P.txt file - cDNA_ID_1820805; gDNA_ID_1620647; Annot_ID_47637
atcagcctttgtatgtcaaggtaattgttaatgagaaagttttacaaaccattttactaaactcaatgtagatctgtgtatactctttttgcttatgtttacttatctgcagcagtgttagttttctatgtgcatcttaatgaattctacttggtatcttgtaatggcacagcgttatgagattgtgaatggcactactgaagttgaactggctccagaggatgataccaaggtggaccaaggagaggagaaaactgcagaaggtaacttcatgagcactatgtcttctttgtttgttgttaatctttttggaaagacaaaaacaatttaacatttttctctgtttttcattgcagagaaaggagttccaagtttctggctgacagctctgaaaaataacgatgttatttccgaggaggtagcctatatgcagttttggtgttcgttttataaacactccaatcataaccatggaatatgagcataacttattgtcatttatgtcaggtcacagagcgtgatgaaggggctctcaaatatcttaaagatattaagtggtgcaagattgaagagcctaaaggattcaaacttgagtttttctttgacacgaatccgtattttaagaacactgtcttgacaaagtcttatcatatgattgatgaagatgagccactgcttgagaaggctatggggtaactacttatactctcttgcaattgttgtatacttttaagtatattctgcttattagctgattgcattgagctgcttattttttttcttcgcttatattgcaaatggattcttattctttcaccattcattttcaggacagaaattgattggtatcctggaaagtgtctaactcagaagattctcaagaagaagcctaagaaaggttcaaagaatactaaaccaatcaccaaactcgaagattgtgaaagcttcttcaacttctttagtcctccagaagttccggatgaagatgaagatatcgacgaggaaagagtaagataacgattgttagaaaaacctgtcatcatttagttaatgtatttagtaactctttctcgttctttgatgcaggctgaggatcttcaaaacctgatggaacaagattatgacatcgggttcgtctttttctaaacacactttctctgttgattttatgggtttgcttttgagtcatgggactactttatcactgcaatcaaggtggttaccctttcattattatctgatcacaagtactttttactttctgcagatctactattcgggaaaagattattcctcgtgctgtctcatggtttactggtgaggctatggaagcagaggattttgaaatagatgacgatgaggaagatgacattgatgaggatgaagatgaggaagacgaagaggatgaggaggacgatgatgatgaggatgaagaagaaagcaagaccaaaaagaaggtataaagtgccccaagtatagttgtttcttttttttttttttttcttcatgccacgttagttttttactaatcctttgaaatcgcttaatatttttttttgcagccatcaatcggcaacaaggtatgtaacctttcagaactaaagtttatttgattttggaactccaacattcaaataaccaaacacaagaagtttcaggctgagcattgtgatgaaaatagaaattaatatcggaaatgtaggctctagaggcccatgaatcatacagattgctgaaagtaactgagcaatcctaaaaagtatgaatcagtaaataggtagttacgtagaagactctgagaaggatacatgaatgacacagcagagactaaacaagctctttaatcatggcatgggcagtacgagatagaaccattctcatgaattcattttattactatagtagcaaactagcaatcagtgtctatgtttgtgataaatgtgagaatcatctgcttaatttttttttcctcttggactgcagaagggagggagatctcagatagttggtgaaggtaaacaagatgagaggccacccgaatgcaagcaacagtaatcttttactacgctctaccagacataaaaggattgcgtgaaaatataattcaggtcattctctgttcatcaagaatgaggattgagaaaaggttttgggatttttaaaagtgaaattcatcttgtaggagtttcgttcgtttttctattggtgtgtttattttctctaaagcactttaataatataccttggtatttaatttatgaatcaagcatcatcatccctagtctctgcattcactacttcatcccctacctaaactttgtcgacgaaagagattttaataaccatttagatagtaatgggtagtgggaatgatcattattcttttgttcaccgtcctttgattttcaatggtaaccattttgttgtgtaagactacaaaagatgaataattggactatgaccatattatattagtcaagtctaaatcggtcgaaatcagttcacctttaagatgagtaatttgactaaatgcctccgcttgttcaacactaattataatttaaattattgtagaaggaaaacacaaagaaagtgaggttccgaacatccacaatttggactaatcacatactacttaagaagtttaatgcatcattagagctaaatgaggggaaaaaaaagctagctaaataaacttgagacacttgtttgtgtttggtgttatgaaaaacaaactcaaaagtcgcaacactgtttggtaaattggagacatgcgaagaggggaccgcttcgttaccattcagagtatttgacgtaatatattccgttttaagaaacctatctagtttccaagaaatttactaataaaggtgcttgagaaagaccgttgttgatgatacgtttttttatttgctaatgaaacgattcggtcgttgtttcttgaaattccactgttattagactcttgactctgttttgtttcccgccgatctcgtgatgatg

SEQ ID NO: 19140 - DNA, 3003 bp, Unknown; identical to SEQ ID NO: 19139
  misc_feature (1)..( 3003): 2750-1469P.txt file - cDNA_ID_1820805; gDNA_ID_1620647; Annot_ID_163293

SEQ ID NO: 19141 - DNA, 3003 bp, Unknown; identical to SEQ ID NO: 19139
  misc_feature (1)..( 3003): 2750-1469P.txt file - cDNA_ID_1820805; gDNA_ID_2926188; Annot_ID_140898

SEQ ID NO: 19142 - DNA, 3003 bp, Unknown; identical to SEQ ID NO: 19139
  misc_feature (1)..( 3003): 2750-1469P.txt file - cDNA_ID_1820805; gDNA_ID_2926188; Annot_ID_200809

SEQ ID NO: 19143 - DNA, 3000 bp, Unknown; identical to SEQ ID NO: 3457
  misc_feature (1)..( 3000): 2750-1469P.txt file - cDNA_ID_1820809; gDNA_ID_1620647; Annot_ID_47635

SEQ ID NO: 19144 - DNA, 3000 bp, Unknown; identical to SEQ ID NO: 3457
  misc_feature (1)..( 3000): 2750-1469P.txt file - cDNA_ID_1820809; gDNA_ID_1620647; Annot_ID_163290

SEQ ID NO: 19145 - DNA, 3000 bp, Unknown; identical to SEQ ID NO: 3457
  misc_feature (1)..( 3000): 2750-1469P.txt file - cDNA_ID_1820809; gDNA_ID_2926188; Annot_ID_140896

SEQ ID NO: 19146 - DNA, 3000 bp, Unknown; identical to SEQ ID NO: 3457
  misc_feature (1)..( 3000): 2750-1469P.txt file - cDNA_ID_1820809; gDNA_ID_2926188; Annot_ID_200806

SEQ ID NO: 19147 - DNA, 3000 bp, Unknown; identical to SEQ ID NO: 3458
  misc_feature (1)..( 3000): 2750-1469P.txt file - cDNA_ID_1820817; gDNA_ID_1620647; Annot_ID_47633

SEQ ID NO: 19148 - DNA, 3000 bp, Unknown; identical to SEQ ID NO: 3458
  misc_feature (1)..( 3000): 2750-1469P.txt file - cDNA_ID_1820817; gDNA_ID_1620647; Annot_ID_163288

SEQ ID NO: 19149 - DNA, 3000 bp, Unknown; identical to SEQ ID NO: 3458
  misc_feature (1)..( 3000): 2750-1469P.txt file - cDNA_ID_1820817; gDNA_ID_2926188; Annot_ID_140894

SEQ ID NO: 19150 - DNA, 3000 bp, Unknown; identical to SEQ ID NO: 3458
  misc_feature (1)..( 3000): 2750-1469P.txt file - cDNA_ID_1820817; gDNA_ID_2926188; Annot_ID_200804

SEQ ID NO: 19151 - DNA, 3003 bp, Unknown
  misc_feature (1)..( 3003): 2750-1469P.txt file - cDNA_ID_1820835; gDNA_ID_1620647; Annot_ID_47626
tctccttctacgtgatttactgtgttcaaagctaattcgaatttggggatttttaatttctatttctagggtttcttaatcataagtaggaagattcttgagttgtgatcattaaagttgtgaacttttatcccctagttgtgcaatttgattactttatggttccaattatagtttgaagtgttcactaagttaattacttgctcaatgttatgttttaggtgttaatatctggtaaggaagaaccagaggcctacatgtcaccggcaatggacgcagtgttgagggtgtttagacgtgtttcagggttgcctgataatgatgatgatgatgttcaaaacgctggaagtgtcttctcttcagtgcgtttattagttgcttcaacgcaggcgattaatttgattggaaaacaaggatctttgattaagtctatagtagagaactctggtgcatcagttcgtattttatcagaaggtattatctatcatctgcagttttctgtttttacctaattgatctctttgtttgtgattgttaaagtttagtttttgctatttcaattcatgtctgtttttttttctaaaattggtgtctttgttgccagtttcttatttctctacttttttctgccagaggaaacaccgttttatgctgcacaggatgagaggatagtggatttgcaaggggaagctttaaagattcttaaagcattagaagccattgttggacaccttaggagatttttagttgaccatactgttgtccctctcttcgagaagcaagtaagcttgcttgtttcaatcgagattattcctttcccttttttttcttttctgaattattgttatcttttcttatcttcagtatctagctagggtctctcaaactcgccaggaagaaccgttagctgaaagcaagtcatctctgcatactatttcgtcaaatctaatggagcctgatttctccctcttagcacggagggaacctttgtttctggagcgcgattctcgggtggactcacgtgttcagccttcgggagtttctatctacagtcaggatcctgtactgtctgccagacactccccaggtcttgctcgggtttcttctgcttttgtgacacaggtagattcccttaaatacaacatcagctcctgaaaacgagtttagcgatatcatcttacttgttatgattagtcttccagcagtgattttgatcttaacacatctaacttgtttctctgaactagtagtgacgtttctataatggattctcttactaggtatctcaaacgatgcaaataccattctcctatgcagaggatattattggtgtagaaggagctaatatagcctatatccgtcgaagaagcggagctaccataaccattaaagagagtccgcatcctgatcaaatcacagtggaaatcaaaggcacaacttctcaagtacaaactgctgagcaactaattcaagtaagaacacattcgatctgtatatatatatatatactttctgcgacgtggcattgtataaacactaagattatgcttgctttgcatcctaccccgcctgcttcatcataaccgtattcttttgtttacgtgtgtgtaggagttcatcatcaatcacaaggaaccagtttcggtatcagggggatatgccagaatcgactctggatatgtacctgcatatcctcctcagctaagtaaccgtcaagagccgctcccgagcacctacatgggcacagagccggtgcagtacagaccaacagcatactctcagctggggggtccttctacctacacaccgaccctgactgggcaaacttatggttcggaatatagaccagcttctgatgttggtggctacagcagttataatctttgaattggttgctgtgtttaagtttatttgcagattaatttctctttagagaaaggctcatttataatataatagagagggaaaaggaacaagttctagagagccaatgtagttgttggaatgtgtaatgtaaatctaggtgccctttttttttttttttttcatacctcgatatatgtcacactacgtttctggtcaaataagaacatgttttttctttcttttttgtatgaatttgtttatcagaagtcagaatgattcagttttaagaaatttttagttaacgttttacaacaataacctgtaggagctttttcttaattgaataagtttaagctttctattttgatctgatgatgctaatatgaaagcattctccgaagaaccaaaccacatgagactttttgatttcaatgtccattcgtaactagtaacggaaaagatcagacagaaaaaatgtaccaatcattccatatttgtagttttacatgatatagtaatattctctaggtgtttaagttgtatatttcatgatttttacacattttaaaacctgattaaggcctgtttttaactttttatttcttcaaaccgtaagaaacaatccttgcaagaaacaatccttgcttcttcttctttttttcgtcaagaaacaatccttgctatattttcatttttacagcttcttgtttttaagagagcaaatataataaataaggacggctgaaaagaggtatatgtatcacaaaattaaacaaaagagaatccacctatcgacatagacgtggtatcctttcgatatcgacagaattatgttgaacgcagcaagttggccattaatcaaatctttgacgcgtggaatcattctattgtcaatgaaaacaaatattaaagaacaggtactacctatatacctaatagattcctctaacccgtcaaatgtcaatgtatcgaccgttacaattatgcacgtcttctaattgaaacattctctactttgccaatgtcttatccccaaaactacatataaatatgcatttacgggggcttagaatttcatcacaaaacttgcaagtatcattcacaggagagggaagggagagctcatcatacgaaatg

SEQ ID NO: 19152 - DNA, 3003 bp, Unknown; identical to SEQ ID NO: 19151
  misc_feature (1)..( 3003): 2750-1469P.txt file - cDNA_ID_1820835; gDNA_ID_2926188; Annot_ID_140887

SEQ ID NO: 19153 - DNA, 3000 bp, Unknown; identical to SEQ ID NO: 3462
  misc_feature (1)..( 3000): 2750-1469P.txt file - cDNA_ID_1820838; gDNA_ID_1620647; Annot_ID_47624

SEQ ID NO: 19154 - DNA, 3000 bp, Unknown; identical to SEQ ID NO: 3462
  misc_feature (1)..( 3000): 2750-1469P.txt file - cDNA_ID_1820838; gDNA_ID_2926188; Annot_ID_140885

SEQ ID NO: 19155 - DNA, 3003 bp, Unknown
  misc_feature (1)..( 3003): 2750-1469P.txt file - cDNA_ID_1820846; gDNA_ID_1620647; Annot_ID_47622
caaatgccccttttcgcgcttggcgtctcgcaagccttagtttcctattacagtggttgggatgagactcaaaaagagatcaagaagatcgctatcctcttctgctgcgcgtccgttatcactctaattgtctacaccattgagcatatctgctttggcactatgggcgagcgtctcactctccgtgtccgcgaaaatatgttcagaggttcgtctcaaactctcaatgcaagctttaaataaatgataaatttaaaattcttcagaaattagagatcccaatttttattatcatgtgatacttattctgtttttggtttaatagcaatcttgaagaatgaaatcgggtggtttgatgaggtggacaacacaagctcaatgttggcatcgcggcttgagagcgatgcaactttgcttaaaaccatagtggtcgataggtcaacgattctactgcagaacttaggtctagttgtgacctcttttatcatagcatttatactcaactggcgtctcactcttgtcgtcttggccacatacccattggttataagcggacatatcagcgaggtaattaacgcaccgttttgccacttttaaaaattttcctttatgtttatgtttacgtttgtgtttttgttgtatttgtagaaacttttcatgcaaggatatggaggagacttgaacaaagcatacttaaaggccaacatgttggccggtgagtctgttagcaacatccgcacggtcgctgccttctgtgctgaggaaaagattctagaactttattcaagagagcttttagaaccttccaaaagttctttcaggcgtggacaaattgcaggacttttctacggtgtctctcagttcttcattttctcttcctatggcctcgccctctggtatgtctctatgtatatagaagattgtaaattaataggcctagggttcagaccaataaagaataggcatagggattcaccggttttaaatattgaattgtcaattgtttgatttgataggtacggatcaactttgatggacaaaggattagcgggcttcaaatcagtgatgaaaacattcatggttttgattgtgacggcgttagcgatgggtgagacattggctctagctccggatctgctgaaaggaaaccagatggttgcgtccgtgtttgagatcttggaccggaaaactcagatcgttggagaaaccagcgaggagctgaacaatgtggaaggcacgattgagctcaaaggcgtccactttagctacccttcgagaccagatgttgtaattttccgggactttgatctgatagttcgtgccggaaagagcatggcgctcgttggacagagtggatctgggaaaagttctgttatttcactcattctccggttctatgacccgactgctggaaaagtcatgatagagggtgagtgcacttgacttagacctatgaacacaaaattcttgcgtttcaagaaataactaaggtttcttggatcaaaagacagtagttgtttagttgaaataaatttgtttttttccctcttacccaaattgcaggaaaagacatcaagaaactagatttgaaagcattgaggaaacacattggtcttgttcaacaagaaccagcacttttcgccacaacaatctacgagaacattttgtatggaaacgaaggagcatctcaatctgaagtcgtcgaatcagctatgctcgcaaatgctcacagcttcattacctctctcccagaaggttactctaccaaagtcggtgaacgtggagttcaaatgtcaggcgggcagagacagaggatcgctatcgctagagccattctcaagaatccagcaattctattacttgacgaagccacaagcgctttggacgttgaatctgagcgtgtggtaggtttctttaccattagactttgtaaaatttaatcacaatggactaatgagtatacaacgaatgaatattgttaggtacaacaagcattggatcggttaatggctaaccggacgactgtggtagttgctcacaggctatcgacgatcaagaacgctgacacgataagtgtattacacggaggtaagatcgtagagcaaggcagccaccgtaagctcgttctaaacaagagtggtccatattttaaacttatcagtcttcagcagcagcaacaaccttaaattaagtactatactttatttattgaaaaactctttttatttttatttttgtggaaaatattgatcatatactcatttgatgtgattatcttaatcttcttgatttaccgttggtaaaaaaaaagttacgaaatccaaaataggaaaatgttctgaaacgttggctatgtattttcacccaaatttggatttagttatttttgagcactgtctttatcgtcagcacgtttcactgcgacattctccaaaggaaatgatcaacaaaaggacaacttgattggtttcaggaatctccagagttcatcatgtcctactaaatgacaaaaccctttacaaaaagggagccatcaccacaaataattaaataaaaccaagtcaaattaaaactgtattaactatttcaccaacaccaagttgaagttttctaattactattttttttttttgtcaaacatcatctttaatatgttataaatcgtttgcataattttgttataatttgtttgtattatttggttataaaatctcccacctttttggttatttcacacatcttttacttatacaaaaatctttcctgattttaattaaataaagctaaaacactttagtaatacaagtaaaattaaaaacaaaacaaaaaaattcgggaaaagtatttggtgtgataaattccctctccagcttctcggtgacacagatattttgcttccaaataaaacgagtccggtcactggcgctcactgacttcgtcttcctccatctccgatccattggtttaacaagcgcgtgagggccagatagaccgagaatcatg

SEQ ID NO: 19156 - DNA, 3003 bp, Unknown; identical to SEQ ID NO: 19155
  misc_feature (1)..( 3003): 2750-1469P.txt file - cDNA_ID_1820846; gDNA_ID_2926188; Annot_ID_140883

SEQ ID NO: 19157 - DNA, 3003 bp, Unknown
  misc_feature (1)..( 3003): 2750-1469P.txt file - cDNA_ID_1820850; gDNA_ID_1620647; Annot_ID_47621
aaaatatatctcaaacatactatttatagaaaatcccaaccgattacaaagcagctgatcggtgtgtatttacaagtaatgtgtgatttttttttttgaaaaatcgtgaattaaaaggaatcccaacgtgtgaggtgtgactctaaagtctgaataaagttgacgatccataattttcttatgtttgccgtcgattgtgagaattgagaagcatatgtggtttctcttctaagagttaaaaataccgtgaaataaaagctatattaattcatatgttttatcatatatcttcgaatatcagcattagaccttattagccagctcaagtacgtcattttcactgatataaatgcaaattaataaccagatcgtgcccaaaacgaataaattattccatgcatgcagttgcatcattattttttggtatagtataaagttgcatcattatacttcgcattaattttccaccacgcattccctcctaaataaaaagaattaaaattgtcacatccatctatatcaacataagcaagaggttcgagttggaagataaaggagatttttttttcttttccatatttcatctatttggaatggtgctgtcaaaatatctatcaagataatttacaaaatatgatggtgaacaataggatgtggttgttttcggttatccttatagcgtcttgtcttcttagattcaaagcggtgataatagtcgcggccggagcggtggccataattgcgtttgatgcggcgatagtttggttaaaggtctcgttgatgtttgaatgccatactttgatgttattctttccttttagtttgttattttatgttcttgtacaaaaaagttattgaattgccaaagaaatcttttctatatctataagttcaatatcgaacttcagaatataaaaaagaaacaattgatatcaataacattcaaaataattgaaattaataaacagtgattctaatttagccatttacaagcaaacttaaaagataaaggtgatctagatatattttaaatagaaaatggaatcatataatgaattttttgaaagtttcaccatagataagttgttgaaaacacatggtgagttttttactcatcaatgtcgtatatatgacttaaaaaatactttcttatatccaaatataaagaaaaagcaattaggtatgtaacgatgaagcaagattaaattgaaattaaattgcaacaaataaaatttgatagaaaaaaaaaatagtttttaccaaaacgaaaaagcaagattaaaatatgtggaaaaaacgtcgaatcaggagaatatatgagatgactctcagacatcataacacatacatacgtagtaatatattaacaactgcgtcgaatcgtaagacttggtcacttcagtacatgactaagcatcattcgggaccagccaaaaaacatgtatgcttcaaaaccagaccccaccacattataagctcatctcagtcatcaccacaaccaacgcaaagaattcttcttcttcttcttcttgacttggcgttttttcttctaataattttaattttaattttattttcaacatattcaagtaattaataggatcgacttgttggaaattgtttaagttctacttgttgaatattgtcaatttatttggatcatgttatttaagttctacttgttccaaaaagatatgaaagctaattggaacagaaatttgtctagtttcttaaaaaaaattggaaaatattattttaacgtatattttttcagatatatttcaaaacataataaagaaatattttgatgatataaatttatttaggagatgtatacagtcttaagtttttcttacatgaatttgagataaatcttttcttcttgaactgattaaagagggtatcaatgtcttattgaatctcaatccagcggacatagatcaaaagtccaaagcaacaacatgtgaacgcgttttgatataaatacaatcattatccattaacacgaacttccttttttacatcatttttaacttcattgtaggggcgacgtgttgaagtcttgaataggggtggacattttttggtttatttttagagagtttggatttggtttcattttcccaaactagagtttaatagagttctgaccgaagttatttatttggtgcagatcagtttattagatcattcatcaatttcttattcattatttcatatttctaattttttttatgaaaattatcgatggaattggtttcccaaaattttgtattaactcgtattttcataattttctctttaacaggttatacaaatagtagttgtcaactttacgtaaattacatcaaattttaagtaataaattttaaaattctagatgttgttaacaatgacaaacaaatttatttagtgacagcatttttattcagttagtgtatacacttttgtttttgtcaaagactataaacttaaaacatttaaatatagataggagtagttgaatcatctttgtaagtttgactattacaaaactgagtcttaaaagacattttatattaaaagatacctcagataagcaaactcttttacacgaaaatagacacttgttcctttcaccatttattatccctcccttaccgtgagcaagctaacgagccgagaaaactacgcacgtaccaaattaatacttcaagtaactactaccatttaccaacataattcggtaaaaaaactaaacaaaaatccaaaatttgggagtgatcaaactttattaagagagttactaactagggtcacacacacatacatacatagagcttcacaccaaacaattctcgctgaaaccaataaacttggtcttatgtcttctttcatttaatgtatatctctctcatcttcttcctctctaaccactttcctcccttaatttctatccctatatttattttcctttcattttcctctccaactaattacacacacttgaagctgaaaaaaatg

SEQ ID NO: 19158 - DNA, 3003 bp, Unknown; identical to SEQ ID NO: 19157
  misc_feature (1)..( 3003): 2750-1469P.txt file - cDNA_ID_1820850; gDNA_ID_1620647; Annot_ID_163274

SEQ ID NO: 19159 - DNA, 3003 bp, Unknown; identical to SEQ ID NO: 19157
  misc_feature (1)..( 3003): 2750-1469P.txt file - cDNA_ID_1820850; gDNA_ID_1620628; Annot_ID_162582

SEQ ID NO: 19160 - DNA, 3003 bp, Unknown; identical to SEQ ID NO: 19157
  misc_feature (1)..( 3003): 2750-1469P.txt file - cDNA_ID_1820850; gDNA_ID_2926188; Annot_ID_140882

SEQ ID NO: 19161 - DNA, 3003 bp, Unknown; identical to SEQ ID NO: 19157
  misc_feature (1)..( 3003): 2750-1469P.txt file - cDNA_ID_1820850; gDNA_ID_2926188; Annot_ID_200791

SEQ ID NO: 19162 - DNA, 3000 bp, Unknown; identical to SEQ ID NO: 3147
  misc_feature (1)..( 3000): 2750-1469P.txt file - cDNA_ID_1820858; gDNA_ID_1620647; Annot_ID_47619

SEQ ID NO: 19163 - DNA, 3000 bp, Unknown; identical to SEQ ID NO: 3147
  misc_feature (1)..( 3000): 2750-1469P.txt file - cDNA_ID_1820858; gDNA_ID_2926188; Annot_ID_140880

SEQ ID NO: 19164 - DNA, 88 bp, Unknown
  misc_feature (1)..( 88): 2750-1469P.txt file - cDNA_ID_1820870; gDNA_ID_1620647; Annot_ID_47615
gaattccagtattgtttccgcaagtatgtgtttatagaaaaaaaaacttttctttgttgttgaagggtatagttttgttaatgaaatg

SEQ ID NO: 19165 - DNA, 3000 bp, Unknown; identical to SEQ ID NO: 3486
  misc_feature (1)..( 3000): 2750-1469P.txt file - cDNA_ID_1820873; gDNA_ID_1620648; Annot_ID_47680

SEQ ID NO: 19166 - DNA, 3000 bp, Unknown; identical to SEQ ID NO: 3486
  misc_feature (1)..( 3000): 2750-1469P.txt file - cDNA_ID_1820873; gDNA_ID_1620652; Annot_ID_47751

SEQ ID NO: 19167 - DNA, 3000 bp, Unknown
  misc_feature (1)..( 3000): 2750-1469P.txt file - cDNA_ID_1820873; gDNA_ID_2926215; Annot_ID_142164
catagcagtatttctgtggcaatcgcatccgctgtacccttttcttctatttctcaacagagatgaagatcacaacaggtgattcaatcccctctgtaatcgtttcctttgatgagattgtactaatcttttgtgtaaattgtcaagggcgacagaggcgctgcgttggtgggaagacggagagacggtgggaggaagagaccttgttggcggcgggacgtggctgggctgcacgaggcatggccgtctggctttcctcaccaatttcaaggaagcctcctccttccctgctgctaaatcccgtggagatctgcctcttcgttacttgcaggtctacaccaccacctaatatgctttagattgtctctcatgttagagactgagagtacttttaacgttttggtgagaacagagcgaaaagagtccggccgagtttgccgaggagatccaagacgaaatttcactctacaatggctttaacctggttgtcgctcatgtcttgtccaaatccatgatttacattaccaaccgaccaccccacggtgacaagctcgtgacgcaagtctctcccgggatccatgtcctttccaacgccaacctcgactccccttggcccaaggtaagtaaatgtgggccatttctccctttatttaccttttgcagactcccccaattgcgtgtttttgtctctgcagtgtctgaggctgagggagggtttccaacagcttctggctgagaacgggagcggtgaattcccggtgaagaccatggtggaggaggtgatgaccaatactgtcaaggacgaagaaaccgagctacctcacgttttcacaccagagacggaataccatctcagctccatcttcgtcgacatgcagagaccaactgtaaccttccttttttagagtacattgattgtttgtttaacactttccataaatattcagtctcactcatggagatacaggggcgttatgggaccagaagcatctctgcgatcatcgtcaagtcccatggagatggtggtggtgatggtgagatttgcttctacgagaggcatcttgaagaaggcgattcatggaaggaacacactcaacagtttgtaataatacaaaaccaaagcatttgattagctagccaggcttatttcgcgagcttcccttgcttgtaacattgagaaatcaaaactctcacatatgttgtacatgtaaacacaaaacagaagacagagctgatctcttttattccaaaccatcaaaatacaaatacaatcacagttactcttaaaaccacaaccaattccatatacataattgcacacaaggagagaaaaacctctccaatctctgacttcacggacgctcacactttgacagagaagatctcactcagggaactccaagttcccgacacagcaagaaccacacctagtaccacaatcgctgtgtctgaactccattgcagccaccccatctcttccttgaacaccaataaatgaaacaatgcaggtaacacaaagcctaacacacagcaagtgctgctgccaaccaatgacaaaaaatctgcaaagtttggcacaaaaagagccaccagagtcactgctaagacgagtacccatctgagccacgcagagtacatcccgcgtgagaaacgcctctccactatctcaaacactggattcatcatcaaggggaaggtgaagaagaggttgatgcacagtccaagctggacaacagtgctgacaagtcctgcccccaagttagcagtgataatgtccatggtgtcctcaccaaaagccaagtaacctaagataccaaatgcgatgtatatgagagagatgaatcccatgccgagagccaagactttgccaaacttgtccttgtccttcatctccgattcaagaggcaagaccattccaacgccttcgaaggaatagacagcgacgcccataccatacaagaagagggacataccaccaaaggcaaccacgtcaggcctttgcttgagtataatcatggaatcctcaacaatgaccacagccatagcgccaagatcaacaatatcggcgaagatgctgagaggagccaagtgagtgagcgtcttgatcgaattcaaaccgagctgaaagggaaagcatccccatatgtagagactcttagaagacacgcccaggaattcagaacccagccttgtaaactgatgcctcagactggtgggcgattcaggatcggatagattagctaaagtagtgccgatgaagataagatatccgacacaaaaaccagcttgagacagaatgataaataagtcaacgacgatcctccccaaggagccgcagacggcgaatccaaggtcaccaaaagagccgatcttggagatgccagcattgaaagagtcgagcttgcggcgggtatagacaagaagcatcatacagtgatgggtcaaaacagagacggagacgaggaggaggacacccatgagccatccggttcgcttgaaggcgtaaggaagaccaagaacaccagcgccgacgacagcgatgaagacgttggcgaaggtcttaaactggctggagaggggaggtcccttgccgagaagaggcgagtcctctctggccggtggaggtattttaagggtataagaggaggagctagcttcgttctgaaaacccatctgatgattttcgaccgaatctcagaaatcgaagaagatggggatggatattggcgaatggcgacagcaagataattggatgaattgcgtgtagagttggtggactctcttttttggtttgttgtcagagatttacagaggaagaagctcggctctatttatggatgaaatgaaatggtcatcttatcatttttactgggaaacggtaccgtttttgttataacgcacgacgccgtttcaaacaacttccttattagctagctccctcccggcggcaaacaccagaagatccaccggttttgatctggttgtttgtcgtcgataatg

SEQ ID NO: 19168 - DNA, 3003 bp, Unknown
  misc_feature (1)..( 3003): 2750-1469P.txt file - cDNA_ID_1820881; gDNA_ID_1620648; Annot_ID_47678
accaggcagcccaaaaactggattctacccatgggagcagcctcgaaggaagaagcagcagcgagatctcccctagtggttgcagtgctgaaggctctgagggaactgaaaagagattcattcaagaggtatgcaccgaatttcttcccattgttggtggagcttgtgcggagcgagcacagctcttcacaagtcccacaagtcttaagcacagtgttccatacatgtatgggtgcaatgatggatgaataatagggtggttataagtgggttttgacattcgagcacctgaaggatattgattaacaagcagacacaaatcactcttttcttcttttgttttttcttctcgacggagatgcgagatttacaggttttgtgctgttgattgatagtgctgatataaagtaattgattactgtttgtagaaactaagaaaagaatggtgagattaggagggtcattgcattttgtctgcaatgcctattttcttccttccagtcgtgatcaatgtgcataatatactctcacacagctaaatgcggtccaagtaaggattgtgaaggatatattatataaaaagaaaaaagaaaagagaagacaaagatgagccactcgtggaaagtcatttatacctccttgaaatgaagtgatgatatctaatgactccaaagtcataataaagtcaccgaaagtgaatcatgatttgaagaagataaaggagtcaggagtggaactgctttccttggtatgtcattccgaagcgccaatacggaggagccacatcataagaggcaatggttttgccgcctttgagagtaacctcgaaagagagagactgtccgatgagatcgagagaggagtgccagttctgtccccagtttctggccattgggatccaagccgttgtgtggcccttcactttcacaccaaccacttccccgtcgaggcccacattgcttatcaacacctggaaaaagtgggagctcccgctcaagctgaatctcaacccgcctctccgcccacacttgaccctcctatactgtataggtatcatctcagctctggtttctgcgatccctgtgaaggcggcatgagatagttccaagtgttcctttgggaagttgcaccaacctccgtaatcggaggagagtcccgaattgggaggacagaaatcggtggcggtgaccaccacggaggggctgccttgaagacaccaacggatgtggttcacgcaccgcacttctagacaagctccgcagctgcttcccctgttgaacagcttcccgctcaggcctgcgctgtagccggcaaagctgctctgcctcagatctccatacccacaagcgcctcctatcagaaccaattagtctagttagtcctgatgaaagaagaaagaaaaataggggggagagagagaaaagagaaccagtagcgacggaggaggagccgtctctgtctctagaaagcgtggctgtggctatcttccagtcatcttcggcagtggcttgaaagaggcggcagagaatgaagaagaggcacaatgcgagttgctgaagcccagaatccatgaacaagaagtgttgttgggatcctcacagtcagtcacaggtggcagacaaaagtgatgcgtttgagagagttttgggggttccttttgatcatcaggctccgcttttcaagacttgtggggatgcgacaaaagattgctctgacatgttttgactttgacagtccgtttcagaccaattataataaaaaaacaaaaaagggaacaactatacgttttccaggcccatctcattcggaggcccactttcaatacgacacagaatcaagacaagagacgcaagacgaacttcttgagcccttttgttaattcaatgggccctcactaagaagcccataataaaataaaataagttctattttcaaacattgtactattactttttgtaccggccgtgtttattcaattctcgtatttgtaagaatttataaacaaaaagcaatgattaaaacatttacaatgacattatgacaatgaattcgaatgtacttttcaagtcactcgtaaaagaatataaattttttaagagataacataagacttttaaatcgataagtgaataacatagagtttgtcattttaatacaaatcactgccgataattagactgaaatggaagaaaatcagacggagacaatgatgtccttaaggggaagaagagtgaaatgaggtagcggtttgaggtggatgagaacatgtgtatacgatgatgactcttgtttgatgggacaaccgtgagtcgacttatccagcgtcccatctctatagacaaacacattttcgtcctcttccatgcgacgccactttctgttgttatctttggcacgttgcagcggcattcccctgcatcatcaacattcattatccatctagatgtaaatgagaaagtgggcatatatccacgtgtgtacctgacatggaagagatcagagacatcaagaaagaaggtcagtgcgtcaataaaagcctggtaggtggtgatatggaggccgtcgatgtggggatagggcagcctgggcctggtggtggtggtggtgggagaagagaggaaaacgtactctttgaatcctcctcctgctccggtggcctgagcgacgaagcccatggtggacatgattggttcaagctcctcgtgcgtcataacaggcttgaaggttctcgtgtgccacaaggccagtttcctcatactgcactcctccatcatctctctcgagatccacaagtgagtgagtgtagggattatggttacaattagtttggtttttctttcttttgcccttgttatttcatttattcaccaaactgccattcctttctgccacgtggccttcttcatcccatttgtgagcaattcaatttagtaatccatttgctgctctgtagtggaagtagttgttgttgttgttgcagaagaatccgaatccaattcaatg

SEQ ID NO: 19169 - DNA, 3003 bp, Unknown; identical to SEQ ID NO: 19168
  misc_feature (1)..( 3003): 2750-1469P.txt file - cDNA_ID_1820881; gDNA_ID_2926215; Annot_ID_142162

SEQ ID NO: 19170 - DNA, 3003 bp, Unknown
  misc_feature (1)..( 3003): 2750-1469P.txt file - cDNA_ID_1820885; gDNA_ID_1620648; Annot_ID_47676
agatccgcaaagctagcagcttctgccatagcttcaaaggatagaagagctcctccatcatcagaaagatagcatgacaccttctccaccggataatcaacggccaatatggacagaatcgtgttggcggtgacaaggggcggctctttctctggatctgccgttgacacaaaaaggtcaatacctgggagatccgacctccctgttgggttggagggagaaggcatgtcaaatttgtcacgaagaacttccaggtcagtggaccggtttattggacacaacttagggatctggtctagaatccatgaaaatccaaaccaaagctcgcatattatagacatgagccataaccatattgcgtcttcgttaggatttcggatcctccaagttagaaaaaaacatagcacgacaaaacgaatgacgattagtaatctgtaaggactaatgatggcggctggaatagggattcgtcggctcagtggccgccatggcttgtcagctgtttccaccatgccgcctctcatcccttcatccatatcatcgccatacatttcgtcttgaggccaatacgcattaccgtacccatatgtgccttgcgtctcgaatagccatctgttgtgatcaaattcaccgttttggttcctcttcatcatagacatgttgttgttgttcccacgttgatctttccctggagctggtaaggggagagcaccactagaatagtcaggcgtatcgtcatctaggtccccgattttgtattgttccttgcatcctggacaaaggcctgtctctttctgggcgtccatgaagcaatccctacagatcttaaacctacaaagacaatcatcaccacgtttgttggttagttagaattaaacctcattttcttgtgcaacaagtaaaagatatcaattagtgtttattaatatataccggcattcacatggcatcacgtcctttcctctctcgtctttcatgacatttccgtcgcaagcaggcatggcacacgaagagcctttagcgccagccatctgagggtgtgtgacatctgaatcgatcactttgtccataagatgtgcacgtgttacactgttgaaaccaccagtaaataaagaatttgacacgtattgctcttcggctttggtggccatgggctgattgtccggcgtcggaggtatgtgcaccgtatagttagaataatccccggagagctcgcctgataattctatattatctcgagataaactcacatatcttccgctagatgttcgtcttgcaaatttgacggtttggccgctaccggaattgttacggacctttttagaagtttgaggaggcgtggacgccattgtgaagccaaacaaaggagcttggtttctgcaatgtgatcatgcagtataaagatgaaacgtgacttttttaccttcttgttgattttggcaaaacagagagaaagataaggaggagagaattatcaggacacaaaactgtttatgccatggattcctatttttgggcttctatgtatcatgcactaacctattttaggaagctcgagggttttgttgtttattctattttgggattttaacatattctttcttttaactcaaatgatttattctggaaccccattcttcgctcatacaagccgatggaaaatttcctacttttttagttaacgcacagtccatattttttttattattcaactactaactatagaaatgatccttatcgtttgattttttttttttttttttttggcaactattctcgttactaatttaaaatgtggattactgcataatttcatattgaataagattagatatccttaattcgtcttaacactacgcttgttttcaattttcaacttgtttgcttgttttttccaaatttagataattggacttagcttcaaaaccgatgatcttaatgtgaattaatcatctaccattacttaataaggaattgtgttaattagtattgtactatacttttactttggaatttgaagaacttaacccaattagactaatttcaaatacaatataaaggagctaacggttaaatggcagatttctaatactaatagttttggaaattgatatgtaagagctatattataaactaagaatgatgcatgatttactgatagctaaatggatggacttagtttttgtataaacacatacaaacattgtttagctacacaatattctactagcgtattactaattgacagtacaatagtgaaattgaagaagcatcaaaaatatacttgcaatacatagaaggttcagtgtaacaaaggggttatatttggggactagctagagagacggtgataaaattgttggacgtctgtttcagagtacacgggaatatcccaacgtccacaaacgcaaatatgttaagatctagctaggcttatgcatgtaaaactggcggtagaaaatcacgataacatatctcgtaggcttgaccagatcaagaagcaccatccaaaactcgtctgatgatcccatgctgtctagtgaggttgaacagacaatattgggaagtatacataagagaagctgactcgtgaggttgaatagataaagtgtaacgtactagtgtttttttgttgttgttgtaatagtactgttgatggattttgataacgttcgttaaattatgtttatggatttactagttggaaacgagttatttttatatggaatcaaagaacatcttgttaacgatgttaaaaaccacttaaatattttttgttaactttaaaacggtgaatttaaacgataacattatgttaaattgagatttaaatgattttttttcctatgggctattaaattataattaatcaaatacaaaacgctgaaaggtaagaattaagaatgaaagaaacgcagcgtttcgtttcgacaaagtccccgggttctgggttggccttttatcattttgaatcgccgtgagaagtcgaatatgcgttagatg

SEQ ID NO: 19171 - DNA, 3003 bp, Unknown; identical to SEQ ID NO: 19170
  misc_feature (1)..( 3003): 2750-1469P.txt file - cDNA_ID_1820885; gDNA_ID_1620648; Annot_ID_163353

SEQ ID NO: 19172 - DNA, 3003 bp, Unknown; identical to SEQ ID NO: 19170
  misc_feature (1)..( 3003): 2750-1469P.txt file - cDNA_ID_1820885; gDNA_ID_2926215; Annot_ID_142160

SEQ ID NO: 19173 - DNA, 3000 bp, Unknown; identical to SEQ ID NO: 3491
  misc_feature (1)..( 3000): 2750-1469P.txt file - cDNA_ID_1820889; gDNA_ID_1620648; Annot_ID_47675

SEQ ID NO: 19174 - DNA, 3000 bp, Unknown; identical to SEQ ID NO: 3491
  misc_feature (1)..( 3000): 2750-1469P.txt file - cDNA_ID_1820889; gDNA_ID_1620648; Annot_ID_163352

SEQ ID NO: 19175 - DNA, 3000 bp, Unknown; identical to SEQ ID NO: 3491
  misc_feature (1)..( 3000): 2750-1469P.txt file - cDNA_ID_1820889; gDNA_ID_2926215; Annot_ID_142159

SEQ ID NO: 19176 - DNA, 3000 bp, Unknown; identical to SEQ ID NO: 3491
  misc_feature (1)..( 3000): 2750-1469P.txt file - cDNA_ID_1820889; gDNA_ID_2926215; Annot_ID_202894

SEQ ID NO: 19177 - DNA, 3000 bp, Unknown; identical to SEQ ID NO: 3492
  misc_feature (1)..( 3000): 2750-1469P.txt file - cDNA_ID_1820909; gDNA_ID_1620648; Annot_ID_47669

SEQ ID NO: 19178 - DNA, 3000 bp, Unknown; identical to SEQ ID NO: 3492
  misc_feature (1)..( 3000): 2750-1469P.txt file - cDNA_ID_1820909; gDNA_ID_1620648; Annot_ID_163346

SEQ ID NO: 19179 - DNA, 3000 bp, Unknown; identical to SEQ ID NO: 3492
  misc_feature (1)..( 3000): 2750-1469P.txt file - cDNA_ID_1820909; gDNA_ID_2926215; Annot_ID_142153

SEQ ID NO: 19180 - DNA, 3000 bp, Unknown; identical to SEQ ID NO: 3492
  misc_feature (1)..( 3000): 2750-1469P.txt file - cDNA_ID_1820909; gDNA_ID_2926215; Annot_ID_202888

SEQ ID NO: 19181 - DNA, 3003 bp, Unknown
  misc_feature (1)..( 3003): 2750-1469P.txt file - cDNA_ID_1820933; gDNA_ID_1620648; Annot_ID_47660
tcgtacggccaggctttgacttctttttcggactgaaaattgatataactaaaattaatgacttatctttgtaaattactttaaattaataaagtaaaagacaattaaaaaaataacctgttgtttagcatcttcccataacaaatcttgaggcttattgttgctggtagaatcagagtttaagtaaataaaaacaggtcccaagacctttttccacgcttcaccaggtctgtaatgtgcctccatgtccgcaccaacataatgtccgcttataaaagtctgcatatgcaaatcagttaagtaacgaaaacattaatactactatatatagtaccaaaaatgtaatctatgcttaatagctttggacgatgtctttaccgtgatggccgtgggtccgacgtgagacgtgagctcttgtttgatcggtccaccggagcgatattcaccgcttggtgagatgatccaaaagccgacacgggacttggttgagatccaaccgtgcactttgttgtctttgatctcacatgtgtactggtacttatcatccacctaatatatatcattcaaattaacgatcaaaattcgagacttcggatgcaagaacaattaaatattgcatccaaaaccgtatgcaaaagactaggtacctggtttttgaacatggagttatgaggatgagtcaattgtacagcctctttataaccaagagccttggcatgaccacgtttgatgtcacggtcatcttccgttggcatttctctttgtcgattatccgccaccgccatgtaatgaaatctacaaacatattttgtgatagtttagataaactcttttttttttttttataaaaacaaataattaacaaaacattggaatcgtataagatacctctcagggttgagtttgaaagcgattcgaattaaacccatgtcgagttctggccattcgggaagtctctcgaagattccgtacatgtagattcctgaagtatttctacgtatgatatacctcttgtctacgtttaatggaatatgaccatcctcccatgttctagagaacgatatctccacttgttcttgggtttgagtgatgattctaaaatttgttccttcgattctgaaccgaaaaataaatatgagtttataaattagaaaagattcattaaaattataaaccctaagataagttagatacttgctctataaatgtgaacgtgtgtatgttttattaaataatttaaactgacaaatcagacgaagtattaagtaactaacctagtttaattaccgatctaagccgccttggcgaatgtttgttccttgccatgttatgtcccagtacctacataaaatcaaagtaataaatcaggacaattttatgtacttacattacataagctttttgagaaataataattgattactacaatattagtttactgaaaattactcaccctctatctcggagatgtggatgaagaacattatcaattcctttgtatttgatcccagttataagtccttgaggattcgagaaactgactctgattatcccattgtccactatcacctgaaaattattagttttatatgtacgttagaatgtataatcatccgattattgattaaaaaatactattgaattatcattaaccctatatacctctctagtcccatgatgtctgcttcttatctgctgcactgttggagctcttgcacttattccatctaagttcctgtacaattttaataattacgcataaataaagccaatgcattgaatactgaaaacgcacacttataattaaattaattgtaaggcaaagagagggagttgaagtttgtttctaaaaaacaagatcgattgttacaagttaattaatacacacgttatgatcctaaaaacaaacttcttaattttatatgcatcaagaagttttttttcccttgttgataatcaaaaattttatgtcaaaatctagaattacttcaaactcatacgagagtcatcacaattgctagctaaaaacaccaatgaaatatgtatgagaatcgagaaacatgtgaattttgtgcacatacaacgtatatgtggatatgtgtttcatcgcaacttgtgaagaaaaaaagaaaaaaaaaactgaccttgtcggcttggaaaaggagagtggaagaagaagcaacagaaggaaacaaataaataacgaagcgatcttcttctgcgataccatcttttcttccagaaactcgagatttgaaataattaatgtttaagaataagatctttgcttctatgcatatattttatatgcgtgtgtgttgttaaacaaagtccaagactaaacgggaatagtaggtgcaccaaaacctaactaggagttactttgacttgtgaatgctgacattattagaacattagacttctaatatgacttagattcatagaagataatacgtaaaagatttagtttctggtatttttccatttttttttttgtgtatttccttttttttgtttaatagaagtaataaagaatacggaggataataatgacaatattcctgatgagaaagttgataattttctaaaagtttcacaaatcttgagcatgtatatattgtgaagtgttgtgttcattgtaacgtcggattgattgcatgaattaaatgaatatgacaaactatttgagaatgtaaataatgttttcttgtcctacgtatgacattatatcatctatacatgaatgacgtccatggcggttatatttgaataattgaaaaatacatgattttgcttcaaaaatagattgacctaagtccatgattttgctttaattaagagttaagacaaacaaaaactacaatctaaataaataatgataaaaaataataatataaaaatatttttagtaaattaatcaaaaaaaaaagagagcatgtgagctcacacataagacagcaaaaagagctaaatgcagagagcttcagatccgaccaaacaatg

SEQ ID NO: 19182 - DNA, 3003 bp, Unknown; identical to SEQ ID NO: 19181
  misc_feature (1)..( 3003): 2750-1469P.txt file - cDNA_ID_1820933; gDNA_ID_1620648; Annot_ID_163336

SEQ ID NO: 19183 - DNA, 3003 bp, Unknown; identical to SEQ ID NO: 19181
  misc_feature (1)..( 3003): 2750-1469P.txt file - cDNA_ID_1820933; gDNA_ID_2926214; Annot_ID_142144

SEQ ID NO: 19184 - DNA, 3003 bp, Unknown; identical to SEQ ID NO: 19181
  misc_feature (1)..( 3003): 2750-1469P.txt file - cDNA_ID_1820933; gDNA_ID_2926214; Annot_ID_202861

SEQ ID NO: 19185 - DNA, 3003 bp, Unknown
  misc_feature (1)..( 3003): 2750-1469P.txt file - cDNA_ID_1820951; gDNA_ID_1620648; Annot_ID_47655
gtccctgggtaacacaaattttctttactcaacaaataacattatttcatattaaaataaactataaatgctagcaaacgtgattgttactatttcaaataatatcaacctatatctaagattttcttgcatattttaccggatgagacatgttaattcataccattgttattgtaaaatcaaacaatggattgcacaaaaaaaaaaaaaaaaggctctaatgatgacatttaatcggaattaaattgtttcaggcatgagattgtgggcgtggtgactgaagttggagccaaagtgaaaaaattcaacgctggagacaaagtcggagttggctatatggccggctcgtgcaggtcatgtgacagctgcaatgatggcgacgagaactactgtccaaagatgatcttaacgtccggagccaaaaactttgacgataccatgacccatggtggatactccgaccacatggtgtgtgctgaggatttcatcatccgtattcctgacaatctcccattagacggtgccgcaccactactctgcgccggggtcacggtctactcccccatgaagtatcacgggctcgacaagcccggtatgcacatcggtgtggtgggactaggcggtttgggccatgtagcagtgaaatttgctaaggctatgggtactaaagttacggttattagtacttcggagcgtaagagagacgaggccgttactcggcttggtgcggatgccttcttggtgagccgtgacccgaaacaaatgaaggatgcaatggggactatggatggtatcattgataccgtatctgcgacccatccacttcttccgctgcttggtttgcttaaaaataagggaaaacttgttatggttggtgcaccagcagaaccgctcgagcttcctgtttttcctctcatctttggtatgaacctatttgtcagtcatctttaaacattatcaacaatatagccaccaaatttgcggttatagtaacaaatccgtatacttttccattgataattaaatctagtgattattttgtcacaaatctaatcatatttgaagagtaaagccactaaacgttgagaatatggtcttcttctttttgtgtgtgtgtggttgtatacataaagggcggaagatggtggtgggtagtatggtaggaggtataaaggagacgcaagagatggtggatttggctggaaaacacaacatcacggcggatattgagctcatctctgcggattatgtcaacaccgccatggaacggcttgcaaaggctgacgttaagtaccgatttgtgattgatgttgccaacacgatgaagccaactccttaactagaaagcttaagaattgaatatccccaaagcttttttcatgtttttgcttgtttgtttgatgttgtttgctggcgactttgtgtgtagtattaccacactgcatgtactttatcagttgaataaacttgaatattgtatttaataagctatctacattagattttggggaagtttgattaaaatttattccgattgaagattttagttggcgatattgtaagattacaaacatattaaggttgaaatgtgatgggttcgaatgatagaaacagttttgtttgaccgacacgagaaagtaatgagaacacactgatttaaattgatgactagaaactaccaagatatttattggtcagatttcgtaggactaatcaaatcaaaaactacttcttttgagacaaagtgcatgtatcttagaaaattttcaatgattccgatctttaattagcaatgtaaacacatttttactatggaatatgttacgtggacggaactgaattgagtttccgaatggaaaaatatggaccacgtgaacagatacatatatggttgagttgagcaaagttcaaaatggtccgtacacactgactaattgtcagtattctaacaacgttaatttcgtggtgcacgaaaacaaaatgacgatgtggttgcacaaggtccacgttcttgtatattgttttttaatgtgctaattgtgcgctaaaataaatttaattgtataaaattagtatagtttatatttttttaatatgtatatgttcattcaaaacatttggataatatatgtttactatgtgatagactgatggtggaacattttatccatcttatatgcatatgaataaaaattattcaaaatgtttgttgttgttcagattattaattattaaagaattagaaaattttggaattacaggtatatatgtatgtgttgtatattgtatatttaaattattatgtatatttatatttaaatttttctattttcataaatcgttagtatataattgtgtcacatctaatattattagaagacaagttggacttttcataataaaataaaacatatcttttatcaaattaaccttttcctttaggtgcccaaatccgtagcaccatcaaatacctaagatatactttttatttccaaaaatcctttcgtttgatctaatattaataatataaacgatcaaacaaaacgatttttagaaatcaaacgttcaagtttgatcgttggtcgtcgctaatttaagtttgatcgactgctcatgttccgtgacaatgttaaaactgaatacatgaaacatgttttttttttgtgcatttgattttaataattttttaaaaactgataacacccgaaaaaaacagcaagaaactaaacaaggaagaaaagaacggtcggtgaggaactctcgtgaaagtcttcaaaagacttttaacggaaaaacaaaaaacaaaaaacaaaaactcttgtgaacgtaagtgcatggaccgaattgcacccgatcacgtcggttccacaatcctctcctatattaaggccttcactgctccttatcatctcaaacttctcatttattaataagtgtcattcaaaagaataaaatcaaatacttacttttgaatccgtttttttcattgtttgatcgattatg

SEQ ID NO: 19186 - DNA, 3003 bp, Unknown; identical to SEQ ID NO: 19185
  misc_feature (1)..( 3003): 2750-1469P.txt file - cDNA_ID_1820951; gDNA_ID_1620648; Annot_ID_163331

SEQ ID NO: 19187 - DNA, 3003 bp, Unknown; identical to SEQ ID NO: 19185
  misc_feature (1)..( 3003): 2750-1469P.txt file - cDNA_ID_1820951; gDNA_ID_2926214; Annot_ID_142139

SEQ ID NO: 19188 - DNA, 3003 bp, Unknown; identical to SEQ ID NO: 19185
  misc_feature (1)..( 3003): 2750-1469P.txt file - cDNA_ID_1820951; gDNA_ID_2926214; Annot_ID_202856

SEQ ID NO: 19189 - DNA, 3000 bp, Unknown; identical to SEQ ID NO: 3501
  misc_feature (1)..( 3000): 2750-1469P.txt file - cDNA_ID_1820967; gDNA_ID_1620648; Annot_ID_47650

SEQ ID NO: 19190 - DNA, 3000 bp, Unknown; identical to SEQ ID NO: 3478
  misc_feature (1)..( 3000): 2750-1469P.txt file - cDNA_ID_1820967; gDNA_ID_1620648; Annot_ID_163325

SEQ ID NO: 19191 - DNA, 3000 bp, Unknown; identical to SEQ ID NO: 3501
  misc_feature (1)..( 3000): 2750-1469P.txt file - cDNA_ID_1820967; gDNA_ID_2926214; Annot_ID_142134

SEQ ID NO: 19192 - DNA, 3000 bp, Unknown; identical to SEQ ID NO: 3478
  misc_feature (1)..( 3000): 2750-1469P.txt file - cDNA_ID_1820967; gDNA_ID_2926214; Annot_ID_202851

SEQ ID NO: 19193 - DNA, 3000 bp, Unknown; identical to SEQ ID NO: 3474
  misc_feature (1)..( 3000): 2750-1469P.txt file - cDNA_ID_1820971; gDNA_ID_1620648; Annot_ID_47647

SEQ ID NO: 19194 - DNA, 3000 bp, Unknown; identical to SEQ ID NO: 3474
  misc_feature (1)..( 3000): 2750-1469P.txt file - cDNA_ID_1820971; gDNA_ID_1620648; Annot_ID_163320

SEQ ID NO: 19195 - DNA, 3000 bp, Unknown; identical to SEQ ID NO: 3474
  misc_feature (1)..( 3000): 2750-1469P.txt file - cDNA_ID_1820971; gDNA_ID_2926214; Annot_ID_142131

SEQ ID NO: 19196 - DNA, 3000 bp, Unknown; identical to SEQ ID NO: 3474
  misc_feature (1)..( 3000): 2750-1469P.txt file - cDNA_ID_1820971; gDNA_ID_2926214; Annot_ID_202846

SEQ ID NO: 19197 - DNA, 3000 bp, Unknown; identical to SEQ ID NO: 3473
  misc_feature (1)..( 3000): 2750-1469P.txt file - cDNA_ID_1820975; gDNA_ID_1620648; Annot_ID_47646

SEQ ID NO: 19198 - DNA, 3000 bp, Unknown; identical to SEQ ID NO: 3473
  misc_feature (1)..( 3000): 2750-1469P.txt file - cDNA_ID_1820975; gDNA_ID_2926214; Annot_ID_142130

SEQ ID NO: 19199 - DNA, 3000 bp, Unknown; identical to SEQ ID NO: 3472
  misc_feature (1)..( 3000): 2750-1469P.txt file - cDNA_ID_1820979; gDNA_ID_1620648; Annot_ID_47645

SEQ ID NO: 19200 - DNA, 3000 bp, Unknown; identical to SEQ ID NO: 3472
  misc_feature (1)..( 3000): 2750-1469P.txt file - cDNA_ID_1820979; gDNA_ID_2926214; Annot_ID_142129

SEQ ID NO: 19201 - DNA, 2053 bp, Unknown; identical to SEQ ID NO: 3529
  misc_feature (1)..( 2053): 2750-1469P.txt file - cDNA_ID_1820987; gDNA_ID_1620649; Annot_ID_47707

SEQ ID NO: 19202 - DNA, 3000 bp, Unknown; identical to SEQ ID NO: 4827
  misc_feature (1)..( 3000): 2750-1469P.txt file - cDNA_ID_1820987; gDNA_ID_1620734; Annot_ID_166195

SEQ ID NO: 19203 - DNA, 2053 bp, Unknown; identical to SEQ ID NO: 3529
  misc_feature (1)..( 2053): 2750-1469P.txt file - cDNA_ID_1820987; gDNA_ID_1620649; Annot_ID_163413

SEQ ID NO: 19204 - DNA, 3000 bp, Unknown
  misc_feature (1)..( 3000): 2750-1469P.txt file - cDNA_ID_1820987; gDNA_ID_2926215; Annot_ID_142210
tgatgacataccaattaccaaatcaaataaatgtttcagagaagactgaatctcatatttatatgcagccagcagggacgcatatgcctttaattacgatttcagaataaaataattgtgagggaagccaatacgtgtgaaagccaaaaatgaaaatagtatagctgctgtgatttatttgcttgctaacacaaatttcattttttggaagatttcacgtttgtgtactcagttttcgtagaatataaaaaactcatcttacaactataaataaacaaggattaaagatttgattaacaacagaaatgaagaagcggacggatggctactggctaatataagaaggtggtccgcgaagcagcagatttatattatattttaatagtttccgacaaaagacgacgaaatctctcatgagctgtcgtctctggagaggaggaatgggggctttctctttctctctctctctctccccccatttgaattatttcaccacgactccaaaaatcctgcgattctcattccttcttcctgtttccgtagcggggattttgtgatcatcaatatcaaaaacaatcagatttcttctaccaaacgattaattgccttttgggatacgattcagggcttcttttggggcctctgtttgatttaacaccttgtttgctgcaaaccaagatagcaaaggaaacgatggtgtcggacaatgagatgggtctggtattagctgtgtcgtcgagcgtcttcataggttccagcttcattttgaagaagaaaggtctcaagcgcgctgctgctaatggcacccgcgctggttcgtttccccgcttgctttttttttagaatccaattccatgctcctaaatttactttctgctttaattattagatagatattgaacaacccatctgctcgatcagggtttagctgtctgaattggaagaattcattttctatagacattgaaatgaatccatgttgacacattttcttaatagcagatgatccatcagcaatagatttcttatccactatgttttgtttcaccttttggttctgtgcctttctgctatcatttgtttgagaatatttgcatgtcaagaaatgggagtatgacttgcttgatgaatggtgcaggtttcggaggttatacatatttgttagagccactttggtgggtaggcttggtaacaagtgagttcaaaaaaaccatcttttattttccatatgactcttcccatcttaaaaaccatcgttctaaatgtgagattttgtaactcagtgacttttggagaaattgctaactttgtggcttacgtttatgcacctgctgtactagtcactcctcttggcgcattaagtataatcatcaggtttgtactgtattggcatctttttgagtggtatttcaccttttctctgactaaccttttcatcttttgccctgattgctccctcctagtgctgttttggcacatttcttgttagacgaaaaacttaggaaaatgggagtttggggatgtgtttgttgcattgtgggctcagttatgatcgtcatacacgcacctcaggagcagactcccaattctgtagaagaaatctggaaactagcaatgcaaccaggttttgctttttctacctctctctctctctgtgtttatgttactgatatagacaataacgtatatcccttctcttttttgtgtgagacagcttttctaatttacgtagccatatcaatgtcgatagtccttgctttgattctctactgtgaacctctctgcggccaaaccaacattcttgtgtatatcggaatttgttcattgatgggttctctcacagtaagcatctcggaatttagtgctgagctctatatcttttcccattttttgttctctaaaggttttaatttcaaataggttatgagcatcaaggctgtagggattgccataaagttaacatttgaagggataaaccagatctggtatccagagacttggttttttgccatggttgcagcaatctgtgttgttatgcaaatgatttacctcaacaaggtaagaagaacctgtgcatgtgtctgtgtgatgtagtgttgagcacactttggccaatggttaatagtagtcatatgttttgttttgtcaggcgctggacacattcaacgcagcaattgtttctccaatctattatgtgatgttcacaacactcacaattgtcgctagtgcaatcatgttcaaggtagagagatttcaacaaacattaaagagtaatgatcctcgtgtttcaagattgtcaaatgaatcacctttttcttaacaggactggaatgggcaaaacacagacagcatagcctctgagatttgtggattcatcacagtgcttacaggaacggttatactccattccacgagagaagaggaacaagcttcgccacgacgaatgagatggcaggattcagggaagagctttgacgaagaacatttgacaagtttgtacagtcctgaatattaggaaggtaacaaagatttaaaccttgtgctgaacggaaggatgttgggatccgaatcagaagatcatctaattaatctcttagtggggaaaagaatgtaaactagctttctgtatatacttgatagttttgtaacagtcttttgtatacaaatttgtccactgtttgttcatattcatttctttttgagctcttaggacagatttgttaccatatatagatcatataacattgactattattattttgatccaacaacactgtttccttctccttgtaggtgaaggaatggaaaatatactaaataataaaaccctattgatatgatgaattcataaccgtccgatcaaaacccaaaaagatctaactataaaaaggaaatcgagattcggtgagccattcattgtttttgattcacacgaagagaagagaagaagaagaagaagaagcagaagaagagaagaagagaagaagaatccaatcaatg

SEQ ID NO: 19205 - DNA, 3000 bp, Unknown; identical to SEQ ID NO: 19204
  misc_feature (1)..( 3000): 2750-1469P.txt file - cDNA_ID_1820987; gDNA_ID_2926215; Annot_ID_202950

SEQ ID NO: 19206 - DNA, 3000 bp, Unknown; identical to SEQ ID NO: 3527
  misc_feature (1)..( 3000): 2750-1469P.txt file - cDNA_ID_1821006; gDNA_ID_1620649; Annot_ID_47697

SEQ ID NO: 19207 - DNA, 3000 bp, Unknown; identical to SEQ ID NO: 3527
  misc_feature (1)..( 3000): 2750-1469P.txt file - cDNA_ID_1821006; gDNA_ID_2926215; Annot_ID_142200

SEQ ID NO: 19208 - DNA, 3000 bp, Unknown; identical to SEQ ID NO: 3526
  misc_feature (1)..( 3000): 2750-1469P.txt file - cDNA_ID_1821010; gDNA_ID_1620649; Annot_ID_47696

SEQ ID NO: 19209 - DNA, 3000 bp, Unknown; identical to SEQ ID NO: 3526
  misc_feature (1)..( 3000): 2750-1469P.txt file - cDNA_ID_1821010; gDNA_ID_2926215; Annot_ID_142199

SEQ ID NO: 19210 - DNA, 3003 bp, Unknown
  misc_feature (1)..( 3003): 2750-1469P.txt file - cDNA_ID_1821022; gDNA_ID_1620649; Annot_ID_47691
tacgtttcgttgaatctcgttttctttccgaaataagccacacagtgtgtatctctgtttgcacgtttataaatttataatgtacaattatttgcgccctagctagaacgggataaagtgtgacaacatataaatactattaaagattcgatatttgatgactgtagccgcctgcctagaacggggtgccttgtttgacttgccaacttcaaccacatttctttttgtttacttgaaagttaaaaataaatactagagaggaagaaaaacagagctttctttctaagatcatcaacgcaccatggaagaagaaggcagcccagatatcatcatcgttggcgccggtatctccggcctttccaccgctgttggactacacaggtgtgtgtggcgtgccttttgagttgttattaagcagagtaagttaactaaagtggtgtgtgtcacaggcttgggatcagaagcatggtgctggaatcttcggagacactgagagcgacaggatttgcatttaccacttggttcaatgcttggaaggccatggaagctctcggcgtttctcagcatattcgcagtctccatgatcgccttgaagggtatcaaactaacactattattactattcatatataatcagctcagtaaaaaaggggactcatctttgattttgctgcagatgggtggttggaacaatttctgcaggaactcctcccacagagatgctgtttccagaatccgagtatgtttcttcttctctgcacagagcatatgaatgttaaaacaataaataagataacttcaataatattgttgaatgattttgtcagagaatatgagtctcgatgcgtacagaggaagctgttgttagaggctctagcaggtgagttgcctgaagagaccatcaggttttcgtctaaggttgttcatattgaattgtctggatgctacaagaaggttcatctctccgacgggaccattctcaaaaccaaggtaaataactacttgtcctctgtaaaccatgtgaggcctggtcttgctacggaattgtagggtttctaaacgaaatgcaggttttggtagggtgcgatggagtgtactcagtggttggtaagtggctaggcttcaaaaatcccgctacaactgcccggttagcaatccgagggctcacacattttccggaaggccatggatttgggaaaaggttcttccagttttatggagacggcgttcgttccggttttatcccatgtgaccacaacactgtctactggttcctaacccacacctccactgatataggtgaagatatgcaactttacctgatatctaatatctaactacaagcagcttcttgttcatatcatactactgtctttgactcttctccttgcgcttgttagatgaggagacaaattcggaaatcctcaaagagtttgtgctgaacaagatcaaagacttgcctgaaaacattaagaatgtggtggagaccactgatcttgatagcatggtgatgtctcaactgaagtaccgacctccatgggaactgctatggtcaaacatcacaaaagacaacgtgtgcgttgcaggagatgcacttcacccaatgactcctgatatcggacaaggaggttgctcagccatggaggatggagttatccttgctcgttgtctaggtgaagcgataaaggcaaagagtctgaaaggtgaaacagaagaaaatgaagaagagggttataagaggattgaagaaggtttgaagaagtatgcaggagaaaggaaatggagaagcattgatcttataacaacggcatatacagtaggattcatacagcagagcagagggaagtggatgaacatgttcagagacaggttcctgtcgtcttacctttctaggatgctgctgaaaaagtcccatttcgattgcggaagccttgtcccatgatgattctcaaacataagtcaaaagcttgtgattcttcttgtcatcaccaactgcagaacagttttcacctttggtttgcttcaaagactatctatctgtttagtgttatttcatataacaaactcagaattaataaagtaagtttgtgtagtgaacaagaagctcttttattttttacggcaatctaaagctctgatatcaacaagtgatgaatgagaaaagaaaatgactacttcaattgaaccatagcagaagttatgtttattacattataacgtatgcgagcctcgttcaaacaggaatggattcagaaagaaaaagaaaaggaacctgaaggctgaggagagatttgagtgttaggaaagagagaagaggcaaggtgacaaaagttcccactggatcgaatcgcatcagcggcaaccccggtggccggcgatggcgagcagcgatgaagacgcatgtgatcatctgggcggggctgggtttttaaggaatttctcctctatttgggcctttcttttttctattttaaggcccattttgtgactgcttatgggcccatttgaatacaggagaaaggtcgccactattgaccaagtcatggttgctgccacttgattgataaagaaaaacgaaaacaaacaattatgtgatttagatctgagtctgaccaatattgttatatctttaggaatttgtttgtttgtaataatttataagtcaatagtcaaatgaatggttatcgtagacttttccaattgccattttcttgtttataaaaatatccataatacacagacttaaaggggcctctgactccattatatctatcgaatcatatataccagtcgtagtatgacgcgttgaagaacagaaacgaaacgaaccaaaaagtcttctccggcaactttagatcctccagcagcaaggtactcactcttatgaattcctaacatatgtataattactatacaaccaaggtactaatttgcatgccttcttatgttccggtctaaccacagatcatttctcaatcccatcctttgcctcaacccaatatg

SEQ ID NO: 19211 - DNA, 3003 bp, Unknown; identical to SEQ ID NO: 19210
  misc_feature (1)..( 3003): 2750-1469P.txt file - cDNA_ID_1821022; gDNA_ID_2926215; Annot_ID_142194

SEQ ID NO: 19212 - DNA, 3003 bp, Unknown
  misc_feature (1)..( 3003): 2750-1469P.txt file - cDNA_ID_1821026; gDNA_ID_1620649; Annot_ID_47690
tgaacctatttcacatatgactcatgggaaagaccgacaaagggatcgtattacccaaatatggttacgataacatccactgaatatcactcaaaatgaattattgtctcttactagatatattacggctagttgatgatttgtttgaaaagtttaatcttacaaaattattaatagatttgatgctgctcaaagtggtctcttttatttgcaccgcaaaaagccagtatatatccccattagaaaagacgtgacaaagtgtttaatagatcctttatgttttcctcggacccatgcatatataagtgtatttaaatcttttataaggtttttatagccataaataaacaaatttagttcaaaataagaataattaagtaattggaatagcgagacacgttccttgagatgataacacgagcatatattcttcatcacttttgtttgcttcatatcatatacgctaacttatgtgtgtgtgtaatatatgatctcagaactaacaagtaagaagaagaagaatgtcggagagtttcaaagtgtgcttctgttgcagcagaagctttaaggagaaaacgaggcagccaccagtgagcatcaagagactcttcgaagcttactcaagaaacggcaagatgtctttcgatgagcttctaagatttgtgagtgaagtccaaggagaacggcacgcagggttggactacgtgcaagatatcttccacagcgttaaacaccacaacgtttttcatcaccatggacttgttcatctcaacgccttctatcgctacctcttcagcgataccaactctcctcttcccatgtctggccaggtatctaagtttggaaactttttatggatttatttcacaaatggttttgtaattgggtatattatatgttcttggttgggttaaggtgcatcatgacatgaaggcgccgttatcgcattactttgtgtacacgggacataactcttacttgactgggaaccaagtgaacagcagaagcagcgtagaaccgatcgtgcaggctctcagaaaaggcgtaaaagtgatcgagctcgacttatggcctaatccttcagggaacgctgctgaagttcgtcatggcaggttggtcccactaacgaagtcttataatcaacaaacagactccaaaaaatgtcacacactatatgtgttttggttctctcatcaggacgcttacttcgcatgaagatttgcagaaatgtctaaccgccattaaggataacgcgtttcatgtgtctgactatccagtcatcatcactctcgaagatcatttgccacccaagcttcaagcgcaagttgctaaggtaagttggttttgcagaaacagagtatatatttcgttctctgaaaaagagtgatttacaaatttgattgattctatgtttgtagatgttaactaaaacatacagagggatgctgtttcgtcgtgtctcagagagttttaagcattttccatcaccagaagaacttaaggggaagatcctgatctctacgaagcctccaaaggagtatcttgagagcaaaactgtacacaccacaagaactccaacggttaaagagacttcgtggaacagagtagcgaacaagattcttgaagaatataaagatatggagagtgaagctgtaggatatagagacttgatagcaatccacgctgcaaactgcaaagatccttcaaaggattgcttgagtgatgatccagagaagcctatacgggtcagcatggacgagcagtggctagacactatggttaggaccagaggaacggatcttgtcaggtaaaatatagagtgagaggagtcataatgttgaacctttttcgactcaagagttataagatgaacctgagtcagagtttgaaaaaaaacaaaaacaggtttacacagaggaatctggtgaggatatatccaaagggcacaagagtggactcgtcaaactacgatcctcatgttgggtggacacacggtgctcaaatggttgcttttaacatgcaagtaagtggaactggctcatcatcgtttgacttgttaaaaaatggttgaataatatttgtgttgaaaagggacatgggaagcaactatggataatgcaaggaatgttcagggggaatggtggatgtgggtacgttaaaaagcctcgcatcttgctagacgagcacacactcttcgacccttgcaaaaggtttcccattaagaccactcttaaggttaagatttacactggcgaaggatgggatttggatttccatcatacacactttgatcaatactctcctccagatttcttcgtcaaggtaaacaacaactactactcttcttttaaactagatttcttcgtaactgtgtgtgtgttgcatttgctgcatcagattggaatagcaggagtaccgagagacacggtctcatacagaacggaaacagctgtcgatcagtggtttcctatatggggcaacgacgagttcctgtttcagctgtctgttccagaactggcgcttctgtggttcaaagtccaagactacgacaatgacacccagaatgatttcgcaggacagacatgtcttcctctgccggaactgaagtccggagttagagccgtccggcttcacgatcgaacaggcaaggcctacaagaacacgaggcttctcgtcagcttcgccttggatcctccttatacgtttcgttgaatctcgttttctttccgaaataagccacacagtgtgtatctctgtttgcacgtttataaatttataatgtacaattatttgcgccctagctagaacgggataaagtgtgacaacatataaatactattaaagattcgatatttgatgactgtagccgcctgcctagaacggggtgccttgtttgacttgccaacttcaaccacatttctttttgtttacttgaaagttaaaaataaatactagagaggaagaaaaacagagctttctttctaagatcatcaacgcaccatg

SEQ ID NO: 19213 - DNA, 3003 bp, Unknown; identical to SEQ ID NO: 19212
  misc_feature (1)..( 3003): 2750-1469P.txt file - cDNA_ID_1821026; gDNA_ID_1620649; Annot_ID_163395

SEQ ID NO: 19214 - DNA, 3003 bp, Unknown; identical to SEQ ID NO: 19212
  misc_feature (1)..( 3003): 2750-1469P.txt file - cDNA_ID_1821026; gDNA_ID_1620652; Annot_ID_163513

SEQ ID NO: 19215 - DNA, 3003 bp, Unknown; identical to SEQ ID NO: 19212
  misc_feature (1)..( 3003): 2750-1469P.txt file - cDNA_ID_1821026; gDNA_ID_2926215; Annot_ID_142193

SEQ ID NO: 19216 - DNA, 3003 bp, Unknown; identical to SEQ ID NO: 19212
  misc_feature (1)..( 3003): 2750-1469P.txt file - cDNA_ID_1821026; gDNA_ID_2926215; Annot_ID_202933

SEQ ID NO: 19217 - DNA, 3000 bp, Unknown; identical to SEQ ID NO: 3520
  misc_feature (1)..( 3000): 2750-1469P.txt file - cDNA_ID_1821038; gDNA_ID_1620649; Annot_ID_47687

SEQ ID NO: 19218 - DNA, 3000 bp, Unknown; identical to SEQ ID NO: 3520
  misc_feature (1)..( 3000): 2750-1469P.txt file - cDNA_ID_1821038; gDNA_ID_1620649; Annot_ID_163391

SEQ ID NO: 19219 - DNA, 3000 bp, Unknown; identical to SEQ ID NO: 3520
  misc_feature (1)..( 3000): 2750-1469P.txt file - cDNA_ID_1821038; gDNA_ID_2926215; Annot_ID_142190

SEQ ID NO: 19220 - DNA, 3000 bp, Unknown; identical to SEQ ID NO: 3520
  misc_feature (1)..( 3000): 2750-1469P.txt file - cDNA_ID_1821038; gDNA_ID_2926215; Annot_ID_202929

SEQ ID NO: 19221 - DNA, 3003 bp, Unknown
  misc_feature (1)..( 3003): 2750-1469P.txt file - cDNA_ID_1821046; gDNA_ID_1620649; Annot_ID_47685
taaagcagcaaattaatttgcagatgaatgataatgagcctctgtatttgtttgtgtgttgctccccttattcaattgattttgatttcctttgtaagttgctgcaccacactatctctatctcaaaaaaaaaaaagcttttaatgaaagaaaaaactcttcatttagcatcaaagcaaatgcacccaaaaatagaaaaaaaaaaaaaaggctcacgccgaagcaataaaaccaccacaaaaagtcaaaagccaaagtcaaaagagaggcttcgtgggccctaaaagggatacactttggttctctgtttctgttcttcttctctaataagtttttctctagtcgttcaatattacttaacgataaatcagactttttaaactcgatctggtggggacgatgagtggaaggccggcgaaaaggccgaggaccgaccattccgtcgtgaatgtctgggaaagggagctgggtctcttacccaatcgcagtttctcaaaccgtttttcagcatccgaggtctattgattcactctttttctttctttctttagggtttcgttgaatatattgcgttactttgctcctttgtttatgtttaacagccacccaatgcgttacgaacaatatgctactcaatgaacgtttttagattcttcttctcaattgtctttaattttactctaattgctttcagaagaatgtgtttgcaaatgataaaatctttattgtccaaatgtctagtgataggaaaccaaacaactatcttaattagatattgatgattttacaaaagcaggatctattgcggcgtcttggacttgacaagaagcttgataagcataagggatgtgtaaacacagtgagtttcaatgctgatggagatatcttgctttctggttctgatgacagacaagttattctttgggattggcagactgcttctgtcaaactctccttcgattccggccacttcaataatattttccaagccaaatttatgcctttctctgacgatcgtaccattgtcacatctgctgctgataagcaggtaccactctgcctctcctcttcatacctcctaccgcgaaccacacctcttgatagctcctcatgttacaactagcttatgttgatttttgtaacaggtccgctattccaagattcttgaatctggacaggtagagacttctttgttgggtaagcatcaaggacccgtccacaaattggctgttgagcctggaagtcctttctcattctatacttgtggtgaggatggggctgtcaagcatgtgagttgtatttttcattttgttttcttatcgtctgtttttatacctaggccgcctaaaacaacacgtattttcagtttgatcttaggactcgggtggctacaaatcttttcacttgtaaagaagcaaagttcaatttagttgtctacttgcatgcaattgcagttgatcctaggaaccctggtcttcttgccgtggctggaatggatgagtatgctcgtgtctatgatattcgtagctatcgctccgagggttggtataattttacccaacccatagaccacttttgtcctggccatttgattggagatgaccatgtaggaataacaggtctggctttctcggatcaaagtgagctccttgcttcgtatagtgacgagttcatctatcttttcacccctgatatggggcttggcccaaccccatatccatcttcaactaagactgaggagaggatgacgcctcaggtttataaagagcacacgaaccgtgaaacagtcaaaggtgtcaacttttttggacccaagtgtgagtatgtggtaagtggttctgactgcggccgaatattcatctggaggaagaaagacggagagcttctccgtgccatggaagcagacagacatgttgtcaattgtatagagtctcatcctcacatgccactgatgtgtagcagtggaatagatactgatatcaaaatatggactcctggaggaaccgagaaacctctgtcgccaggaaatgcgaaacaggtaatgccacatctattgctaacctcgtttgcttcttttatttttggtgtttgaagactcggaggatatgctttagttaacaagaatgtaactttggatacaatacatgtgactggaggctgaatttggttttggaaggcaaactaaatgtttgtatgtttgcttcttggaaacaggcttcgggttttggtaacccacgatggttcgacggatattatgtggatgacgatgatgattctgacgatgaatctagtgaagagagttcagatgatgatgatagttcggaagaggaggagaatggtgaagttgatgttgagattacgaaggatgatgataatgatcatggggatgatgatgatgatgatgatgaggatgatgatggggatggggatggggatgagggatgagatttgtatagacatgtatttatctaaacacaaaataaaacagcatatggtaacagtaccaaagaaaggattagttatagtttagttagatgtcatcatcgtggatacaaaatactattcaatagacattttcattcttaaccaaatggatcacatacataatcagcttctgtaatgtcagattgtcagtttcttcaatgaactagaatttccaacaatccaaattccaaagtaatttaaaatgtaaaagatgtcattggtaaaatgggtttataatccaggaaactttgagcccaaaaaaggcccatagatcatcgaaggcctttgatatctgcgacggcgagatcagcttcgtcttcctccaacgctcgatttagggaggatggtggtttctccggggctgctctcaactgtttcaggtcactattcgctccggttgcttcttctatatactttcccactgctttttgatattgtccttagtaatcatctagcttcgattttggttcataggcgtaatccgattggctccgtcacaccggattctaagacgcgatg

SEQ ID NO: 19222 - DNA, 3003 bp, Unknown; identical to SEQ ID NO: 19221
  misc_feature (1)..( 3003): 2750-1469P.txt file - cDNA_ID_1821046; gDNA_ID_2926215; Annot_ID_142188

SEQ ID NO: 19223 - DNA, 3003 bp, Unknown
  misc_feature (1)..( 3003): 2750-1469P.txt file - cDNA_ID_1821054; gDNA_ID_1620649; Annot_ID_47683
ttatccaatatatctacatcatttgctatactatatacatatatccacgtttaatattttctttcaaacaagaaataaatatcttcagtctctttcattcggatttcggattataatcacacttaatttggctatcatacgaggattgaataatccgagtttgcgtacacaacatgtttattggactaaatgaattatatttgtgccaatccatatttgggttgcttactttttcatcatgatattatttctgaacttatctacctaatgtttgtataaactagctaatcccatattcccattctttatatcaacatgctgaataagtgaattatatcattgttttaagtgggactaatatatgcattatgcagagcacatctttgttactcttttgaacgaataagttgtttcaagtattttctgtacgtgttcaatcggatattttcgacaactaacatgttattttcgttcaccgcttcattaaatctaaagctttagttgaataagcagttgctagctgaattacatcaagtgatacctttatatgttttagaaattcaattaatgcagttgaaaatgtgtaggcttattacaactatattatcgggacaatatggacaccatcagaaattgatgtcccgattcaatgaattaacgtgtagacttacaactatatatcgggacaatggacaccatcgggaattgatgtcccgattcaatgaatctgttaaactcttttacacatttgtttaaattttcataatcaatcaatggatcgtgtaatcatactaattagtaaactacatatataattaagtctggctcatgcaagataatttataacaaacaaaaaacttatttaagtgtttctctaacattggccgtatccgttagcatgatccttgaccgacggtgtgtgtgtcattgggtcattagggtttatcatgtcaataataaaaccttgttaaaatatgggtattatttggtgataatattatcaaagtgatcatctgacattgcgtttagtggttgaatctttaatatatcttggtacttggaacggggaataaataaattaataaacacatgtaataacatagtatattgcttcatgatatgaatatgatacatataaataaacatggcacgcaaccatactatagaccagtacttgttaattgttgatgtaaataaactaggatgtattgaaatactgatttacgaaattagtgttttgtttttacgtggcattagtgatgtgaagaaatgaccgatgtgagaaagaagggagaaataaatataatgggagtgtcgatggatggattgcagcaaactttaacggcgacaactcgccgcttacctggccgtcccagtttgtgacctttggtgagagtaaaagggcaaaaatccacgtgggctaaaaaatggagccatgtgccgccacatcatcggtcaattgggaccaaatacctctctatactacttattagtaacttgactatatatcttatgtttttttttataatactaataaaattatgggcgaccgaatcaaagtggtttattcctttttctggctgccgcatctttactctccctctctggtcaactcctacccgagatctatatggagtaccattttattaaagaaagaaaaacaaaaacgaaagtcagttaatttatctctccaaaatatatatatatgaccaaattaaatcgcattgcattaggaatgactgcatgcttaacatatatcgtgatatgcatggggtgtgttaatcataaaaaaatgccatataatttacaatgtacgtgtatattgtgagattaatttacaatttgcgtgtatatctctagtttaagagtatgttacttggaatgattttaaatactaaggaatagagattgcgttagaacgcgcataagacatgtttattaataatatacacgagcagccatacctgcaccacgtgttaccccattatatatgttttaggtttatgataatctcttttctataattttggttgactagcgtgctataagtttagttaattatggtaatgtagtatacaaagttttgatatatatcacacacaacataagagtaaagaatcgtgaatcctccagagatgaggggagtgagatgcgagagagagagagagagacgtttctatagttgggccctaagtttgtttttccaatctttaatgtgtggggatactagtttttactaggtgccaagcaaagcagaacaaaattgaacaaaagggatagattagagggaaagtaagtagggggttggaaaaaggataagtaagaaaacaaagggaccagaatagtaaaacatacaggtggaacctgatccggataagtgagtggggtctttatgaaagggggccacttgtaagaaaacgttttaattttgatcaaaaagggcgtatctgttggagggacaaatggagaatgtgttggattttcttggggatttgatctctcttcattattactacggtttaatatttgattatagtaataataatcacgatttttaaagtggcattaattaaggattaatccagagaagcttcttttgtccacctgcaatgactttaatacccattttagacgttaaaggatcagtatcgccacggcggcatgactcatccgctccttccaatacgccgtcgttttatacccccacctcgaattgaaaaaaaaaaaaccccaacaacaaagataaaaacgtaaaacgaaaaaagcatatcaatctctgtgcctctctcaattctcaaattctgaattctgatcgtatcttcttctctttaagattatcatttgaatatcttcttcatcttcttctccaagcccctctctctctgtatcgatcaatcatcaataggaggagctagcgaggggattcaataaagagatcttcttcttcttcttcgattcactttcctttcttttccattttccctttcgtcgtcgtcgtcaatg

SEQ ID NO: 19224 - DNA, 3003 bp, Unknown; identical to SEQ ID NO: 19223
  misc_feature (1)..( 3003): 2750-1469P.txt file - cDNA_ID_1821054; gDNA_ID_2926215; Annot_ID_142186

SEQ ID NO: 19225 - DNA, 43 bp, Unknown; identical to SEQ ID NO: 3516
  misc_feature (1)..( 43): 2750-1469P.txt file - cDNA_ID_1821058; gDNA_ID_1620649; Annot_ID_47681

SEQ ID NO: 19226 - DNA, 3000 bp, Unknown; identical to SEQ ID NO: 3548
  misc_feature (1)..( 3000): 2750-1469P.txt file - cDNA_ID_1821103; gDNA_ID_1620650; Annot_ID_47716

SEQ ID NO: 19227 - DNA, 3000 bp, Unknown; identical to SEQ ID NO: 3548
  misc_feature (1)..( 3000): 2750-1469P.txt file - cDNA_ID_1821103; gDNA_ID_2926176; Annot_ID_140349

SEQ ID NO: 19228 - DNA, 3003 bp, Unknown
  misc_feature (1)..( 3003): 2750-1469P.txt file - cDNA_ID_1821107; gDNA_ID_1620650; Annot_ID_47715
agtacgtgaacttgagcgaataaatgtactttcctctttgtgatttttgttttttttttgtgaacttgagttattaagaggaaatcttcaagtaaagaatttatctaatagtatatacatcccacatagaataccaaatagctcagctcatacaaactctctcataatgagagaaaaaaatcctgaaataagggtaagaaaaactcttatgcctcaaggttttagtaaatctcataattttggccgaaccacaaaaagagacgtgcgaaacaaaatagtagaaaattgatttcccgaatcgacaaacatggactaaactatatgtatgatacataactggtcgtacttacaatgatgatacttggtttcacgaagacgagggagcctggagatgaatgatggtgataaggccatgtgtcatcaccaaaaggagggttgctcctgaagttttcgccggagcggccaggaagtcgatcgaggtatgctcaccttctgggtttgattccaattttttctttgaattgcattcgcttgacacgctctttgtccaggcgatcgccgaatgggatcgtttgacttatttgtacgagcgttgtgttcggagcctttccgtagaggctactaacgcgaaagatgcccatgaggctttggccgttgaaaaggaaaaagtagctcaggcgctggccgacctggcaaggtctcaagacgacgccaaggagatgaagaggaaatatgacgaattagctggtcgcgctctttcggagatgaagaggcttcgagaacgtcgacttgaatatgctcaatttgtccggagatcggcccttgataagatggcgagctcgttcagaagcgattggatcgtattaaagctcatattgacgatacgaaggcggcagaaccaaagttttttgaattcaaccaagtatctgggaatatcaagactctcgaggcgttggtcgaaggtggcgaagtggagatgaagtcggatgacacgatgttaagattggtagcggatgcagaggaattggaggccgaggtgaaagcttttggtatcaccgatcttatggacggcgacttcgatgttcgtactttatttgccgagctgagtcctgataatcgtaattccgttccaccgccgactgaaggggaagatctcgcggatggacgaggtgagtgcgaaggccaagctggtgaaagaatcgttggtcaaactgaagttcgagacgagatcgcggatgctagagactgatattccaggaggctaactaggagagaaaggaagagctgatcgccttcttgaaatcgaggtcgtcatcttttgcttggtctacgaaagatatgacaggaatcgctccggaggtaacctgtcataagctccggaggtaacctgtcataagcatccgcacgacccacttcaggagcaaccctccttgcaccaaacgtgctccgggcgatctccggagccacacaaggcaaatacttccgcgactgactcagttgttgaaagtgtctttttcgcggtgatctcggtgttccagctaaccactgggtcgaggtcaaattcaacatgatcctcatgaagtaatcgcgcattaacttcagcctctgtatactgcggctgcttgttataagcatcctccaggtcgatgagtgggtcgaactgagctaataagtgagcgggcgatctccgtagccacacaaggcaaatacttccgcgactgactcagttgttgaaagggtctttttcgcggtgatctcggtgttccagctaaccactgggtcgaggtcaaattcaacatgatcctgatgaagtaatcgcgcattaacttcagcctgtatactgcggctgcgtgttataagcatcctccaggtcgatgagtgggtcgaactgagctaagaaatccaccggatcttcaggagctgcgagatgtccaccggaaccttcccgatagctcatcaagcaacgtcggaatctcgatccggttagatcgactagactgagcttcgttacttggattcccggttaaccgagagtttcggcgaactaatgacacttcgctcccggaggaagaagaggacggagagacaagaacaaccttacccattgccggaaaaatcgataaagaatcgagagtacaaaataattcgcagaggagagagcgagagctaccttagattcttcttgcaagcggcggaaaatgatttcccgagggtttaatctaatataaatagagtcgaatgggcggcaaacctacgaggtcatcattaaacccacgagacgcttcggttcctgagcttcacgcgcgcgtacagacgcggcgatttgacacgtgtcagatacgttcgaaatacgaatcgattcggaaatctaatgattaattcacgctttccaagatttaaatcgaaattcaatttctaagttcggaaatttcgaattaagcaactcggattctccgaactggggggggactaattgttggtgcaggaattagcacctccgacaataccaatttaaaccaaggaataacgtgaataaaatcgagaattcgattgaaccggggaatcccggctagcccgttaatgggcctaagtcatgagctcgccagaagatttgggtcgacaatcgagatcctcataggcggcttctcaggtcgtgtaaaggaaaacttccatttaagaaaggaggatctcatgaagaatggaagtaatgaagatttagacctaggataattagaatatcatattttgatacgttcaacccattgtataaatagggggggtcaaactccccaaggacccatcttgaaccaagaagagactacaattatagagcaaaccctagcttttatttcaagcaactttgttctttccctttgattatttgcgagctaagagaggagtgaatttgtctaaatcccttagtacaaattcattgtttgattacagaatcaacagtagagacgggctctataagcatgtgagatgtgctattttcccaaaatg

SEQ ID NO: 19229 - DNA, 3003 bp, Unknown; identical to SEQ ID NO: 19228
  misc_feature (1)..( 3003): 2750-1469P.txt file - cDNA_ID_1821107; gDNA_ID_1620650; Annot_ID_163435

SEQ ID NO: 19230 - DNA, 3003 bp, Unknown; identical to SEQ ID NO: 19228
  misc_feature (1)..( 3003): 2750-1469P.txt file - cDNA_ID_1821107; gDNA_ID_2926176; Annot_ID_140348

SEQ ID NO: 19231 - DNA, 3003 bp, Unknown; identical to SEQ ID NO: 19228
  misc_feature (1)..( 3003): 2750-1469P.txt file - cDNA_ID_1821107; gDNA_ID_2926176; Annot_ID_199882

SEQ ID NO: 19232 - DNA, 3000 bp, Unknown; identical to SEQ ID NO: 3195
  misc_feature (1)..( 3000): 2750-1469P.txt file - cDNA_ID_1821121; gDNA_ID_1620631; Annot_ID_47245

SEQ ID NO: 19233 - DNA, 1057 bp, Unknown; identical to SEQ ID NO: 3567
  misc_feature (1)..( 1057): 2750-1469P.txt file - cDNA_ID_1821121; gDNA_ID_1620651; Annot_ID_47750

SEQ ID NO: 19234 - DNA, 3000 bp, Unknown
  misc_feature (1)..( 3000): 2750-1469P.txt file - cDNA_ID_1821121; gDNA_ID_2926182; Annot_ID_140601
ctctgcattaagtttcctctgctttttcacttttatacatgttttcttaacattttcatttatgtttttttttaatctaaattacattaaaaaacaaaaatctcaaaagttgttaattttattgatatattaagaaaaataaatctggtggtaaagaggacgagatagagagagaatgagaaagaaaaaggagactccgtaatgaatctggcatgagttctggcaaagacagaagagaaattcaatgagaaagagttctggctaaagtttggtgacgaagaaggaaaaaagaaacacaaaaagaagaagtaagcaaaatggtaatatagaccaaaaagtcacagaagatctgtaacaaatggaaactattttggtcaaatgttattttgttaattatttgtcagtcaaggtcattagtccatattctttttatttgaatgaaagataataaatgatacaaaaatgcatgaactaattgtgtcaatgaatttagttttcatgtgattttctacattataaataaatcattttgattcatttcttgtttgtagaagaaagaataaagataagagcctctttcatagtatcaatggcttccttcaaccactttgtgttactgcttctgttaataatcactcttattctatccgctgaagcaactaaggaacgccgagcaataccatcaaaggcagaaaggaatgaaatgaagagacaactcaaagctatcaacaagcctgcaatcaagagtttcaaggttggtttagccttccttcttcttccatgcttatattgtttcatatctaacttttttttcttatgaacagactgaacatggtgatatattcgattgtatcgatattcacaaacaactagcatttgatcatcacctactaaaaaaccactctgttcaggtttgattttatacatatttaattctctctttatctactgtcttttcaattaaaagatgcctctccttagagaatgactgactttgtatatgcagctaaggccaacaacagtacctgaatatatcactggaaacaacatttcagagagttttagtcttttgcaagaaggtataagctgtccagatggcacagtaattgtaaaaaggactacaatgcaagatcttatgcatgcacaacgtttgaaatccatgggattcgagggcccgagaccttttctcacagagacaaacaacatgaattttaatggaaaattctacgtaagaacccttataagttgatagtatatatagcaaccaccatttttgttttccactttcattttctgagtttctttcttctttatggatattaggatgcaagagctgattatggaccgaacccttttgctggagttgcaggaaacattaacatatggaaaccaaaaatcttgcaagatcaagttagtattggatacatggcagttagtggggggcctattgaagaagatttcgccagcatttcagttggatggattgtaagttaattctggttccttagcaaaagtgaccatgttcgtcaactgtaagttgcatgaatttaaagttgacaaaagtttgaaatatgtatatacaacaggtgaatccatcgatgcaccatggtgatcatgttcgtttatacgcctactggactgtaagttttgaattatactagtaagagcttacaccaatagtttctttatcaacttgtctgtgtcttataagttctttatgtatatgtttccttataattgtgttaatagttacatggaagcagtactggcggctgctacggcatgtcatgtcctggatttgtgcaagttagcaagactataccagttggtgccgttcttcaaccattttccatctataatggtcgacaatatgaattgcgtttaggcttgtttcaggtaaagtctactcaactttttatcacttctcttaaagtcatttgaattcatatttcaaaattgggaacaggatagtggcacgggaaattggtggtttgtatttaaagaggagattattggatactggccagcatcattgttcaagtcctggatggaatctaacagcgcaaattatgcatcttggggagggcaagtgtatagccctatcagagagaagagtccacctatgggaagtggtcattggcctagtgagggctttcataaagctgcttttattagtggcctcaaactcttcgatggtcacgggaaagtttataatccaggacgcgggacagtgaaggtacatgagagcagaccaatctgttacaaagccagatatgttcatgatgttgataaaccttggttaaaatctgtttactttggaggtcctggagggtgcatagggtaattgatctacgagataaagagtaacaatatcataagattttaattttacacaggctataggaaaaatcaacagatttgaaatatatctaagcattacttgcgctctaataaataataataaagtattagaaattcacaactttcagcacaaatttctatagtttattgagcatagattgatagctaactcaccttaaagtacattaaaaataaaaatctcattctcaactgcaaaaaaatgttacaaagtcacatatgttcatgatgataaggatccttggttaagagctatttactgtggaggtcctgcaggatgcatttggacataatatatgatatgcagagttacaagataaatcttatatatgtttgtatgaataataaagtttccatgaatcctcccaacttttttgcaataagtttgatgtttatgcctaattgtaaaaatgtcacaatctaatcatcaatttacaatcctttctaatacagacataatgataaccaaaaatgtgggttctactgttactgcatttgtctgaaacatttctaaagcctcttttaatcatgtcttaaatatatatacccctatccatagcatagcttgcccctactcataacctctaaactctttagacaactaaatatataatataaatg

SEQ ID NO: 19235 - DNA, 3003 bp, Unknown
  misc_feature (1)..( 3003): 2750-1469P.txt file - cDNA_ID_1821133; gDNA_ID_1620651; Annot_ID_47746
aagatttttatgctgaagtcttgctacaagaagcacctcgttcttgaactctggctcaccttgatctgatggtttagatagtctcttggcagcaacttctgttccattcggaaacataccctgctcattcgcatgacctttactatcagaattagcatctgagtttataatacaatcaagtagttgagaaaatttaagaacatcatgccttgtaaactgcaccaaatccaccatgaccaagcttgttactcttatgaaaattacttgttgcagcttttattgctctaaaatcgaatcgaagcgaacctgaggacgctgtaagatcatccgtagctgcacaaatatactgttatgctgtagagtttccaagggacattaacatctctgaaccgtagacaagtatttttaccatcatctggtgatgcagtaccataaggcctcctaggtcttcttgaaacagagaaatacccatctgagaagaaacagagacataacaaaagtgttggaaataattttaccctaaaatgttgttctgagataatgtcgttctagcaaaccattgaaaactcactttcacttgcaaatgattggtaagcttttctcctcctagaaacagcgtatccaagagcaagcagtacagtgctcacgacgacggaaacaaccgcaattgccacaatagatcctgtagatatatttttgccatctgcgcgaaagctgtcactcagaatacaatccaaattggtttaagggcataaagtattttaaatgcgaatttttttagaaacttcttttaaattttttgaatatgaaacaatttttttttgtgaaacgaatatgaaacattattacacaaaaataacaggaggttgtgttttctttttgagtttgtattttcaagtaaacaaaaataaatgcaaacacatcagcaaaaatcgagatccaacacagcagaaaaagttcaaatgaagagttcatatctttatattatatacctttcttggttgtgttagagtgaccattatctaattcagaagggggagttggtaacatcccatttatgaatagtcccaagaatggctgtagatcccatcgcatgaaacagctggtccttgcaatatagcctacttgtatcccccggcagcatgacctattatctatcctaagatgttgtaaacatttctcgcagttcaacttggttaggtctttattgcattgcgcgatggcataaatgctcctgaacgggaacgacccgagctcttgtatgctgttggcgtacaatgaaccatcaactttgtttatcacacgatccatcaaagcctgccatgtagatttaaactccgtcaagttggtttggccgaacgatgtgttatatttgtactcaatatactctgcccatattatgtcttcgtcgagcgatccattaatcaagtggtttgagtagcgtaccaaacaaagcgagtctccagaactccagtctatagcttctgcctgattaggacatgtgtgtagcaaggtatgagatacactcgtgatacaatccgaacaatcctgtgttgtagtacctcggctacacatccccagaccatgtgctatgtttggaccgggcttgaacggagtcttgtagaagccttcattatccttgacacgagaaggaagagacgagagcatggctcggaggtttatgtcgtaaggaccattggctttgaaaaaatcagatctctgaatgcaggttggtgcagcgacagcacaagagcttatgaccacaaaccagaagattgctcgcaagtcgaccattttgttcttttgcatcgagtttgattttcttgtttaaaacctccagtcttgaaagatttaatattagaagaggattcgattttcaaaagcaatctctttcatatgtgatgtgactacgtgtaggactcattcctcccttctttttcatacgaatccactatgtatatttgtaaccctgtttcacaactcttttaaggtatttggcttttaaatttaccggttccgtggaaactgaaccccgcaaatgcaccattatattcaaatcgatatctttgaaagcttaagcgaaattctgtagttttgtttttcttatgatgtcttttaaatttacatatcttgcattataaatagtactgattcatatccccgctgtagggaaaaatgtatttttcacattttcaaaacaaaatgtggagattttaccattttccctagccaacccaactcacatgccaatctcgctcgatataggacccaatacaaaaacaaaacaaatatcgtttatttccgaaactaatgacactgacgcattagttgaaaataaaaacgacactgacgcattagttgaaaaatacaacacgacgaattagcctaatactcatctggtccccttccaagttccgataagctgagttctagtaaatttcgtggttctgatcgtttcattatcgctggagtcagcagtagatgacagcaacaagctataccagtgtgcaacgaacgaagagaatgaacaacacacttgattattcgttttttcaagctacaataaccacagagttacattttcgattatttatttatttatttttattttgaatgaactgttaattcacacaaaaaaaaacaacatgttttacaagtatggtcatagactaaaaacagagctttacaaggacatagcatttgctgcggaatataatttaattctcgaaatatgaaagttgctatggaactgtgtcgtagttctcacccattattacaagtaaacgaagggactcgtcattttcagggtattatctaaactttcaaacattattgacattttaccatcgactatgtaggtttagggaccacttattagtttgatggattcaacattagaaaaatcgcagagaaacttcacttatctgttcgaacgggttagaaacagatacatgcgtaattactaacacaaagatcacagctataatctcgtaaggcaaaatg

SEQ ID NO: 19236 - DNA, 3003 bp, Unknown; identical to SEQ ID NO: 19235
  misc_feature (1)..( 3003): 2750-1469P.txt file - cDNA_ID_1821133; gDNA_ID_1620651; Annot_ID_163472

SEQ ID NO: 19237 - DNA, 3003 bp, Unknown; identical to SEQ ID NO: 19235
  misc_feature (1)..( 3003): 2750-1469P.txt file - cDNA_ID_1821133; gDNA_ID_2926182; Annot_ID_140597

SEQ ID NO: 19238 - DNA, 3003 bp, Unknown; identical to SEQ ID NO: 19235
  misc_feature (1)..( 3003): 2750-1469P.txt file - cDNA_ID_1821133; gDNA_ID_2926182; Annot_ID_200316

SEQ ID NO: 19239 - DNA, 3000 bp, Unknown; identical to SEQ ID NO: 3555
  misc_feature (1)..( 3000): 2750-1469P.txt file - cDNA_ID_1821137; gDNA_ID_1620651; Annot_ID_47745

SEQ ID NO: 19240 - DNA, 3000 bp, Unknown; identical to SEQ ID NO: 3555
  misc_feature (1)..( 3000): 2750-1469P.txt file - cDNA_ID_1821137; gDNA_ID_2926182; Annot_ID_140596

SEQ ID NO: 19241 - DNA, 3000 bp, Unknown; identical to SEQ ID NO: 3554
  misc_feature (1)..( 3000): 2750-1469P.txt file - cDNA_ID_1821149; gDNA_ID_1620651; Annot_ID_47742

SEQ ID NO: 19242 - DNA, 3000 bp, Unknown; identical to SEQ ID NO: 3554
  misc_feature (1)..( 3000): 2750-1469P.txt file - cDNA_ID_1821149; gDNA_ID_2926182; Annot_ID_140593

SEQ ID NO: 19243 - DNA, 3000 bp, Unknown; identical to SEQ ID NO: 3553
  misc_feature (1)..( 3000): 2750-1469P.txt file - cDNA_ID_1821165; gDNA_ID_1620651; Annot_ID_47738

SEQ ID NO: 19244 - DNA, 3000 bp, Unknown; identical to SEQ ID NO: 3553
  misc_feature (1)..( 3000): 2750-1469P.txt file - cDNA_ID_1821165; gDNA_ID_2926182; Annot_ID_140589

SEQ ID NO: 19245 - DNA, 3003 bp, Unknown
  misc_feature (1)..( 3003): 2750-1469P.txt file - cDNA_ID_1821181; gDNA_ID_1620651; Annot_ID_47734
catgtcttctctgatctcttttatcttccttttccttttctcattcctcactagcttcaaagcttccgctcaagatcctttttacttaaatcattattgtccaaatacgacaacttactcaagattcagcacttactccaccaatctcagaacccttttgtcctcttttgcttcccgcaacgcctcttactccaccggattccagaacgtcacggtgggacaaacccccgacctggtcaccggacttttcctctgccgcggagacctctcgccggaagtttgcagtaactgcgttgccttctccgttgacgaagcgttaactaggtgtccaagtcagagagaagctgtgttctattacgaggagtgtatactcagatactctgacaagaatattctatcgacggccattacaaacgaaggagaatttatcttgagtaacaccaacactatttctcctaatcaaagtcaaataaaccagtttatagttttggtgcaatctaatatgaaccaagctgccatggaagcagccaacagttctagaaaattctctacgataaagaccgaattgaccgaactccagactttgtacgggcttgttcaatgcactcctgatcttacaagtcaagactgtttgagatgtctgacaagatccatcaatagaatgccactttctagaattggagcaagacagttttggccaagttgtaattcaaggtacgagctttactcgttctacaacgaaactaccattggaacaccatctccaccaccaccaccgtcgccaagcagagcaaattgatgtgctgctttttacgtcgaagttttggccaagttgtaattcgttttgctctgctttacaaattgacgtgttgctttttctctgcgtttaaaattggtatcatcgaaataaagtaactcagtttcttacaatcaaagagataaggattgtgaagcagctaatgagtcttcttattttgtctttacttcagtcttctcgtctttgatagtgaattgctcatctagctttcttaatcttagacttggtcaatgttttggcttttctcatactaaaccaattaatacataaaatatttaatttattttctattacaattatctagatatttttagctacacgtgattgaaacgtgtctcaagctacaccaacgctcttcctcacaaactgaattcgtcgtcgatagtggttgctcttgctatcttgatgtttacttcgtctgatcgttgaactggcccgctgcaacattctgagtgttccaagtgattattctagttgtgcgtaacaccgtaacagtaaaaatgagctaaggaaagcgagatgcaagggagaaccaacagaagcataagtttttcctctgttattactaatggaaaaaaactttctttttcattttctaattccttgtcagatttctcagcttctcttctttttgttttgtgtaagacttggtcggagtcttagattacgctgatgattaaaaactactaaaaaagaaaaaaaaaagaatattacgcaaatgttctcgatgcattgaccaagtcctcttctggttctggctccattttcacatgcaggcccataaccaattttaacgagatttgttgcatgaaaagccgattgtttttccttggcagtaacgaaaaaaaattagttactttttaaaaactagggttttgaataatatcattaaaatcaaatagaacgaactagggttttggcatcatacaccgcctcattcaattattaacaaagctgagtcttcttcacggagaaatcacggctgagctaggtctcatataccttgcatcaatatcttgggcctttactaggatcggagatacatcaaacataaaatacttctcggttttattttctctttccttatgtatatgtgaatgcctttaaaaattttgattgccttttttctcgttttggaatagtcatgagaagctgagaaccaaaaaggaaatatttctcacctttgcaactagctagatggagcttatggatgcaaaattcgttttaaaacacattgtattcggatgatgtcaaaatatttcacattcatatagcaaattcatgtttatatattccgatattaactttaaatattaaaacttatatgctgtagattcatatccgggtgaaaacacgaaaggacttatgatggaaccattatatggaacgacgtcatgtggaatatcaagttatttaacttctcgcgagtaagactataaaaagtaatagaataattagtaactaacaatatcagataacgataggcagatgatttggtaatactattttagtatcactacatcacaataaccatactagcatatacgatatacaaattaataaattatcgtgcttaaaacaaaaacctattatcaaccaataatttcttcgcatcagtggcgacaattttttcagccccagaatgattctttgaagaatagtcaacaaagattcctaatttcaacaattctgttcaaggaaaagtacgaaacaaattctactgctagctagtttctctcatgtatatctaaattctattactagtaattaagatctttgaaatcatgccaactgctacatttattttctcttgaaaatcccaactaccttttttttgatcaaaaaaaaaaaagactttagagttcaaagcttgaatttagagttattatgttttaaattttgacagttttgataattttcttcattttaaaatgattttatattttccgtaatttttttctatatttcatatattaaaaaaataagtaatggattagtagctaaacacaagaagttggacaagacccgacaatttaatacgagacgcgttgaccttgaccttgacttttcgtcagcacaaaacgttatctacggtagtcactgagagagaacaaacaatcaaatttgtttcatatatcactcaaagcttgatgagaagaaacacagatcaagaaagcccaattatg

SEQ ID NO: 19246 - DNA, 3003 bp, Unknown; identical to SEQ ID NO: 19245
  misc_feature (1)..( 3003): 2750-1469P.txt file - cDNA_ID_1821181; gDNA_ID_2926181; Annot_ID_140585

SEQ ID NO: 19247 - DNA, 3003 bp, Unknown
  misc_feature (1)..( 3003): 2750-1469P.txt file - cDNA_ID_1821185; gDNA_ID_1620651; Annot_ID_47732
caccaccaccgccgctgcctccgttggcatctccttcactatctggtgaacagtttcttctacctttgccctgtttacttgatctttgcagtattaccaatatggaacgcagagttttcaatttttgttttgttataagtctactattttcttactaaagcagatgatctgtttaaacgcagataaaagtgggaattcaaatgtggtcgtggtagccgttgttgtgcctatcatagtcgctgttctgattttcatagctggttattgtttctttgcaaagagggcaaagaagacttatggcacaacacctgctttagatggtaaagattcaagtccttaattggtttgattaatgtttttgactaatatattttgtctttctttttctgattactaagacatttattttgcaacagaagatgataaaacaaccatagagtcgctgcaacttgattatagagcaattcaagctgcaacaaatgatttttcagagaataataaaattggtcgaggaggttttggtgacgtttacaaggtataatattatatacttctacataatttatcgattgttttgttttctttttgctacaacacatttggataatgagattgataaaaatggatagggtacattttcaaatggaaccgaagttgcagtgaagagactgtcgaaaacatcagaacaaggtgacacagaattcaagaacgaggttgtagttgttgcaaatcttcggcacaaaaatcttgttaggattctcggattttctatagaacgagaagaaaggatattggtctacgagtatgtagaaaataaaagccttgataacttcctatttggttagttgcatttgatgatttgtttcattgattcgttaaccagtcctgaaacatggttagagctaactactattcatggatgttcacagatcctgcaaagaaaggtcagttgtactggacacagcgataccatatcattggtgggattgctagagggatcctatatcttcatcaagattcacgactcacaatcatacaccgtgaccttaaagcgagtaacattctcctggatgctgatatgaatcctaaaattgctgattttggaatggcaaggatctttggaatggatcaaacccagcagaacacaagcagaatagttggtacctagtaagtcttccacttgactactctctcacatgttgaacattttattttgataacatattaaagtttttgatgtggatatccagcggttacatgtctcctgaatatgcgatgcgtggccagttctcaatgaaatctgatgtctatagtttcggagtgttagttcttgagattataagcggtaggaagaacaacagctttatcgagacagatgacgcacaggacttggtgacacatgtaagtttaaaggaaaggagttatatatatgtacctctcctcatcctacaataagcaatagttgcaataactgtttgactgattgattctaggcttggaggctttggagaaacggaacagcgttagacctcgtggatccattcattgcagatagttgccggaagagtgaagtggttcgatgcacccatatcggtcttttatgtgttcaagaagatcctgtaaaacgtccagccatgtcaaccatttccgtgatgctcactagtaatacaatggctttaccagcgcctcagcaaccagggttttttgttaggagtagacctggaacaaaccggcttgattcagatcaatcaacgaccaacaagtctgttacagtatctattgacgataagtcaatgtctgatttagatcctcgttgaatatggtgttattaaaccttacgattgaaatcaagtttaattaagcctatatttacatatttctaaacttgatgaaccatgttgatcctttagttttgatttggtttgatatttgttttcaagaataatcaatttagtctcagctatcagcatcaccaccgattgaaaaattcattacctaaatgagagggagagaacacttaatgttggcattagagttttgtccattctaaaaatttgtgcattattttggagttcatttcaacaaaagaatcgctttagcaatacctctaatgattttgtgccatttgattttgaaaacagagggaaaacagagtacagtgggatggtgatttgcatgatttgtaaagtggtgaaataaatgaaatgtgaaccatctaacacgtcaaagtttttttctttctttcgttgtaaagtaaactagttgaatttctaagttttgacgcctatcaatctatttccgagaaagatataaaataaaaatattggagttgaatattatttaataggttgatgattattctgcttggcgccgagactttgggttaataagacagcacagttaaacttccttgacagacaagtaacaaacgaacagttattaagtaaaaacagtaattacacaaccctagtttgattcagaatcagaaccaatcaacacgctcagtggcaggttaacttgtaaagattatctttgaatttttcttttagggctcttccttgtttaactttacaactgtgtattagatttttaaagtcattttttgaaacaaggaactttacttagatcagtcccaatctctcttttcctcacaatttacgacatttaaaagaaaaaaaatcgcttacattgactactgacttagtcgtaacaaaccgtcgtatacttcacgttactcagtactagtcagagagagtatcatggaagctccacgatgagaaactcaaatcaaggaactcgaaaaaaacaaaaccatgtcttctctgatcttattatgtatatagtttcaatgtaaatattatggttttgtataggtttaattggagtctgtataggtttggtttagctggtttagaggctttggtttaggcctggtcaaatgtatataaacccacaattgtatcttttaccagattaatgagaatgagattgtttactaatatg

SEQ ID NO: 19248 - DNA, 3003 bp, Unknown; identical to SEQ ID NO: 19247
  misc_feature (1)..( 3003): 2750-1469P.txt file - cDNA_ID_1821185; gDNA_ID_2926181; Annot_ID_140583

SEQ ID NO: 19249 - DNA, 3003 bp, Unknown
  misc_feature (1)..( 3003): 2750-1469P.txt file - cDNA_ID_1821189; gDNA_ID_1620651; Annot_ID_47731
gtgaggtttacaaggtatactataatatcttcaagtacaccctaggttaagtacttcgtattgattctttgattggataacgagatgatgctgattaaaaagttaaacggatagggtacattttcaaatgggaaagaagttgcggtgaagagattgtcgaaaaattcaagacaaggcgaagcggagttcaagaccgaggttgttgtagttgccaagcttcaacacagaaatttggttaggcttcttggattttcattacaaggagaggaaagaattttggtctacgagtatatgcctaacaaaagccttgattgcttactatttggtctgttgcatttcaatgattctttgaccattaatcttgaaacttggggttgctaatctcaagatttaactgtaatccatggatttgcacagaccctacaaagcaaattcagctggactggatgcagcgatacaatatcattggaggaattgctcgggggattctatatcttcatcaagattcacggctcacaatcatacaccgtgaccttaaagcaagtaacattctcctagatgcggatataaatccgaaaattgcagattttggaatggctaggatctttggattggaccaaacccaagataacacaagcagaatagttggtacctagtaagtcttccacttaacatctcataacttataatatgttgaacattttacattgccaacatatacactaaagttttgttgtggattccagcggttacatggctcctgaatatgcgatgcatggccaattctcaatgaaatctgatgtctatagcttcggagtgttagttcttgagattataagtggtaggaagaatagcagcttcggcgagtcagacggtgcacaagacttgctcacacatgtaagttttaagacaatcaatatatacctctcttacattacattaagtaatgttagctagaactgattgcttgattggtattcaaggcttggaggctttggactaacaaaaaagcattagacctcgtggatccacttatagcagagaattgccagaatagtgaagtggttcgatgcatccatatcggtcttttatgtgttcaagaagatcctgcaaagcgtccggcaatatcaaccgttttcatgatgctcactagtaatactgtgaccttaccagtgcctcggcaaccagggtttttcattcaatgtagagccgtaaaggacccgcttgattcagatcagtctaccacgaccaagtcttttccagcgtctattgatgatgaatcgatcacagatttatatccgcgctaaatatgaccttaaacttcatgcttgtaatcaagcttacgcaaatgtttacatatttgtagaattgtggatgtgatcaaccctaataattttttagttttgatttggtttgttaaaaccatatgtattttgttttgattttttaataatgaataattagtctagtctcaacatcaccaccgattgaaaaaaatgagagagggagagaacacttggaatgttggcattacagtttggttcattttaaaaatttgggcaatccaaaagctataactttggagttcatttcagcgtctaagagccaagaggatatatacctgctttgaagtcacaatgtatggttatgatcttgaatcattctagaatcgctttagcaatacctccaatgatcttgtaccatttgatttggaaacagagactaaacagagtacagtgggaaggtgatttacatgatttgtaatgtggtgaagtaaatgaaatgtgaactatctatcacgtcaaaagttttttttttttttttcttgttgtaaagtaaactaataactaatacaatattttgaaagacaaagtcatctacacgaggaatttaaatgttagactaataaaacatgtggaagagataaccagagaaaatagaattacaaaattccaggttttgacgtctatcaatctatttccgagaaaaataaaaaatattgggtttgaatattatttaataagttgatgactattctgcttggcgccgaaactttgggtcaataagacagcaccgttagacttccttaccatacaagtaacaaacggaacagttattaagttaaaacagtcatttcgcaaccctagttgattcagtttgtagccttatttagaatcagcaccaatcaacgcgctcagtggaaggttcgcctacaaagaaataggctttgatttttagagtctttttttttggaaacaaggaactttacaaatatgcctagacttatatcactcacatctcttttcataccttctgcactttttcctataaattatttttcaattttttttatataaaatattttcatacatctagatggatccttcacaacttttgagattattttgttattgttttatggattttgatattcttcataaaatttaagttttattaattttcatgatttttaaactccattaaaaattgtgttattcaaaggcttaagtttcattaaaatatatattgtttgtaaaattttattcataaaacaaaaaaaaaaaactgtggatatcctttacaatattaaaattattctataactacaatactctctacaatcttaaaaatctctcatttcttgaaagttgaaaccaaactcccatattatttaagaggtggagaaacaatgattaagtttttgggttttgctcaacaaatgtttttttggatcaatgatccaaagattccaaacactaaactcaacgtcttcttccaataacttttacttttgttgttaataaaaatgacataaaaaagattaatcgtatacagtacattgagtttgattgacgactgactttaaagtcgtaacaaaccaccgtatatttcacgttaatcaaataatcagcactagtcagagagagaatataatttgtcagtttataaatggaagctgcataatgtgaaactcaaatcaaggaactcaaagaaaaaaccatg

SEQ ID NO: 19250 - DNA, 3003 bp, Unknown; identical to SEQ ID NO: 19249
  misc_feature (1)..( 3003): 2750-1469P.txt file - cDNA_ID_1821189; gDNA_ID_2926181; Annot_ID_140582

SEQ ID NO: 19251 - DNA, 3003 bp, Unknown
  misc_feature (1)..( 3003): 2750-1469P.txt file - cDNA_ID_1821193; gDNA_ID_1620652; Annot_ID_47771
aggccggtgtggtacgagagagtctgatgatccgacaaggaatacttctagtccacacaatgtcagcctttctttattttctcggtcgcttcgagattctcaattctgctctgtagaaaagatcctgatggttcacttttaatatccaacggttgatataacacaagcgcatgctcctcttatgagaacggccgtgggatataatttaatctcgccgttaaaaaatgtgacgaccgtgagttaacggtttatctgttaccaacctcatacctgtccctaacggcagaggataacgccgtgagtatggatggatgggagagaaaagaagagagagagtgtgagtgaggaaatgaaaggagtcttttttatttgttatctctcatctctctctctctttctctctgagctttgctttttatcaaacaagcatcatcatcacatccacttccttcttcttcctttctctgtctgtctcttaacccaaatgtggactctttgagccgttattagatctctgccgcttcaataatggggagcttatcttctgaggaagacgacgaagtctcttccgagagatgcggaagttacagtcccagcgccgacattagcgagtccgagagttccagcagcttctcctgccaccgcttcgacggcgagggtgcctctagctccatcccttcttcccctcgagttgtcgctggtagaggattttacttcccggccccagtcatgcttccggtgatcggcggcaaagatgtggtctgggatgacaaacaaccagacaacgatttatccggtataaaagtttccaaatttgacctcttttgtaaacattgatgaacactaggattcaatttcccttttgtttcctattgggtttcagaaattgagatgatgaaggagagatttgctaagctacttctcggggaagacatgtctggtggaggtaaaggggtttgtacggcgcttgctatctccaacgccatcaccaatctctctggtaccatctcaatcttcttccctttttgttagttggtatatatagtaggggtttctagttttttaataaggctagtgtccacacagcgactgtgtttggcgaactatggaggcttgagcctcttgctcctcagaagaaggccatgtggcgcagagaacttgagtggctgctctgtgttagcgattctatcgttgagctcattccttccattcagcagttccctggaggcggaacttatgagatcatggagacccgtccacgttctgatctctatgccaatctccctgctctcaagaagctcgatgctatgttgatcgatatgcttgacgctttctccgatactgagttctggtacactgatcgcggcatagttcttggtgattgtgacaaggattcttacaattctccagcttccgttaggcaggaggacaagtggtggctgccttgccctaaggttccgcctaacggtttgtcagaagaggccaggaagaaactgcagcagtgtcgggactttgctaaccagattctcaaggctgcattggcaattaacagtggcgtgcttgccgaaatggagattcccgacccttacttggagactttgcccaaggtatgcgccttctcgagctcaaggattagctttttcattgctgctggagcataaattcttttaccgttatatgtgattagctcattgagttatgattttaaacttaatgcagagcgggaaggaatgtcttggagagatcatctaccagtacttaactgcaaacaagttctctcccgaatgcctcctggactgtcttgatctctcatcggaacatcagactcttgaaatcgccaaccggattgaggcggctgtgcatgtttggagacaaaagaatgggaggaggcacaagaagcaggcgaaactaaagctgtcttcttggggtggcaaggttaaaggccttgttaatgacaacgaaagaaatgatttccttgtgcagagagccgagaccctcttgcagagtctcaggatccgtttcccgggacttccccagacaacgctggacatgaacaagattcagtacaacaaggtacattatagtttggagtgtgctttgctggttgcatcatgaaacgatgcttagataatttaagagtttgtgtgtgttcttgcaggatgtagggcaatcaattctggagagttactctagggtgatggagagcatggccttcaacatcacggccagaatagatgatgtgctttatgttgatgatgccatgagaagatccatctctgtcacagaatcgctatccctattcagcatcaatggactcaaccctcaaaaagcgttctctgtgcagagctctccgcacggttcaccatttgcaacgcctgccctaagtgtagcatcaagaagcccgaggagagcaccgccgctgtattcagtgaagaggaatgggacgagagagaagggaatagtgggagaaacagagaaagcatggtcgtatgcagggaatctgagttcaagaagagtaacgggagtgacgccggaaagagattaagattgaaaatagaagaatgtaaatcaatggttgtagagactgtagttgtttcttgtttgtctgactacgaagacgaatgtggtaatagcaacaagaatgttatcttatgtggagttttgaaatgttgttaacaaatcaattccttagctcatttaccaagtttacaaagattatggtccaagtcctaaaactgaatgaacatcacatacccgtctcttgagtgatttaatcatgttcttcattgcactaaagcgacaacttttggttcaaatatagactatgactatatggtttgttttgcacaggattaaagttgatgttccaattttataattaaaaagtcagaaaggggttttcttgttattttttacttgttcttataagctatcgggacgacacggagttttaaagagttttccgttttgctgagcggaggcgagagagggtttagagtgatg

SEQ ID NO: 19252 - DNA, 3003 bp, Unknown; identical to SEQ ID NO: 19251
  misc_feature (1)..( 3003): 2750-1469P.txt file - cDNA_ID_1821193; gDNA_ID_2926215; Annot_ID_142184

SEQ ID NO: 19253 - DNA, 3003 bp, Unknown
  misc_feature (1)..( 3003): 2750-1469P.txt file - cDNA_ID_1821197; gDNA_ID_1620652; Annot_ID_47769
tcacgtcatatatagaagcagctggcacaagggtaggcgtgttcattatttattgagttgagagttttgagtagtaggaatgtgtagtgtgtgtctagcctataaatcatcattccaagtaaaaaggaaaaaaggtagtgtgaaagctagagctaccaccacattacccaatagtctagggtgaatgacgtggcattgcaccgactctctgctctgcctcacagctgggcctggtactacatgttgatgtcggtcggtctcttgttttctcaagtgatttattaccacacactctatctagctaattgtgttcctattaatcattcatcggacatgttaaactgttgatttcagtcaatgatgagatcttcaatattcagcagattggtagctaagaaacatccatgtgagaacgactctgtcacatctacggcattcattactacatgtgatgatatcttcatacttctccctctcttgtttaagaccctatatcaactgctgatttctttcaagttctaatgatggataacagatttagagaaacacccatgtcttgttgggtttaggctcatgactagaacaggaagagtaaacctttggttcctcttctttttttagtggtggggctgtaaagaagtccaatgacgtgagcagcattaaccaaaaccatcaagtttaacccaatactggcccttttatgtttatgtaagcccatcttctgattcggcccaatcaagacacttcagttagcagtaagattttcaaacttatttttctaataatgtctaaacaatttaaacagtgcttttgctctctttattggataacgtggaccgtccacaccgacaatccattggtcgacgaaacgcagagtattcggacatgtactatgttttttattacactttccgaaaaaaacaaaccttgttccgatcaaagtcggtccttaaaatattgacttgttagtacaatttgccggcaacaccttggctaaacgcgaaccgagtgttaattactataaattaactgtaactaaaataaacaaactaaaagctagagctactataaatacagtgtcgcaggggtttgtgtaactcatcagtcctcacagctagcaaaggaaagtctcgttggtaaattaaaagtgagtcttgaataccttgtttgcgtttttcctaaaagatggcggatcatcctcgttctactgagcagcaagaagctgatgctgcagcttccaaaggctgtgggatgtttgactttctcaagaagaaacccgaagatgtacattcttccgagaatgcccgtgtaaccaaggagcccaaggaagaggagaagccttctctcgctgaaagattccacctttctgacagctctgtaagcttaattgtatactcttgttcttatgcatgagaaatgttaataacacttgttgatggaggatgtgatatatatgtatatgcagtcaagtgatgaggaagcgggtgaaaatggggaaaagaaggagaagaagaagaagaagaagaagaatgaagttgctgaagatcaatgtgaaacagaggagaagattcctgcgggtataggccatgaggatgggaaggagaaagggtttatggagaagataaaggataagcttcccggaggtcacaatggaaagcctgaagctgaacctcataatgacaaggccaaggagaaagggtttatggaaaagatcaaagagaagcttcctggtcataccaatgatgagaagaagaaggaaacctagttataagaagaccctttttttttttactttcgcttttaccacttgcgttttcatcttcttgtattgttgtccacctcgttatgtgtcagtgaaatgccaacttttcgaattgaacaactcttgaatcttaaataactcatactattataacattgaaatcctcaagtatttaaaacctgttgttttcatctgttagtgaaaaaaacctatgtatgtatgaaacgttaaaaccctaaattttaccacaaaaaaaaaacgttaaaaccctaaaaccggcatccaataacccattaaacatataagaagaaacccatgctttctgagcaagaaacggttctgcttagttaggtttgggctgactaaaaagggcccaaaaggcccatttgaaatcacggaaaataggaaaaagttcaaggggaaggagcagccagagacacggagagtctgtgtatgaaagtgaagggaaaaggagatcgacgtctcctctcagactctcacgggaagaagacagtctgtgactttttgtgtttccagctgttttcatatcatttctcaattctcactcgtatacctgacaatttgggttaccaagttgaccgttgaaatttgtgtttatataataagaattttgtggactattactaatttactagtattattttatacttccagcatatatacatacatacattgcttcttcatattctctacgcgttcaatcaatatttctcgtgtaggctggctatttgtgccaaaatacaactcaaattgtttcaccccaaaaaaaaaaaagcagatacaataaaataaaatttatataattatatgttaattctcatttgtgtaaaatattgaagcagcttaaaataaaataaacctcacagtaaaaatgaaataaaataccttgcaattaaatgagaatgcttatttttaacaaaataaaaaataaataaaaatcaatgcatcaccggattgggattttattttctttcaaaaaaataaaataacaatccccaacccaaaggacaaaataatgggtatttaattagtaggtggggtggccttataatatattacaggttgaaataaaaacacggaattagctgattggaaaagcttccccctccccattggactttaaatacgacaccagagtcatttgttccgttactacaaaacagagttgaagctttctcttccaactttatcttcttcttcttcttgtcaaagcgagtatg

SEQ ID NO: 19254 - DNA, 3003 bp, Unknown; identical to SEQ ID NO: 19253
  misc_feature (1)..( 3003): 2750-1469P.txt file - cDNA_ID_1821197; gDNA_ID_1620652; Annot_ID_163500

SEQ ID NO: 19255 - DNA, 3003 bp, Unknown; identical to SEQ ID NO: 19253
  misc_feature (1)..( 3003): 2750-1469P.txt file - cDNA_ID_1821197; gDNA_ID_2926215; Annot_ID_142182

SEQ ID NO: 19256 - DNA, 3003 bp, Unknown; identical to SEQ ID NO: 19253
  misc_feature (1)..( 3003): 2750-1469P.txt file - cDNA_ID_1821197; gDNA_ID_2926215; Annot_ID_202920

SEQ ID NO: 19257 - DNA, 3000 bp, Unknown
  misc_feature (1)..( 3000): 2750-1469P.txt file - cDNA_ID_1821213; gDNA_ID_1620652; Annot_ID_47764
ttctaaggactccccttctttccaatatgcaggatctgtagagttgggttcagctggcgtttccatggccattttcaataccatatcaaagctcttcaacattccgctcctcagcgttgccacttctttcgtcgctgaagatattgcaaagattgccgctcaagatttagcctcaggtatacgttgataatagcttttttctcttcccaatttttcccagccttatatctctttgaatggatttacagaagatagtcagagtgacataccttctcaaggtttaccagaaaggaaacagttatcttcagtgtcaacagcgctagtgttagccattggaattggcatcttcgaggcactggcattgtctttggcatctggaccctttctaaggttaatgggtatacaatctgtaagttcggtccagagagtgcttattgtcttctatgtcttacgaaatttcgtgagaaatctatgctgaggaatgcatgttttctgtctttttttttacctgaaacccagatgtcagaaatgttcatccctgcgcggcagtttcttgtccttagggcgcttggtgctcctgcttatgtggtttccttagcacttcaaggcatttttcgtggattcaaggatacaaaaactccagtctactgtttaggttagcattctttgagatcttgttacatatccaagaacattagattatctttattgttctcggtttacatcagttctttcgttccctaatttccataattcaggtattggtaattttctggctgtatttctattccctctgtttatatacaaattcaggatgggtgtagccggggcagcaatctctagtgtcatctcccagtatgtatccatagatcttttttcttttcctgttttcctcctttggtcaaccttgtaggatggtgctaaacccctttcctctgattcataggtacactgttgccattttgatgcttatactcttgaacaaaagagttatactgcttcctccaaagattgggtcactaaagttcggcgattacctaaaatcaggtatgtagacactggtttctcccttatgggacttatggatgtaagcactgtattgatatttctaggttttaaacttgacttgaattatagggggatttgttctgggaaggactctttctgtgctcgtgaccatgactgttgccacatcaatggcggctcgtcagggagttttcgcaatggcagcacatcagatatgcatgcaagtgtggttggcggtatctctgcttactgatgcactagcttcatctggacaggtattagattctcagcttggttttcatacctagagattttggctatagctttcttcatctctttggtattaaatagaatgtaattaagcctcgtgtgtcttgttgagcaggccttgatcgcgagctctgcatccaaaagagactttgaaggtgtgaaagaggttactacttttgttctgaaggtctgagcctacttcccttttcgcagttcatattcactttttggggatgctacttgatctcttgttatatatatatatatagagagagatgtaacgtgtttggtgttgtacagataggagtggtgactgggatcgcactggctattgtgttggggatgtctttcagttcaatagctggtttgttttccaaagaccctgaagttctgcggattgtgagaaagggtgtattggtgagtgatgtaattacatagagtgggccgagcttttcctgttatattcacgtaacatgcattcagtttgtagcggcgactcaaccaataacagcgctagcgtttatctttgatgggctgcactatgggatgtctgacttcccctacgcggcttgctcgatggtaaggaagagagagagagagagagaagtcctctttgttaaaagaaaagataagatatagggtgattgattgatttgtgtgtgtgtggcagatggtggtgggaggaatatcatcagcgttcatgctgtatgcaccggcagggttggggctaagtggagtgtgggtggggctgagcatgttcatgggattgcggatggtggctggattcagcaggtaaagaaagagctacctgtatctatctataaataaatacaaggtgaaccaaaagtgtaatttttgtggtaataataaagctctcaaatgtgtgtgtgtatggtagattaatgtggaggaagggtccatggtggttcatgcataccagtgacaaggtgagagagcctcttctacgcttcttcttatagtttttattctattttttggggacctgcaattgcaaagcttttcttgttaactctgtttcctgtggattatatggcagcgtcttgcttaaaactgtgaaagagagatagagaaggagagagtgacgtgcccagtcatcttcttcatcaccttttcacatatacaacaaccacagatccaaaaaactgtcttttataattcgatttgatagattttacttattagctagctttgtttgtcactcatttttcgatcatcaatatataaaatatgtcgacttgtgaatttacgacaaagaagaaaacttaatgtaggcaaaagccaaaaccgatgcttgattgcagtgctgtgtatcaaaaacacatatttgccgtatttagctacattttgacaattgtgtagtgcagcaatatccacgaagaatggtgaataaatattccttattacagtatttaaaaaaatatcggattagaaggaaattagtgactgtaaatgttaagctttgactaaaagataagggataaaagagataagaatgcagccagtcaaaaccttagaaattactgatatgagattttcgataaaaattaggaattagaagaaattagtgaatacgaccgtataaatatcaaacctcagatagatagagtaaatgaaatgtatagagaggtaaagtgggaattttgacattggtgggtttaggggaaaaacagagagaaagagatg

SEQ ID NO: 19258 - DNA, 3000 bp, Unknown; identical to SEQ ID NO: 19257
  misc_feature (1)..( 3000): 2750-1469P.txt file - cDNA_ID_1821213; gDNA_ID_2926215; Annot_ID_142177

SEQ ID NO: 19259 - DNA, 3003 bp, Unknown
  misc_feature (1)..( 3003): 2750-1469P.txt file - cDNA_ID_1821217; gDNA_ID_1620652; Annot_ID_47763
tgccacagaaggaaatcgtgaacaaagattatatatacggttaataataaactggaatatagacagacgaagcaaaacatagaaactacctgctcgattctgtagaatggcgaaaggtgggtatcaaagaactttttctcttctgctgctttgctttcaggaccaacccacaactacaacatgtagaaattcacatgaacaatcataccagtatttgcagttgcttttctgctgaatgatttgtacaattatggtcctggcaaagttaatacataccttttctggtcgtgtttccaccttgaaattatagagacctgaacagagtgcaagaacaatagctactgacatgaagagaacaagagatggatttctagcaatccatgacccatatgatctgaggcaaacaattggaaacaattacgaatttcatctcatctaattgtagagataacttgcgagtaagatacagacaacgaaacaaaatcctggagattcacctgtaaaattttgccatatatctctgaacaggagagagttgagcatgtctttgcacctaagaattagaagtcaattgatcaattagttctttcctccaaacagattaaatcttcaaggatagtccagcatttatgtgggtatataaatgtattttatgttatatatacatacacataagaactacaatttctagccaatacattgatataccttgacaccaagtatgttttccttcatttcactattaattccatcttcttccacaggatgcaatagtggctttgagctatcaagaggctgtgtcgtatttcttcttcgatttaaaccagcccatccgaagaagcaagacaccagcaagacgtatacaagtgccattgataactcaatgcatctaacctgaaaatacaaatcaatataatcaaatccaagatcataccaactcaataatgttttcaagcaacaatgggataattcataactcacaccttaagaggaccgattctaattgagcaagaatcttcatcatggggcggcaggggttcgggacttgagcaagctggtgaggaagggcaatcaccacaagagcatccaagggatgtgtcaccacatgaataaacagatacattcattggtaccatcgcagatgactcagggatgcttgatttgaagttgatcgcatatggtgaaccaggaaagccagatggtgctttctgaccaataaacgtaaaccattctggaaaagcagaagtaaagatgaaacatggaacttttgaaacaagataaagcgtgtatggaacgccttagaacaaaactgcagagcacctctgaagtttttagcaccaccgccaacaaagttaattgcacgtgtgttcattgttccaaatttcacctctttacaggactcgtaaaggccttctccaaacgtatcagttatgtgatagtctataccatccactgtcaaatttccactcacctagaataaatcccaactagctagtgttgttaaccatataaatgggtgtcaagtaaccaacaaaagctgaaaaaaatggaagctaacctcagcaacagaagtgacgttgatgaaaagagactgatttggagaacaggagagctcgcagaacaaatttaagaagttccgtaagcatgcaggacaacccacaagaaaagggacagcctaaaagagattgcattgacaacgaattagtaaaaatggcctgctctgataatagcaaaaacaagagaataagaaaaaggtcatacctgttgaacttgagacctcaaagtgtcaaactgagtctctgtacaacagacattgccacttatggttgggcaaaggctttggattttggcagaaaacagttcatcaggctgcagaaaggaatgtcagattgactcagacatgcagaagtaattggaaaagtaatggtcttactccatgatctgaaaagttgtctacctgaatggaaggggaggcataaggacagttaaggacttttccatcgctgcggtgtccgcaaatgtcatacatagcgcaatactcttttgaatgtctattattactgagcagcagtacagattaccgaaagagagatgaataagagattgagaaaaaaggaaggccatatgtctcggtcactaaaatgcaaattaccttggttctgagtgggtcaggtttgcggtgagtaaaagtgagaaagtaaagagctgcaacatgacaatcattcccaattatacgataatagcatcgatagaagtcagaggcggaaatcgttcaataaaagcaaaggcctaataagaagaagcacacaaagtatatgcaatttgcataacgaaaaaacccagaaagaaaacataacaagtttttttttaaaaaggaaaatttggcaagaaacgctaggacaagacagaaaatgaagaggattgcctgtaagaggagaagcttggtaggaatcgccatgttttgtctgaagagcaattaagcaagcagttggggtttatttaatcttggcgtagtagttagttgcagagagattggattgttgactaaaattgaattggagagtaaagtaaggagagtcgggagacacgaggcaagaggaggacggtgatgatgagtcagtaccagtaacatctgcttgccgttttaaatgctaacaattgcaatgcatgccgtttttacgttttcttttaccatcaaagttagatgaaaaaaaaggcatctcttttgtcttgtttgttttttctcatcatcctctcatgggtcgtccattgcagacgtgagctcgtctgatcaaatcctccttggcttctcttcgttttctccaatccatttctttgtttataccaaacttcatgtcattaggtcctccgatcattcttcgaatcggtttttgtgtggcggatccagtttaatcatcatcaattcatcatcatcatcatcactggtcgcagctgaattcgattctttgattgggcttgtgggatgggaacttgttcctgatg

SEQ ID NO: 19260 - DNA, 3003 bp, Unknown
  misc_feature (1)..( 3003): 2750-1469P.txt file - cDNA_ID_1821217; gDNA_ID_1620652; Annot_ID_163494
acgaagcaaaacatagaaactacctgctcgattctgtagaatggcgaaaggtgggtatcaaagaactttttctcttctgctgctttgctttcaggaccaacccacaactacaacatgtagaaattcacatgaacaatcataccagtatttgcagttgcttttctgctgaatgatttgtacaattatggtcctggcaaagttaatacataccttttctggtcgtgtttccaccttgaaattatagagacctgaacagagtgcaagaacaatagctactgacatgaagagaacaagagatggatttctagcaatccatgacccatatgatctgaggcaaacaattggaaacaattacgaatttcatctcatctaattgtagagataacttgcgagtaagatacagacaacgaaacaaaatcctggagattcacctgtaaaattttgccatatatctctgaacaggagagagttgagcatgtctttgcacctaagaattagaagtcaattgatcaattagttctttcctccaaacagattaaatcttcaaggatagtccagcatttatgtgggtatataaatgtattttatgttatatatacatacacataagaactacaatttctagccaatacattgatataccttgacaccaagtatgttttccttcatttcactattaattccatcttcttccacaggatgcaatagtggctttgagctatcaagaggctgtgtcgtatttcttcttcgatttaaaccagcccatccgaagaagcaagacaccagcaagacgtatacaagtgccattgataactcaatgcatctaacctgaaaatacaaatcaatataatcaaatccaagatcataccaactcaataatgttttcaagcaacaatgggataattcataactcacaccttaagaggaccgattctaattgagcaagaatcttcatcatggggcggcaggggttcgggacttgagcaagctggtgaggaagggcaatcaccacaagagcatccaagggatgtgtcaccacatgaataaacagatacattcattggtaccatcgcagatgactcagggatgcttgatttgaagttgatcgcatatggtgaaccaggaaagccagatggtgctttctgaccaataaacgtaaaccattctggaaaagcagaagtaaagatgaaacatggaacttttgaaacaagataaagcgtgtatggaacgccttagaacaaaactgcagagcacctctgaagtttttagcaccaccgccaacaaagttaattgcacgtgtgttcattgttccaaatttcacctctttacaggactcgtaaaggccttctccaaacgtatcagttatgtgatagtctataccatccactgtcaaatttccactcacctagaataaatcccaactagctagtgttgttaaccatataaatgggtgtcaagtaaccaacaaaagctgaaaaaaatggaagctaacctcagcaacagaagtgacgttgatgaaaagagactgatttggagaacaggagagctcgcagaacaaatttaagaagttccgtaagcatgcaggacaacccacaagaaaagggacagcctaaaagagattgcattgacaacgaattagtaaaaatggcctgctctgataatagcaaaaacaagagaataagaaaaaggtcatacctgttgaacttgagacctcaaagtgtcaaactgagtctctgtacaacagacattgccacttatggttgggcaaaggctttggattttggcagaaaacagttcatcaggctgcagaaaggaatgtcagattgactcagacatgcagaagtaattggaaaagtaatggtcttactccatgatctgaaaagttgtctacctgaatggaaggggaggcataaggacagttaaggacttttccatcgctgcggtgtccgcaaatgtcatacatagcgcaatactcttttgaatgtctattattactgagcagcagtacagattaccgaaagagagatgaataagagattgagaaaaaaggaaggccatatgtctcggtcactaaaatgcaaattaccttggttctgagtgggtcaggtttgcggtgagtaaaagtgagaaagtaaagagctgcaacatgacaatcattcccaattatacgataatagcatcgatagaagtcagaggcggaaatcgttcaataaaagcaaaggcctaataagaagaagcacacaaagtatatgcaatttgcataacgaaaaaacccagaaagaaaacataacaagtttttttttaaaaaggaaaatttggcaagaaacgctaggacaagacagaaaatgaagaggattgcctgtaagaggagaagcttggtaggaatcgccatgttttgtctgaagagcaattaagcaagcagttggggtttatttaatcttggcgtagtagttagttgcagagagattggattgttgactaaaattgaattggagagtaaagtaaggagagtcgggagacacgaggcaagaggaggacggtgatgatgagtcagtaccagtaacatctgcttgccgttttaaatgctaacaattgcaatgcatgccgtttttacgttttcttttaccatcaaagttagatgaaaaaaaaggcatctcttttgtcttgtttgttttttctcatcatcctctcatgggtcgtccattgcagacgtgagctcgtctgatcaaatcctccttggcttctcttcgttttctccaatccatttctttgtttataccaaacttcatgtcattaggtcctccgatcattcttcgaatcggtttttgtgtggcggatccagtttaatcatcatcaattcatcatcatcatcatcactggtcgcagctgaattcgattctttgattgggcttgtgggatgggaacttgttcctgatggatatattaaagtcttaccatctcctagctgctgcttactcggctcctgcgtgggcaagctttatg

SEQ ID NO: 19261 - DNA, 3003 bp, Unknown; identical to SEQ ID NO: 19259
  misc_feature (1)..( 3003): 2750-1469P.txt file - cDNA_ID_1821217; gDNA_ID_2926215; Annot_ID_142176

SEQ ID NO: 19262 - DNA, 3003 bp, Unknown; identical to SEQ ID NO: 19260
  misc_feature (1)..( 3003): 2750-1469P.txt file - cDNA_ID_1821217; gDNA_ID_2926215; Annot_ID_202914

SEQ ID NO: 19263 - DNA, 3000 bp, Unknown; identical to SEQ ID NO: 3591
  misc_feature (1)..( 3000): 2750-1469P.txt file - cDNA_ID_1821221; gDNA_ID_1620652; Annot_ID_47762

SEQ ID NO: 19264 - DNA, 3000 bp, Unknown; identical to SEQ ID NO: 3591
  misc_feature (1)..( 3000): 2750-1469P.txt file - cDNA_ID_1821221; gDNA_ID_2926215; Annot_ID_142175

SEQ ID NO: 19265 - DNA, 3003 bp, Unknown
  misc_feature (1)..( 3003): 2750-1469P.txt file - cDNA_ID_1821237; gDNA_ID_1620652; Annot_ID_47756
taatggcaaaagcatatgcaaatattgccaaatcaaaaaatgtaaccaatctgtacgttttcttgatgcagcagtgtggagaaaataaacgtgttataggtaaagcaacctctgatgctgaccttccttcaaggtacttttttacattcctcttgtcagcaatctttgtgggacaacaatctttgttgaaactttttccatcccattttctttgctagcgctcttgatcaagcaaaagccatgggccatgcactctctcttgcaaaagacgagttatatgactgccatgaacttgcaaaaaagttccgggccatccttcagtccactgaacgcaaagtagatggactgaagaaaaagggaaccttcttaattcagctagctgccaaaacatttcccaagccattgcattgcctgagtctgcagctagcggcagactattttattctaggtttcaatgaagaggatgcagtgaaagaggatgtcagtcaaaagaagcttgaagatccttcgctctatcactatgcgatcttttcggataacgttctggctacatcagtggtggtgaactccactgtcttgaatgcaaaggaaccgcagaggcatgtgttccatatagtaactgacaaactgaattttggtgcaatgaagatgtggtttcgcatcaatgctcctgctgatgcgacgattcaagttgaaaacataaatgatttcaagtggctgaactcctcttactgctctgttctacggcagcttgaatctgcaaggctgaaagaatactatttcaaagcaaatcatccttcatcaatctcagctggcgcagataatctaaagtaccgcaacccaaagtatctatcgatgctgaatcatctcagattctaccttcctgaggtttatccgaagctggagaagattctgtttctagacgatgacattgtggtgcagaaggacctggcaccactatgggaaatagacatgcaaggaaaagtgaatggtgcggtggagacgtgcaaggagagcttccacagatttgacaagtacctcaacttctcaaatccaaagatttcagagaattttgacgctggtgcttgtgggtgggcatttgggatgaatatgtttgacctgaaagagtggaggaaacggaacattacagggatatatcactattggcaagacttggtaaggcattggaaatttctcaaaagaaatacatataaatatttttggatgatgaatggatgtgtcaattaatatatgattgatgcagaatgaagacagaacactgtggaagctgggatcgttgccaccggggctgataacattttacaacctgacgtatgcaatggataggagctggcacgtactagggctgggatatgacccagcgctaaaccaaacagcaatagagaatgcagcggtagtgcattacaatgggaactacaagccatggctgggtttagcattcgccaagtacaaaccgtactggtccaagtacgttgagtacgacaacccttatctccgacggtgcgacatcaatgaatgaatgaagagatggtggaggtagtatacatgatgaagcactcaaaggaaactaaataagtaaaaattgttttcagtttaccataatactaggaatcagcagacaatcacacatgacgattaattaaatagaatctcttgtttttctcaaactcagaaaaactcaccaaaggaaactgaacaatcttttcactcggagtgttgttcttcacttgtttttttggtatcaacgtgactgaaaagcatatgggccttagaatgcgatgctttgtctatatacagtgtgtacagtgagtaaaactgccccgtgaatgcacataatgggccttacactggcccatcattgctttactctcctctctagctagcgacgagatgagtaaaacgccatctctcggagcggaacggctctgctctgctcttatcctctgtctgatccgtctccatcaccatctccgttctacaggtaaattgttttgcttcgcgctcctccgattgattattcactgatcagattctaataattataatcctgagtcctcgtttggttgatgttgaagcaccgcagatcctctttgaacttgttatttgtaagcttcttcttagtttctccttaatcgcagtgaaatggagattccggaggggacatcaaaagattcagaaaaggccaacgaacaagattcagtgtcatcaattggggcaaagaaacctccactggaatctccagccactactaatgctgcaagcggtcgacttgtttatgtccggagaagagtggaggttgacacatccaaagcagctgctagcactactaatccgaacccgcctcctactaaggcaccacttcaaataccttcatcacccgcacaggaaccaacccctaccagccataagttagactgggaagagcgttaccttcatcttcaaatgcttcttaacaagcttaatcaatctgatcggaccgatcatgttcagagtaagctcctcccagtatcactctaattcctaaccttgatgcttctgtttttttatatatatatatgtttccactgttattagtgctttggtcactttcctccgccgagcttagcaagcatgctgttgacttggaaaagaggtctattcagttctctctcgaggaaggtactctactcctttacttacactctctcacttcctaccattgctgaatcatatctgtttggcacagttctagttgaccatccataagtggattattcatgctgctgcttaagccattttttccatatctgctgacaactatagaggttttagtcacatgcttttaggtttgtagctaggaaccatctggaatcaagttcatgctagaaataatgttgttgatcctctgttgcagcgagagagatgcagcgcgtagcagctttaaacatgttaggaaggtctgtgaatagtctaaaatctacatcaaatgagtgaagggaaatg

SEQ ID NO: 19266 - DNA, 3003 bp, Unknown; identical to SEQ ID NO: 19265
  misc_feature (1)..( 3003): 2750-1469P.txt file - cDNA_ID_1821237; gDNA_ID_2926215; Annot_ID_142169

SEQ ID NO: 19267 - DNA, 3003 bp, Unknown
  misc_feature (1)..( 3003): 2750-1469P.txt file - cDNA_ID_1821240; gDNA_ID_1620652; Annot_ID_47755
ctcaggatgtgaacatagttgcgacatacagtgaccattacggcaatatacgccttggtagggtgaaaatgggggatctttcaccttcttgggttttggagaatcctgcctatcaagttagccgcaaaacaaaaggttcgcaggtaccaaacatttcatgttctggtttttagttttaatgagatttgatcatcagtttaagaatagaactgtatatcctatgggcatatggagttctatagtagaaaacttaaagtgtgtgaagtgattacttaccactcttctcaccgagcaaaaaatacctctcatgaacttcatttgttctaaccttgtgtttcttgaatttatccttaagcttgctcatattctttgttctctagttgctgacatttttttgtatggaattagctagttataccacgggattcatttcaaaatgatactggaatggaagataatgcaagccattctacaactaatcagactgatgaaagcgaaaatcagtttccaaacgtggattttgcaagcccagcaaaactgaagcggcaggtgatctgtcaaatagccttcttttctaatctctggatgccttaacactatatgactgagattgtaacaactgtagaccctttcagattttacgtcaggaaaggagaggtcaacgaactttagagctgatccgacaagaaaaggaaactgatgagcagatgcaagaagcagccattcagaagtcaatgagctttgaaaactcagtcatagggaaatacagtatatggaggagagactatgagagcccaaatgctgatgctatcttgaagcttatgagagaccagatcataatggcaaaagcatatgcaaatattgccaaatcaaaaaatgtaaccaatctgtacgttttcttgatgcagcagtgtggagaaaataaacgtgttataggtaaagcaacctctgatgctgaccttccttcaaggtacttttttacattcctcttgtcagcaatctttgtgggacaacaatctttgttgaaactttttccatcccattttctttgctagcgctcttgatcaagcaaaagccatgggccatgcactctctcttgcaaaagacgagttatatgactgccatgaacttgcaaaaaagttccgggccatccttcagtccactgaacgcaaagtagatggactgaagaaaaagggaaccttcttaattcagctagctgccaaaacatttcccaagccattgcattgcctgagtctgcagctagcggcagactattttattctaggtttcaatgaagaggatgcagtgaaagaggatgtcagtcaaaagaagcttgaagatccttcgctctatcactatgcgatcttttcggataacgttctggctacatcagtggtggtgaactccactgtcttgaatgcaaaggaaccgcagaggcatgtgttccatatagtaactgacaaactgaattttggtgcaatgaagatgtggtttcgcatcaatgctcctgctgatgcgacgattcaagttgaaaacataaatgatttcaagtggctgaactcctcttactgctctgttctacggcagcttgaatctgcaaggctgaaagaatactatttcaaagcaaatcatccttcatcaatctcagctggcgcagataatctaaagtaccgcaacccaaagtatctatcgatgctgaatcatctcagattctaccttcctgaggtttatccgaagctggagaagattctgtttctagacgatgacattgtggtgcagaaggacctggcaccactatgggaaatagacatgcaaggaaaagtgaatggtgcggtggagacgtgcaaggagagcttccacagatttgacaagtacctcaacttctcaaatccaaagatttcagagaattttgacgctggtgcttgtgggtgggcatttgggatgaatatgtttgacctgaaagagtggaggaaacggaacattacagggatatatcactattggcaagacttggtaaggcattggaaatttctcaaaagaaatacatataaatatttttggatgatgaatggatgtgtcaattaatatatgattgatgcagaatgaagacagaacactgtggaagctgggatcgttgccaccggggctgataacattttacaacctgacgtatgcaatggataggagctggcacgtactagggctgggatatgacccagcgctaaaccaaacagcaatagagaatgcagcggtagtgcattacaatgggaactacaagccatggctgggtttagcattcgccaagtacaaaccgtactggtccaagtacgttgagtacgacaacccttatctccgacggtgcgacatcaatgaatgaatgaagagatggtggaggtagtatacatgatgaagcactcaaaggaaactaaataagtaaaaattgttttcagtttaccataatactaggaatcagcagacaatcacacatgacgattaattaaatagaatctcttgtttttctcaaactcagaaaaactcaccaaaggaaactgaacaatcttttcactcggagtgttgttcttcacttgtttttttggtatcaacgtgactgaaaagcatatgggccttagaatgcgatgctttgtctatatacagtgtgtacagtgagtaaaactgccccgtgaatgcacataatgggccttacactggcccatcattgctttactctcctctctagctagcgacgagatgagtaaaacgccatctctcggagcggaacggctctgctctgctcttatcctctgtctgatccgtctccatcaccatctccgttctacaggtaaattgttttgcttcgcgctcctccgattgattattcactgatcagattctaataattataatcctgagtcctcgtttggttgatgttgaagcaccgcagatcctctttgaacttgttatttgtaagcttcttcttagtttctccttaatcgcagtgaaatg

SEQ ID NO: 19268 - DNA, 3003 bp, Unknown; identical to SEQ ID NO: 19267
  misc_feature (1)..( 3003): 2750-1469P.txt file - cDNA_ID_1821240; gDNA_ID_2926215; Annot_ID_142168

SEQ ID NO: 19269 - DNA, 3003 bp, Unknown
  misc_feature (1)..( 3003): 2750-1469P.txt file - cDNA_ID_1821243; gDNA_ID_1620652; Annot_ID_47754
gaggactcgcctcttctcggcaagggacctcccctctccagccagtttaagaccttcgccaacgtcttcatcgctgtcgtcggcgctggtgttcttggtcttccttacgccttcaagcgaaccggatggctcatgggtgtcctcctcctcgtctccgtctctgttttgacccatcactgtatgatgcttcttgtctatacccgccgcaagctcgactctttcaatgctggcatctccaagatcggctcttttggtgaccttggattcgccgtctgcggctccttggggaggatcgtcgttgacttatttatcattctgtctcaagctggtttttgtgtcggatatcttatcttcatcggcactactttagctaatctatccgatcctgaatcgcccaccagtctgaggcatcagtttacaaggctgggttctgaattcctgggcgtgtcttctaagagtctctacatatggggatgctttccctttcagctcggtttgaattcgatcaagacgctcactcacttggctcctctcagcatcttcgccgatattgttgatcttggcgctatggctgtggtcattgttgaggattccatgattatactcaagcaaaggcctgacgtggttgcctttggtggtatgtccctcttcttgtatggtatgggcgtcgctgtctattccttcgaaggcgttggaatggtcttgcctcttgaatcggagatgaaggacaaggacaagtttggcaaagtcttggctctcggcatgggattcatctctctcatatacatcgcatttggtatcttaggttacttggcttttggtgaggacaccatggacattatcactgctaacttgggggcaggacttgtcagcactgttgtccagcttggactgtgcatcaacctcttcttcaccttccccttgatgatgaatccagtgtttgagatagtggagaggcgtttctcacgcgggatgtactctgcgtggctcagatgggtactcgtcttagcagtgactctggtggctctttttgtgccaaactttgcagattttttgtcattggttggcagcagcacttgctgtgtgttaggctttgtgttacctgcattgtttcatttattggtgttcaaggaagagatggggtggctgcaatggagttcagacacagcgattgtggtactaggtgtggttcttgctgtgtcgggaacttggagttccctgagtgagatcttctctgtcaaagtgtgagcgtccgtgaagtcagagattggagaggtttttctctccttgtgtgcaattatgtatatggaattggttgtggttttaagagtaactgtgattgtatttgtattttgatggtttggaataaaagagatcagctctgtcttctgttttgtgtttacatgtacaacatatgtgagagttttgatttctcaatgttacaagcaagggaagctcgcgaaataagcctggctagctaatcaaatgctttggttttgtattattacaaactgttgagtgtgttccttccatgaatcgccttcttcaagatgcctctcgtagaagcaaatctcaccatcaccaccaccatctccatgggacttgacgatgatcgcagagatgcttctggtcccataacgcccctgtatctccatgagtgagactgaatatttatggaaagtgttaaacaaacaatcaatgtactctaaaaaaggaaggttacagttggtctctgcatgtcgacgaagatggagctgagatggtattccgtctctggtgtgaaaacgtgaggtagctcggtttcttcgtccttgacagtattggtcatcacctcctccaccatggtcttcaccgggaattcaccgctcccgttctcagccagaagctgttggaaaccctccctcagcctcagacactgcagagacaaaaacacgcaattgggggagtctgcaaaaggtaaataaagggagaaatggcccacatttacttaccttgggccaaggggagtcgaggttggcgttggaaaggacatggatcccgggagagacttgcgtcacgagcttgtcaccgtggggtggtcggttggtaatgtaaatcatggatttggacaagacatgagcgacaaccaggttaaagccattgtagagtgaaatttcgtcttggatctcctcggcaaactcggccggactcttttcgctctgttctcaccaaaacgttaaaagtactctcagtctctaacatgagagacaatctaaagcatattaggtggtggtgtagacctgcaagtaacgaagaggcagatctccacgggatttagcagcagggaaggaggaggcttccttgaaattggtgaggaaagccagacggccatgcctcgtgcagcccagccacgtcccgccgccaacaaggtctcttcctcccaccgtctctccgtcttcccaccaacgcagcgcctctgtcgcccttgacaatttacacaaaagattagtacaatctcatcaaaggaaacgattacagaggggattgaatcacctgttgtgatcttcatctctgttgagaaatagaagaaaagggtacagcggatgcgattgccacagaaatactgctatgcacattctcttctcctccgacgaaccaacgaaccaaccatctctctgctctaatcaaagtcgtcgtctcttttttttttttttttctccgtcttctacttaaagaaactgcgtgtagtttttcttaccacgaaacggcagcacgtgcaggttttaacaaacctctcgattgattgatttgctttaaagaaagctcgccggcgatgtggtaatatcagtcagatccagatgacgacgttctctacatgcgccgcctttttatcgctggtacctagcttgattgttctctctccgttcgatatgattatctatatttacttagctcgtcctggaattcgcactactctcttaaaatggatcatctgatcaaattgtgccttaattttttgacatg

SEQ ID NO: 19270 - DNA, 3003 bp, Unknown; identical to SEQ ID NO: 19269
  misc_feature (1)..( 3003): 2750-1469P.txt file - cDNA_ID_1821243; gDNA_ID_2926215; Annot_ID_142167

SEQ ID NO: 19271 - DNA, 3000 bp, Unknown; identical to SEQ ID NO: 3569
  misc_feature (1)..( 3000): 2750-1469P.txt file - cDNA_ID_1821247; gDNA_ID_1620652; Annot_ID_47753

SEQ ID NO: 19272 - DNA, 3000 bp, Unknown; identical to SEQ ID NO: 3569
  misc_feature (1)..( 3000): 2750-1469P.txt file - cDNA_ID_1821247; gDNA_ID_2926215; Annot_ID_142166

SEQ ID NO: 19273 - DNA, 3003 bp, Unknown
  misc_feature (1)..( 3003): 2750-1469P.txt file - cDNA_ID_1821250; gDNA_ID_1620653; Annot_ID_47802
tcttcacgtcggcgacagtgaagtcacgtgcacccttgaagaagtagacggctcggacgtagtggagcttcatggctaagtccatgggtgtgagctgtcgtggcttgttctcacctaccacagaagcaggcaccaccgaagagagcctgacactggtcactgggcttccctccattttatttttgtgagagagctgatatgtgtagcttataggcttaaatgggatgtgttatataaggattgagtttcgaaagagagttgagttcagaataggcatgggtatcactgatttaggacagttgggaaaactgtttccgtgacggcaacattaaatgtgggtgggatttgggtctttagcaacaacattagagttggacagttgagtcatcatattcagatccatccaacaacaagcacactttattacgtccaccttgtccttattggcttcaagcaataaacgcacatgtacgtgtcgtagccaactagtattatattacggtacctaacaagtcacattaatctataaaaaaccaagttcagtttcctggtaacattgtttccaccagcaaaaatgatcttaatacggatgcggttcatttccacctcaaacacaatcatgcaacaaatttcctgataatgattttacataattgtacgataactaaatcttgcgaaaaaacagtaaaatttttggtagagaacatccctattgccaaccaatctactcctaattgcgccctcagagatgttcatcattcgctgttgtgtcttgttaagaaaataaacacaagtcactgaacaatacctagttcgaaagagtcaacggtgatctttccaggtacctcagatgcttggacttggtgtattttcactaggccagttgtcctgattaattgcttgactcatcgcatgtagcaccatctagagaagcagcaaggtactcagcaaggctctgctgattactgctagttttgtgggtagcttctgaggtcacagatttttttggtgctatagacttgggaagccaggcttgacctgttgagctgctgctcgaagcatctgagcaattcttccataagactggcttaagatgcttccatggatcttcagccatagagttggagtaaaatcgttctgcccctggttccatgggtcttcttcctccatctctcccaaagcttgtgttcataccgcgtcctcgacttctgcctcttcctgagttaggatacgtgtttccaccccagtttgcattttgtcgtccataattggaaaactgtggaggagtattgttgtagctgcctcgaccaccaaatctattattccccatgttcggcatttcttgagagaatggaaaagggcgaggtacccattgaggtggacctgaatggttaactggtggaggcctaaagttgttattccaaccggcgggtggacctctgtgtgagggtgaaagatgtgccatccctcttggttcataatgagctgcatgaaagccaccatgattggtctgtgcctgatactcactacataatgatcctgttcaaagttataatgcaaggatcagaactggattactgttcattgcaaggcacaggacacaaacctaactgaattccataattgatgtgattttcatactgtcaattcctagaaagtgaaacttaaagagatatatcaaattaaagtagctaaagctaataagtttgaagcctgagactgagagacaaatttcttcctccattgatcttgatttgtagattataatcaagaacacatgactaaacccaaacaaagaacaaaaatttcatatagatttgtagaagagaatcatcacctaactctacgaaagcccaacaaccaaataccaaagtgaattcctgattctgttcaatcctatacctatactcaccaaggaccaactaacatactgtaagttaaactctcatgatattaggcaatcttctttatcagtggactactttctttggcctcacaagaatatagacaaaacaaaaattaagacagagtcattgactatcaaggcagaaacaagcacctggaggaactgatggtggaaactgaggtggtacaggagagcttccttgatgactaggagatgagatgtattgttgcttaggggtcttgtttttcttgaaactagaataagcagccatgggatcggtataataatcaaacctttgcgtttcaaatgaatcctgctggtgattggatgtctctgccaatggattggagaggtgacctgtgctcatagatgtttcagtacctgtagtagcatcatcatcattctgcgctgcagcttccattcgcattgcttttaacatctgttttcttttctctgaatcttccattgtgattcaactacaagatcaaaaggaaatttagaaatcaatccttcaaaatccaaaacacgagctactacaatgtaaaagcattagatacataatcaatctgaccttaaaaccccaaattcttacaattatcggatacccaaattggaaaaacgaaattgaaggtgaaacgaaccttcacaaaagtatggtttctccaaaaatcttcactttctcgtgaaaaccttcaactgtgaaacaacgatgatgacgaagcctttcactacataaacgaagacttccaaaaccgggttagtgttcgaccgtatttttcaattaaacccggtttactggtttaagcgattgaaatcattaaaccggcccattaaattttccgatagaaccttctctcagtcgctcaattgcccgaaaacaaaagtctctctctctcgatcgacgccgcaacgtgctcctttcaggtgatctgcttcttattctccatttcgtcatctctgttgtttctagatttggatcacgttttttctttcctcgatctagtgtttgttttaactgttttcgtaatttctgatcagatttaaccggaaaagttgaatcacactgtcgcatctctcacagtcgtcggagaagaatg

SEQ ID NO: 19274 - DNA, 3000 bp, Unknown; identical to SEQ ID NO: 3621
  misc_feature (1)..( 3000): 2750-1469P.txt file - cDNA_ID_1821254; gDNA_ID_1620653; Annot_ID_47801

SEQ ID NO: 19275 - DNA, 3000 bp, Unknown; identical to SEQ ID NO: 3621
  misc_feature (1)..( 3000): 2750-1469P.txt file - cDNA_ID_1821254; gDNA_ID_1620653; Annot_ID_163561

SEQ ID NO: 19276 - DNA, 3003 bp, Unknown
  misc_feature (1)..( 3003): 2750-1469P.txt file - cDNA_ID_1821254; gDNA_ID_2926185; Annot_ID_140759
atacaccatttagtcacatttaccacacagatgcaacatctgaaatcgagaaacttaccttcagtggaatgaagctcattgtgactaaggtctaacatttggacaaacagcaacttctcaacagaggctatccgagatagtgataagttatttagccgtagacatacaagattgttcatatccctatatcgcaaaaggtgtcttgacaaagattcactgcttgaagtcacctgcatgaacattctctttatgagtagtaggcatgatgaaacagaattaaggaaaaaatctagaatcgaacaatcaactttatactgtagacgagaatcggggaaaatcataactccgatgaaaattttaatagcaaaagtttaacataagattcacagcaacaaggaagactaagtaccttgtggagaaaagctttgctgtgctcatccttgtagtactggtagtgtgaagaatccagcgccatcaaatcgttatacagctgaaggatttcttcatagtgaacacccttgacagcatcatccgataccatagcttcacgagccatcaaaagccttgcaagagtgagctttccaattttgctataaaggaaaaaataacacaacgtttaagactacaatttctctttccaatcaaagagagaaagtatataggatatatacctgtcaggcagtataccgaaacattcaacctcagaatctatagcttcctgacgccatttaaaatccatctcagcatttaaccgatccaaggtgacaagagaattcaaatcctttgacttcgcatcccaaatatcaaatccatccgtccatgaaacaatgccttcttgagaatcttcgacggtatcatgaacatgggctgtaaagacaaactcataaggtgcgttgaagttatatcctctggaagaaacgattcctggagagttcccaactctgatcttcactttgtattcgcaaggatctgaactgacatatttcagacgagcaacccatacacaggacacctgagaatttttgttcggaattggttcccaaacaaggccctcgtttccttttagttcagaatcaattgtaacagtagatgagcttactccaccaacagcttggtcaaagtagagaatcagtggaaaagaacccgactcagaacaaaaagtagtgaacatagatgaagagccactcaagcacccagctccagacagaatgatacttgaaccatgtgaaggccatgaggaagtgagaagaggagtctccacattaagagtttggtcaagaagccaaagatgataaaaccagccactttggtcatctggttccgtaaaaatagccgaatgtacaaagtcatattcctcaggaatctttatatttggcataaacccatcagcattttgtgccaacaaacttgatagaagtacactgcagaatgtgaacaaaaatatatagtaaagaatatgcatacctacgattatgctaaaaaactatttctgaacatgtaaatcagtaaagtataatatatactaaagaatatgcatacctacgattatgccatgcagaatagttgctgaaattgttattgatcatatcatctgtatactgcaactcatcctgttctgatctgttggttagctctacaacaaacctggaaaggaacaacacattaatatgcaagcttgattaacatacacaatgctcctttcaaaaagtgttgacattccctaattttcacctgcgatagttccaagcatgaaaatttctggaatccagcttctggaatttttccaaaagtctcaattcattccctacggatgaatgccctttactcaaaacccactttcgatgatgccaagcaccataggacttgaaattctgcctcaaagcactttctacctgaatttagaaccgacttcacagtaactaataagcaactactttcataaagagcaaattcgtttcttttaattgacaggataactcaccactctgagttcttcatcaagaattgcgctgaccaagtttggatcaggctcaattctggcaaggcgatcctccacagcaagcttccggtagttccatgcggtgtacgcctccggattgatttctagaagcttcgtgcttaactcaatagcttcattggtataactagaaaccaaaaaagcaacaaatgattagtaaataaacaaaggatccttcaaatcgtactaaaaatctgggaagtacactgatccgatggaaatgaaggagaagattgtacattttatcgtgatgattcgtcataaactgagactggagagagcgaagctgaacagctttagcagctgaagctgcttcctcttctggcttagaagcattccttggacgaccgtgcattcttctccgacgactgtgagagatgcgacagtgtgattcaacttttccggttaaatctgatcagaaattacgaaaacagttaaaacaaacactagatcgaggaaagaaaaaacgtgatccaaatctagaaacaacagagatgacgaaatggagaataagaagcagatcacctgaaaggagcacgttgcggcgtcgatcgagagagagagacttttgttttcgggcaattgagcgactgagagaaggttctatcggaaaatttaatgggccggtttaatgatttcaatcgcttaaaccagtaaaccgggtttaattgaaaaatacggtcgaacactaacccggttttggaagtcttcgtttatgtagtgaaaggcttcgtcatcatcgttgtttcacagttgaaggttttcacgagaaagtgaagatttttggagaaaccatacttttgtgaaggttcgtttcaccttcaatttcgtttttccaatttgggtatccgataattgtaagaatttggggttttaaggtcagattgattatgtatctaatgcttttacattgtagtagctcgtgttttggattttgaaggattgatttctaaatttccttttgatcttgtagttgaatcacaatg

SEQ ID NO: 19277 - DNA, 3003 bp, Unknown; identical to SEQ ID NO: 19276
  misc_feature (1)..( 3003): 2750-1469P.txt file - cDNA_ID_1821254; gDNA_ID_2926185; Annot_ID_200564

SEQ ID NO: 19278 - DNA, 3003 bp, Unknown
  misc_feature (1)..( 3003): 2750-1469P.txt file - cDNA_ID_1821258; gDNA_ID_1620653; Annot_ID_47799
agaacctatgatctgtgaccatattacaagatttgaatctgaaaataaattttattcttcccaatatttgtttttgcgaaaaaaagagattatttggaattgctgacgtcacatctctctcaggagattcccacccggaagtatcaactgtcgtcgtgtatcggttgtttccgtagatctctgttaccactttccatccaatttcaacaaattggatttggcaaactttcggatcagaaacgtgctcgggatgaggaggtacaccgagaaagtttggtcttttattcgttcgtcgctgagtttagaataagggattgtcttcatcgtacgactctgtttttgttgaaaatcgaatgctccaaatgaagcagccattacagaaccttaatcagtcgcagaagacagctttagctggtgttttcgtgctccttttcccgattctctatccgaatctcttcagccctcttggtcgcgcctctccttctctcttctccgtcagtctctctctctctatctccgatgatttatttggaatttcacattttgggattgtgaagctgaagaattaagtttggcatttgcaggaatggaatgctccaaggcctagacatttgagcctactccaaggcgctcttgatcgacaaattgtaagtgggtttagctcagtttcttggatgtatctactacgttcctctaaatctttttcttcttcctcgaaccaatgtgtagtcgatcagacaacaagttgagttatggtctcccttggcagatcaaggttggaagccttgcactgaatcttatagaggcgcttgtaagtttccaaatataaagctttcttccttctttcatcgtttacattcatgtgccctgaaaagtttgtattttgattgatgggtttgtcactctttgcagccttgccagagaagtctgaagggtttcttcaggttttccttgacggcggactaaatcaacaaagaatgggagtgagtataagaatttcagtcaatttttatggtggtttcccttctgactcttcttgttccttttgcagatatgtgatgctgttgctgttgccaagataatgaacgttacactcgtgattccacgccttgaagtaaatactgtttggcaagattcaaggtaatctactttgaaacttgtaagttgtctggtgcctgatgaatttggtgatttatgatttggcatttctttacagttctttcacagatatatttgatttggatcactttataagtgtccttaaagacgaggtgcggattgttagggagcttccaatacagtatgcctggagcactcgtgattattacgctacaggtattcgagctactaggattaagactgcgcctgttcacgcttcagcagagtggtatttggaaaatgtcttacctattatccagaggtttgtgctttctaaacctggtgatctatcagatgaataactgcattttaaagtcctggaaaatacgatactacatatgatctggaatgctttatagacaatactaagggagtgttcaatgtagatgtttttctgtcaagtcacgttttttttttgtgtctatctgaggaactatatatgtctgtagttcaatgcattgttactcatatgaattatccacttcgttatgcagttatggcattgctgctgttgctccattctctcaccgtttggcatttgacaatttgcctgaaagtatacagcggttacgctgtaaagtaaattttgaagcattaaactttgttcctcatattcgtgagctaggggacgctcttgtgcatcgactcagaaatcctccttccagctctcaaacatcaggaactatggatccgacagacagaataaacaccattgtaaaagctggtgctggaaagtttgcagtgcttcatcttcgtttcgataaagtgtggtcttaattctcaacaaatgtgcccatttcctggcagtaacatctagttctgacattgcttcatctttttttttaggacatggctgctcattcaggctgtgactttgaaggtggcaaagcagaaaaactggcgctggcaaaatatcgccaggtgatctggcaaggaagggtcttaaattcacagttcacagatgaggagctaagaaacaaaggtcgctgcccgttgacaccagaagagattggtttactgctgtcagctttgggtttcagtaacaatacccgtctctatctagcgtcacaccaggtttacggaggagaagcaagaatctcaacgctgcgtaaactgttccccgggattgaaaacaagaaaagcctagcctctgctgaggaactagctgatgtacaagggaaagcttctctgatggctgcagtcgattactacgtgagtatgaagagcgacatcttcatctctgcatctcccgggaacatgcacaacgcattacaggcgcatagagcctacttgaatctcaaaaccataagacccaacatgatactgttaggacaagtctttgtgaacaagagcttagattggtcagagtttgaaggagcagtaatgaatgggcacaaaaacaggcaaggccagcttcgtctacgcaaacagaaacagtctatttacacttatccagctcctgattgcatgtgtaaagtagcttagcattccccttttactgtcccaatcttttgttgatttttttaaaattttaatatatggtttttatgtactcgatgattagtaaattaattgaggaactcatattatgtacactaaattcaagtttagtaaaaaattggattaatgtgatttacttattgacaaaggtaaaataaaagtcaaataagaaaaggagagaaggacccactcagattcaacgccccaccaccgataactcaattaactctcttctcttggcttctgcaacgctgagccaccatcgtcctcttctcttcctcttcgatctctcctgaatcctcaaaccctggagagagagagagagagtgacgggggaagaagatg

SEQ ID NO: 19279 - DNA, 3003 bp, Unknown; identical to SEQ ID NO: 19278
  misc_feature (1)..( 3003): 2750-1469P.txt file - cDNA_ID_1821258; gDNA_ID_1620653; Annot_ID_163559

SEQ ID NO: 19280 - DNA, 3000 bp, Unknown
  misc_feature (1)..( 3000): 2750-1469P.txt file - cDNA_ID_1821258; gDNA_ID_2926185; Annot_ID_140761
acctatgatctgtgaccatattacaagatttgaatctgaaaataaattttattcttcccaatatttgtttttgcgaaaaaaagagattatttggaattgctgacgtcacatctctctcaggagattcccacccggaagtatcaactgtcgtcgtgtatcggttgtttccgtagatctctgttaccactttccatccaatttcaacaaattggatttggcaaactttcggatcagaaacgtgctcgggatgaggaggtacaccgagaaagtttggtcttttattcgttcgtcgctgagtttagaataagggattgtcttcatcgtacgactctgtttttgttgaaaatcgaatgctccaaatgaagcagccattacagaaccttaatcagtcgcagaagacagctttagctggtgttttcgtgctccttttcccgattctctatccgaatctcttcagccctcttggtcgcgcctctccttctctcttctccgtcagtctctctctctctatctccgatgatttatttggaatttcacattttgggattgtgaagctgaagaattaagtttggcatttgcaggaatggaatgctccaaggcctagacatttgagcctactccaaggcgctcttgatcgacaaattgtaagtgggtttagctcagtttcttggatgtatctactacgttcctctaaatctttttcttcttcctcgaaccaatgtgtagtcgatcagacaacaagttgagttatggtctcccttggcagatcaaggttggaagccttgcactgaatcttatagaggcgcttgtaagtttccaaatataaagctttcttccttctttcatcgtttacattcatgtgccctgaaaagtttgtattttgattgatgggtttgtcactctttgcagccttgccagagaagtctgaagggtttcttcaggttttccttgacggcggactaaatcaacaaagaatgggagtgagtataagaatttcagtcaatttttatggtggtttcccttctgactcttcttgttccttttgcagatatgtgatgctgttgctgttgccaagataatgaacgttacactcgtgattccacgccttgaagtaaatactgtttggcaagattcaaggtaatctactttgaaacttgtaagttgtctggtgcctgatgaatttggtgatttatgatttggcatttctttacagttctttcacagatatatttgatttggatcactttataagtgtccttaaagacgaggtgcggattgttagggagcttccaatacagtatgcctggagcactcgtgattattacgctacaggtattcgagctactaggattaagactgcgcctgttcacgcttcagcagagtggtatttggaaaatgtcttacctattatccagaggtttgtgctttctaaacctggtgatctatcagatgaataactgcattttaaagtcctggaaaatacgatactacatatgatctggaatgctttatagacaatactaagggagtgttcaatgtagatgtttttctgtcaagtcacgttttttttttgtgtctatctgaggaactatatatgtctgtagttcaatgcattgttactcatatgaattatccacttcgttatgcagttatggcattgctgctgttgctccattctctcaccgtttggcatttgacaatttgcctgaaagtatacagcggttacgctgtaaagtaaattttgaagcattaaactttgttcctcatattcgtgagctaggggacgctcttgtgcatcgactcagaaatcctccttccagctctcaaacatcaggaactatggatccgacagacagaataaacaccattgtaaaagctggtgctggaaagtttgcagtgcttcatcttcgtttcgataaagtgtggtcttaattctcaacaaatgtgcccatttcctggcagtaacatctagttctgacattgcttcatctttttttttaggacatggctgctcattcaggctgtgactttgaaggtggcaaagcagaaaaactggcgctggcaaaatatcgccaggtgatctggcaaggaagggtcttaaattcacagttcacagatgaggagctaagaaacaaaggtcgctgcccgttgacaccagaagagattggtttactgctgtcagctttgggtttcagtaacaatacccgtctctatctagcgtcacaccaggtttacggaggagaagcaagaatctcaacgctgcgtaaactgttccccgggattgaaaacaagaaaagcctagcctctgctgaggaactagctgatgtacaagggaaagcttctctgatggctgcagtcgattactacgtgagtatgaagagcgacatcttcatctctgcatctcccgggaacatgcacaacgcattacaggcgcatagagcctacttgaatctcaaaaccataagacccaacatgatactgttaggacaagtctttgtgaacaagagcttagattggtcagagtttgaaggagcagtaatgaatgggcacaaaaacaggcaaggccagcttcgtctacgcaaacagaaacagtctatttacacttatccagctcctgattgcatgtgtaaagtagcttagcattccccttttactgtcccaatcttttgttgatttttttaaaattttaatatatggtttttatgtactcgatgattagtaaattaattgaggaactcatattatgtacactaaattcaagtttagtaaaaaattggattaatgtgatttacttattgacaaaggtaaaataaaagtcaaataagaaaaggagagaaggacccactcagattcaacgccccaccaccgataactcaattaactctcttctcttggcttctgcaacgctgagccaccatcgtcctcttctcttcctcttcgatctctcctgaatcctcaaaccctggagagagagagagagagtgacgggggaagaagatg

SEQ ID NO: 19281 - DNA, 3000 bp, Unknown; identical to SEQ ID NO: 19280
  misc_feature (1)..( 3000): 2750-1469P.txt file - cDNA_ID_1821258; gDNA_ID_2926185; Annot_ID_200566

SEQ ID NO: 19282 - DNA, 3003 bp, Unknown
  misc_feature (1)..( 3003): 2750-1469P.txt file - cDNA_ID_1821262; gDNA_ID_1620653; Annot_ID_47798
tatttcatttcacgtgtaagttcgtcaagttgtggcgtgtgtcttggaaattgatgttttgtttgtagattttaagagctacttctaaaatttacaagagttttgtaattttcaattatggcccattattctcattaattcattaaaaaaattatatacattactatctatatctagcataggtagttttttttttctttttctttggtagacctactgaacaaatatctgatatatcactgactggataaatatctatagagatatttttgatagaaatgagtgttaatttaacgtaaaacaggaaactgagaggagaggatcttgatggattgaacttagaagagttgcagcggctggagaaactacttgaatccggacttagccgtgtgtctgaaaagaaggtttactactatacataaactaatagcatgcatattttccttaacgtggcatataaataataagctgtacatatataaaagtttgactttgttgttgttattggtaaatagggcgagtgtgtgatgagccaaattttctcacttgagaaacgggttagtagttagtacatacaattcgtataactaatggatcataagcctatctatagctagtgactttcttaataagtgaaacagggatcggaattggtggatgagaataagagactgagggataaagtacggctctaaacccttatagatatcatggaataaccttaatctatttttttatgtataagaaaatatgatgagggaacgtatattatatatcggcagctagagacgttggaaagggcaaaactgacgacgcttaaagaggctttggagacagagtcggtgaccacaaatgtgtcaagctacgacagtggaactccccttgaggatgactccgacacttccctgaagcttgggtataatttgtttaactgaacatatttcaaactttttgttgacattttgtatgtggatgtttactaactgtttgttggttaggcttccatcttgggaatgaatctgagagagagaaagatccagcagagttgacttcgatggaagcccacaaatattaagtctaccttttccctttcttttctttgaataagtgttgaaaaagaattgagatgggaaggatgaattctcattgcattgcagagaagcaagtttcagatattgtacgtgttattggtctttataactattttgcaccaaagggattcttcacatcacggacaaataataattttaacactaatgaaacaagtaaatatagtgaaacgataggttttctatagtgattctttacattaacaacaatgaaacaataaatataatattggagaggggtgtgaaagaacaaatatgttaattaatttctacaaatgttttcacctcctttctcgattcatataaaacaaaggtaagtctttgttccttaccttcactctctagaaaagatttttttggccaaaaatatgtattcacgcaatcagcagaacaaaaacctcggaagatcacgtccaacgaaggacctttaggcttaggggtaacgtcatgtcttccacttttgagcaaccttgcaaaccatcaacgaagtctttcatgtgcattttattcaacaatggagttttgtaagaaggaactattgaaaaaactaatggaactaaggtgatctagatagtgaacttagcttttcccaaacttttctttatgcactacaaaatttcaataaattaagtttttagaaaaggttctcaagtgaagttagaattttataactcaaacaatattcatgtacgtgtccaccggttttcatggttagattttgagaaagagtgagtccaaactttttaataacgtttttgattccgtgtaagaatgtgtgattctccctcctcctgaaaccctaacccaagacaggagatctttctaacacattctatactaattcacaaaaatcttccaagttccgtccgatgtgggacaaacaattctaatatcccctctctagttaccgctacgagcctacgaccatcattctttgagtcgaagttatacatatgaaatgggaggcgtgattcacgggtgaatcctacatttgagaaattagaacctatgatctgtgaccatattacaagatttgaatctgaaaataaattttattcttcccaatatttgtttttgcgaaaaaaagagattatttggaattgctgacgtcacatctctctcaggagattcccacccggaagtatcaactgtcgtcgtgtatcggttgtttccgtagatctctgttaccactttccatccaatttcaacaaattggatttggcaaactttcggatcagaaacgtgctcgggatgaggaggtacaccgagaaagtttggtcttttattcgttcgtcgctgagtttagaataagggattgtcttcatcgtacgactctgtttttgttgaaaatcgaatgctccaaatgaagcagccattacagaaccttaatcagtcgcagaagacagctttagctggtgttttcgtgctccttttcccgattctctatccgaatctcttcagccctcttggtcgcgcctctccttctctcttctccgtcagtctctctctctctatctccgatgatttatttggaatttcacattttgggattgtgaagctgaagaattaagtttggcatttgcaggaatggaatgctccaaggcctagacatttgagcctactccaaggcgctcttgatcgacaaattgtaagtgggtttagctcagtttcttggatgtatctactacgttcctctaaatctttttcttcttcctcgaaccaatgtgtagtcgatcagacaacaagttgagttatggtctcccttggcagatcaaggttggaagccttgcactgaatcttatagaggcgcttgtaagtttccaaatataaagctttcttccttctttcatcgtttacattcatgtgccctgaaaagtttgtattttgattgatg

SEQ ID NO: 19283 - DNA, 3000 bp, Unknown
  misc_feature (1)..( 3000): 2750-1469P.txt file - cDNA_ID_1821262; gDNA_ID_2926185; Annot_ID_140762
ttcatttcacgtgtaagttcgtcaagttgtggcgtgtgtcttggaaattgatgttttgtttgtagattttaagagctacttctaaaatttacaagagttttgtaattttcaattatggcccattattctcattaattcattaaaaaaattatatacattactatctatatctagcataggtagttttttttttctttttctttggtagacctactgaacaaatatctgatatatcactgactggataaatatctatagagatatttttgatagaaatgagtgttaatttaacgtaaaacaggaaactgagaggagaggatcttgatggattgaacttagaagagttgcagcggctggagaaactacttgaatccggacttagccgtgtgtctgaaaagaaggtttactactatacataaactaatagcatgcatattttccttaacgtggcatataaataataagctgtacatatataaaagtttgactttgttgttgttattggtaaatagggcgagtgtgtgatgagccaaattttctcacttgagaaacgggttagtagttagtacatacaattcgtataactaatggatcataagcctatctatagctagtgactttcttaataagtgaaacagggatcggaattggtggatgagaataagagactgagggataaagtacggctctaaacccttatagatatcatggaataaccttaatctatttttttatgtataagaaaatatgatgagggaacgtatattatatatcggcagctagagacgttggaaagggcaaaactgacgacgcttaaagaggctttggagacagagtcggtgaccacaaatgtgtcaagctacgacagtggaactccccttgaggatgactccgacacttccctgaagcttgggtataatttgtttaactgaacatatttcaaactttttgttgacattttgtatgtggatgtttactaactgtttgttggttaggcttccatcttgggaatgaatctgagagagagaaagatccagcagagttgacttcgatggaagcccacaaatattaagtctaccttttccctttcttttctttgaataagtgttgaaaaagaattgagatgggaaggatgaattctcattgcattgcagagaagcaagtttcagatattgtacgtgttattggtctttataactattttgcaccaaagggattcttcacatcacggacaaataataattttaacactaatgaaacaagtaaatatagtgaaacgataggttttctatagtgattctttacattaacaacaatgaaacaataaatataatattggagaggggtgtgaaagaacaaatatgttaattaatttctacaaatgttttcacctcctttctcgattcatataaaacaaaggtaagtctttgttccttaccttcactctctagaaaagatttttttggccaaaaatatgtattcacgcaatcagcagaacaaaaacctcggaagatcacgtccaacgaaggacctttaggcttaggggtaacgtcatgtcttccacttttgagcaaccttgcaaaccatcaacgaagtctttcatgtgcattttattcaacaatggagttttgtaagaaggaactattgaaaaaactaatggaactaaggtgatctagatagtgaacttagcttttcccaaacttttctttatgcactacaaaatttcaataaattaagtttttagaaaaggttctcaagtgaagttagaattttataactcaaacaatattcatgtacgtgtccaccggttttcatggttagattttgagaaagagtgagtccaaactttttaataacgtttttgattccgtgtaagaatgtgtgattctccctcctcctgaaaccctaacccaagacaggagatctttctaacacattctatactaattcacaaaaatcttccaagttccgtccgatgtgggacaaacaattctaatatcccctctctagttaccgctacgagcctacgaccatcattctttgagtcgaagttatacatatgaaatgggaggcgtgattcacgggtgaatcctacatttgagaaattagaacctatgatctgtgaccatattacaagatttgaatctgaaaataaattttattcttcccaatatttgtttttgcgaaaaaaagagattatttggaattgctgacgtcacatctctctcaggagattcccacccggaagtatcaactgtcgtcgtgtatcggttgtttccgtagatctctgttaccactttccatccaatttcaacaaattggatttggcaaactttcggatcagaaacgtgctcgggatgaggaggtacaccgagaaagtttggtcttttattcgttcgtcgctgagtttagaataagggattgtcttcatcgtacgactctgtttttgttgaaaatcgaatgctccaaatgaagcagccattacagaaccttaatcagtcgcagaagacagctttagctggtgttttcgtgctccttttcccgattctctatccgaatctcttcagccctcttggtcgcgcctctccttctctcttctccgtcagtctctctctctctatctccgatgatttatttggaatttcacattttgggattgtgaagctgaagaattaagtttggcatttgcaggaatggaatgctccaaggcctagacatttgagcctactccaaggcgctcttgatcgacaaattgtaagtgggtttagctcagtttcttggatgtatctactacgttcctctaaatctttttcttcttcctcgaaccaatgtgtagtcgatcagacaacaagttgagttatggtctcccttggcagatcaaggttggaagccttgcactgaatcttatagaggcgcttgtaagtttccaaatataaagctttcttccttctttcatcgtttacattcatgtgccctgaaaagtttgtattttgattgatg

SEQ ID NO: 19284 - DNA, 3003 bp, Unknown
  misc_feature (1)..( 3003): 2750-1469P.txt file - cDNA_ID_1821270; gDNA_ID_1620653; Annot_ID_47795
tataaatagtcgccatcatcatcatcaataaaagaatggtatcaaaaatctcgaagcagcttcctaacttgctccaacgtaacgaagagaacaacagtgaaaggaccttgcctacaaactgtaggaacaaagcctttataaagagccatggctccttccgctttaaccgtcttcaccgcacaatcccacgcgccgtcgtacgctcccaccttcatattcatcactctcgtctttatcacatccaccggattagacgcaaccgaagcaacaaaccccgccgcaaaactcgctaccacgtgagtccctagcccatcattcatcacaccattctccaatatcccttccttgaactgatcgtaagacgctagctgagccgccgtcacaatcatcgctcggttaatcgtcaacgccgagcctcgccacaagctcgttacgccttctcccttaaccatgctcctgattgcgtctcctactccggcgtagttacgacgttgcgctaaaggtaacctcccgtcagcttgcatcctaaccatcgccacgtcagctggatttccaacggcggctccgattccaccagcgactagccctgcaccgatcttcctactcagattcaacttccctgactcaggatcagtccatttgttcttaagcacttcgtatagacccatcctggtggtggaatataacgtctgacggagaagtgtagcggagactcctgagaataacgcggcggcgccttccgatttgactatgttgattccgagtgagatcggtcctactttggggactgaagaagtcgtttccaggaaagctgcaggagaagaattggggaaagcgagagctggacggaggagagtgacggtggtggtggaaggtgcttcaccgtgaagctgaagacgaaccttgattagatcgagagggtgagtagagcaaccggcgattacagaggcaatcccaccttcaacgaaacttttgactcccattgttgtgaaattggagagagaagagagaatgaaattgagatgttgtgagtgaaggagaagaagagggaaacaaaggtatttatttgtagcgagttttgttttgtgacgcggttttgtctgtgttcaatgttgacgaaacgagtgagagagtgtctgattattaaagaaaaccctaattaagtcagacccgccggttataaaaatagtcaaaaagtaggaaaacgcgtgtgtgagtgagacagagacagcccattgtttgctttatgggcttataagcgagacgtgttaattgggctttttcctttatggccgaaaacaaaagaaacgtcgcctgagagattcgaactctcgcgggcagagcccatgtacttagcaggcacacgccttaaccactcggccaaagcgacttgttgctatgagttagacaaaatcattaaaattctctattatgatttctcatagtgtgtgtgtatattgtggatctactaaaaattctttgttattattactttattttgtgaattagtttgatataggtaagtacaaagttaactttattatttactcaaaatttatcagattaactgattttatattgtttcctttggtatatagacgtactatagtttttagaaaaaccataagattcctttatatttcatagagtgaagagatgagatgagatcttggctggagaagaaataagtttccacgaggaggactctttttttttggtgaagacgaggaggaggactcttggttgatccagtctttacgttagacatcgacccctacatttatttgcctttctctatcaacatggcaggtaaaaatcttcattcaaccgaaccaaccaaagtctcttcccaataatattcaagcaccatcctttgggaaactcatacatactacagtctacactctttcattttctttcaacgctcaacttaacaaatgatatagtctagttgtcaattatatgttttaattagtgttttcacatcaaattctggtttgatatttgatgactattttcggaaacatctcaatgtcccgcaaatacaatcgtctatcatatataatcccgtacgttgtattcttatagatagaataatatggcgtgatctttataatataacatatagaatcgtgtagatttattttattttatttttatatatcgcataaattgcaaaatacttatatatgtttgttatatatgatacccattttatagttacttaaaaaaagttaagcgataatatatatatatcaactttttataacaaaaaagtataacacatggtaaagaaaaataaaaatgaagacatggtgtgacacgaaaatggcactaaatatacatatataatagatagctacaatatcccatcatacacacttttttaattgactaatacataacttacacacttttttaattgactaattcataactttttatcattgtcaacatgcaaattcatatttccgttgaactattattcttattttgtttttaaaagaagggcttcctggtaataaaaatatgatttccaaatgacgttagagcaaaaaaaaaaaaaggttgtctggtctggtaaaatgaaaaagcaaagcgtcttggtatagaaaagtaatatactgcctcctaatttcttcgtccttctaccgaagaatctctccactcttgccctctttcgaaaccctaaaccagaagcaccagattttttcaactttttcccagagaacaatagaaaacccaacttgtgctctctagggttttctttattccttctcatctttggattttcttgggtcatcattttggaagcttacccaccagcgaaaaaattataacttccatcgattcctggcttctctctctcgctctctctgcatgtgctaaatcgccggactgatcctcactgtcacctctgttcccggcttattcgccggtgaaatctatggttggtgctcagatttatttccaattgtttgtgcatctggtggaggataaatg

SEQ ID NO: 19285 - DNA, 3003 bp, Unknown; identical to SEQ ID NO: 19284
  misc_feature (1)..( 3003): 2750-1469P.txt file - cDNA_ID_1821270; gDNA_ID_1620653; Annot_ID_163555

SEQ ID NO: 19286 - DNA, 3000 bp, Unknown
  misc_feature (1)..( 3000): 2750-1469P.txt file - cDNA_ID_1821270; gDNA_ID_2926185; Annot_ID_140765
aaatagtcgccatcatcatcatcaataaaagaatggtatcaaaaatctcgaagcagcttcctaacttgctccaacgtaacgaagagaacaacagtgaaaggaccttgcctacaaactgtaggaacaaagcctttataaagagccatggctccttccgctttaaccgtcttcaccgcacaatcccacgcgccgtcgtacgctcccaccttcatattcatcactctcgtctttatcacatccaccggattagacgcaaccgaagcaacaaaccccgccgcaaaactcgctaccacgtgagtccctagcccatcattcatcacaccattctccaatatcccttccttgaactgatcgtaagacgctagctgagccgccgtcacaatcatcgctcggttaatcgtcaacgccgagcctcgccacaagctcgttacgccttctcccttaaccatgctcctgattgcgtctcctactccggcgtagttacgacgttgcgctaaaggtaacctcccgtcagcttgcatcctaaccatcgccacgtcagctggatttccaacggcggctccgattccaccagcgactagccctgcaccgatcttcctactcagattcaacttccctgactcaggatcagtccatttgttcttaagcacttcgtatagacccatcctggtggtggaatataacgtctgacggagaagtgtagcggagactcctgagaataacgcggcggcgccttccgatttgactatgttgattccgagtgagatcggtcctactttggggactgaagaagtcgtttccaggaaagctgcaggagaagaattggggaaagcgagagctggacggaggagagtgacggtggtggtggaaggtgcttcaccgtgaagctgaagacgaaccttgattagatcgagagggtgagtagagcaaccggcgattacagaggcaatcccaccttcaacgaaacttttgactcccattgttgtgaaattggagagagaagagagaatgaaattgagatgttgtgagtgaaggagaagaagagggaaacaaaggtatttatttgtagcgagttttgttttgtgacgcggttttgtctgtgttcaatgttgacgaaacgagtgagagagtgtctgattattaaagaaaaccctaattaagtcagacccgccggttataaaaatagtcaaaaagtaggaaaacgcgtgtgtgagtgagacagagacagcccattgtttgctttatgggcttataagcgagacgtgttaattgggctttttcctttatggccgaaaacaaaagaaacgtcgcctgagagattcgaactctcgcgggcagagcccatgtacttagcaggcacacgccttaaccactcggccaaagcgacttgttgctatgagttagacaaaatcattaaaattctctattatgatttctcatagtgtgtgtgtatattgtggatctactaaaaattctttgttattattactttattttgtgaattagtttgatataggtaagtacaaagttaactttattatttactcaaaatttatcagattaactgattttatattgtttcctttggtatatagacgtactatagtttttagaaaaaccataagattcctttatatttcatagagtgaagagatgagatgagatcttggctggagaagaaataagtttccacgaggaggactctttttttttggtgaagacgaggaggaggactcttggttgatccagtctttacgttagacatcgacccctacatttatttgcctttctctatcaacatggcaggtaaaaatcttcattcaaccgaaccaaccaaagtctcttcccaataatattcaagcaccatcctttgggaaactcatacatactacagtctacactctttcattttctttcaacgctcaacttaacaaatgatatagtctagttgtcaattatatgttttaattagtgttttcacatcaaattctggtttgatatttgatgactattttcggaaacatctcaatgtcccgcaaatacaatcgtctatcatatataatcccgtacgttgtattcttatagatagaataatatggcgtgatctttataatataacatatagaatcgtgtagatttattttattttatttttatatatcgcataaattgcaaaatacttatatatgtttgttatatatgatacccattttatagttacttaaaaaaagttaagcgataatatatatatatcaactttttataacaaaaaagtataacacatggtaaagaaaaataaaaatgaagacatggtgtgacacgaaaatggcactaaatatacatatataatagatagctacaatatcccatcatacacacttttttaattgactaatacataacttacacacttttttaattgactaattcataactttttatcattgtcaacatgcaaattcatatttccgttgaactattattcttattttgtttttaaaagaagggcttcctggtaataaaaatatgatttccaaatgacgttagagcaaaaaaaaaaaaaggttgtctggtctggtaaaatgaaaaagcaaagcgtcttggtatagaaaagtaatatactgcctcctaatttcttcgtccttctaccgaagaatctctccactcttgccctctttcgaaaccctaaaccagaagcaccagattttttcaactttttcccagagaacaatagaaaacccaacttgtgctctctagggttttctttattccttctcatctttggattttcttgggtcatcattttggaagcttacccaccagcgaaaaaattataacttccatcgattcctggcttctctctctcgctctctctgcatgtgctaaatcgccggactgatcctcactgtcacctctgttcccggcttattcgccggtgaaatctatggttggtgctcagatttatttccaattgtttgtgcatctggtggaggataaatg

SEQ ID NO: 19287 - DNA, 3000 bp, Unknown; identical to SEQ ID NO: 19286
  misc_feature (1)..( 3000): 2750-1469P.txt file - cDNA_ID_1821270; gDNA_ID_2926185; Annot_ID_200570

SEQ ID NO: 19288 - DNA, 3003 bp, Unknown
  misc_feature (1)..( 3003): 2750-1469P.txt file - cDNA_ID_1821274; gDNA_ID_1620653; Annot_ID_47793
ttcactaactacatcccaagagctactatcttctgcaaattcaacagctagcttatatagttagttatctctacaaccaaattacacacacattggcaatcttattgagtagataaacaaagctgaaacatcttaccagcaagaacttggggaactgaaacttgagctaattctatcttttcacgaaagtcattacattcaactctagatttgatgagatcataaaactgcacataagaaaacagatcacagaatcatgaaattgagcttctatattctaagttgagctaacatcgatcaaaatcctacgaaacagagagattaaagtaataaaaaagcatactttatcagcttcaggatctcctggatcggaagcagacggttcttccctgtccgattcttcctcctcctcctcctccggtgattcactctgttcgccaccgttttcatcgccgggaagttctagaagctcaagagctctctggcaatccgcgagcagattctgtaacgtctttcgctttacacgaatactatccaaatcgatgcggtttcctttggtttcggcatcatgagtcgagcaagagacttcgatttccatggaatcggaaagttttaggctgaaatttgtgaaagagaagaagatgaatttgatggttctcctccacaattgcgacctacaatatttgtttgttttatttccaccggaaaaaggggaaaaggagagtcgtgactcgtaagacaacaagcaactaaatttgctgaaattagattctattcaatctttgggacaaatattgctttatatatatcttaaagaattttaattgattttaaatatttttattattttgtatataatttttagaaatgtattcttgatttttaaaattttgaaatcagcatacttaaccacaataaaaaccataatcatcaacacttaatcagaaagcaattgagtacttattaaaatctcgataagtgttatggaatacagatggcatatttggcatacataaaatattcccacggtgacgggagctgtaacagtgacggtgacaaacacaacgaagacgtcaaattttttacatacatcacaactttatgcaagaagtaacaacttgttactattttttatgacaacgatctcttgttgttttcaccttctttttttttttttccttttttttttttgtctctgatgtgaactatacaccatagagtcatagacaatagtttgtgtagtgtgtactattctccatttctccttgagtagatgattgatcagtagcagttgataaagtcctttaaaacttgttgaagacgatctctgaggaaaattaattatacttaaataataagatttattctcaccatcgttgtacttcttcggctaattagcataaacatgtcttgtacatgtgcattaactcatctcttatgtgaaattccttattttaagctttcttactacttcgccatttttccttacaaattggattttgttttcacattctatcattaattcccatgtatcgagatggttatgttatgtacttatgtttatcatcgtagtctttgaccattttagagatatgtcatagaaaccaatgtttgaactcttagcaaaaaaaaaaatgtttgaactcaatgtcgttgttaagtgtttccaataagaacaagtaaagagacttatcaaaacactttgtgccatataaatgctcaagttttagtggaatcaggtgaattcatactgtaagtgtcacccaatctgttttttgatcactacagattacattaatgtgattcggttttggtgcgtctacgcaaatcacacttgttaattacttgcaagggaacacgagtagggggtggtggatatgttggaaagcggtgactatactaatttaacttaacactagtaatttcatgatatgacagtcctatatacacttaggtcgctcgcttgtacacctaaaacgcattgccatttgaggcattagtgttgcgcttggacatccaacaaacaagatcgatgctatatccaaatctagattgcataagttatatgaattgcatagtaattgaaacgaagaagaagattgttggatgaatagtcaattaatattgaaacaaccatcaaacaaaaaaaaattaaaattaatcgaaaagcagacgaatgaacgaatccccatgcacgcagcagcattatccaaacaaagataaacaaatggatcacgtagatttattaaactattcaaaccaataacatatcataagcaaaacaaatcagacaaacaaaaacagagagagtggtggatggtcgtgcttagcacgattcagtatattactgaggtcagagggtcaaatcaatgcaaggtgtaataaggttgtcatctccattaccattttttattacaaagagaaagagagattcttatttactctaaattaatgtcttaaactttattttgccaagactctaagacatattaagtagcatataatccataaaactatagagtagagagtaattataagagtgttaatataaattcggtataagagaaataatggttgagagaagagggaagaggtcaaagggggagaaagagggaaaatttccctccaaggaaggggggaagatgatgacgtgtacaactgccaaaataaaagcaaaggttcctcttttttcggccatttttttcgcttcacctcttctcctctaacgccgttgaactcatcaatcaatccattcacaaccaaaatctctctcaccatttctctccctaaaacaccattttcgctatttttatttttaattgatactttttttttactatcattcccagatcaaggtttgtttctcgatcgaattcatgcttctctgatctgagatcagttagatacgactgcgttttcctcctcgaatttgatcatcggacattctctttttgtttcctgggtttatagtgccgcacgtcaatggcgtgaaccgcggtcatg

SEQ ID NO: 19289 - DNA, 3000 bp, Unknown
  misc_feature (1)..( 3000): 2750-1469P.txt file - cDNA_ID_1821274; gDNA_ID_2926185; Annot_ID_140767
actaactacatcccaagagctactatcttctgcaaattcaacagctagcttatatagttagttatctctacaaccaaattacacacacattggcaatcttattgagtagataaacaaagctgaaacatcttaccagcaagaacttggggaactgaaacttgagctaattctatcttttcacgaaagtcattacattcaactctagatttgatgagatcataaaactgcacataagaaaacagatcacagaatcatgaaattgagcttctatattctaagttgagctaacatcgatcaaaatcctacgaaacagagagattaaagtaataaaaaagcatactttatcagcttcaggatctcctggatcggaagcagacggttcttccctgtccgattcttcctcctcctcctcctccggtgattcactctgttcgccaccgttttcatcgccgggaagttctagaagctcaagagctctctggcaatccgcgagcagattctgtaacgtctttcgctttacacgaatactatccaaatcgatgcggtttcctttggtttcggcatcatgagtcgagcaagagacttcgatttccatggaatcggaaagttttaggctgaaatttgtgaaagagaagaagatgaatttgatggttctcctccacaattgcgacctacaatatttgtttgttttatttccaccggaaaaaggggaaaaggagagtcgtgactcgtaagacaacaagcaactaaatttgctgaaattagattctattcaatctttgggacaaatattgctttatatatatcttaaagaattttaattgattttaaatatttttattattttgtatataatttttagaaatgtattcttgatttttaaaattttgaaatcagcatacttaaccacaataaaaaccataatcatcaacacttaatcagaaagcaattgagtacttattaaaatctcgataagtgttatggaatacagatggcatatttggcatacataaaatattcccacggtgacgggagctgtaacagtgacggtgacaaacacaacgaagacgtcaaattttttacatacatcacaactttatgcaagaagtaacaacttgttactattttttatgacaacgatctcttgttgttttcaccttctttttttttttttccttttttttttttgtctctgatgtgaactatacaccatagagtcatagacaatagtttgtgtagtgtgtactattctccatttctccttgagtagatgattgatcagtagcagttgataaagtcctttaaaacttgttgaagacgatctctgaggaaaattaattatacttaaataataagatttattctcaccatcgttgtacttcttcggctaattagcataaacatgtcttgtacatgtgcattaactcatctcttatgtgaaattccttattttaagctttcttactacttcgccatttttccttacaaattggattttgttttcacattctatcattaattcccatgtatcgagatggttatgttatgtacttatgtttatcatcgtagtctttgaccattttagagatatgtcatagaaaccaatgtttgaactcttagcaaaaaaaaaaatgtttgaactcaatgtcgttgttaagtgtttccaataagaacaagtaaagagacttatcaaaacactttgtgccatataaatgctcaagttttagtggaatcaggtgaattcatactgtaagtgtcacccaatctgttttttgatcactacagattacattaatgtgattcggttttggtgcgtctacgcaaatcacacttgttaattacttgcaagggaacacgagtagggggtggtggatatgttggaaagcggtgactatactaatttaacttaacactagtaatttcatgatatgacagtcctatatacacttaggtcgctcgcttgtacacctaaaacgcattgccatttgaggcattagtgttgcgcttggacatccaacaaacaagatcgatgctatatccaaatctagattgcataagttatatgaattgcatagtaattgaaacgaagaagaagattgttggatgaatagtcaattaatattgaaacaaccatcaaacaaaaaaaaattaaaattaatcgaaaagcagacgaatgaacgaatccccatgcacgcagcagcattatccaaacaaagataaacaaatggatcacgtagatttattaaactattcaaaccaataacatatcataagcaaaacaaatcagacaaacaaaaacagagagagtggtggatggtcgtgcttagcacgattcagtatattactgaggtcagagggtcaaatcaatgcaaggtgtaataaggttgtcatctccattaccattttttattacaaagagaaagagagattcttatttactctaaattaatgtcttaaactttattttgccaagactctaagacatattaagtagcatataatccataaaactatagagtagagagtaattataagagtgttaatataaattcggtataagagaaataatggttgagagaagagggaagaggtcaaagggggagaaagagggaaaatttccctccaaggaaggggggaagatgatgacgtgtacaactgccaaaataaaagcaaaggttcctcttttttcggccatttttttcgcttcacctcttctcctctaacgccgttgaactcatcaatcaatccattcacaaccaaaatctctctcaccatttctctccctaaaacaccattttcgctatttttatttttaattgatactttttttttactatcattcccagatcaaggtttgtttctcgatcgaattcatgcttctctgatctgagatcagttagatacgactgcgttttcctcctcgaatttgatcatcggacattctctttttgtttcctgggtttatagtgccgcacgtcaatggcgtgaaccgcggtcatg

SEQ ID NO: 19290 - DNA, 3003 bp, Unknown
  misc_feature (1)..( 3003): 2750-1469P.txt file - cDNA_ID_1821282; gDNA_ID_1620653; Annot_ID_47790
tgcagttggtctgcttccagcagcactacaggtaatttgtacataagcgtaaactttctatgaccattctttgttatttacacgaaagcattgtcatcatataggggattaatgttagggagatgcttactggtgctgctttaatggatgaggctactaggacaacttcggtaagtagtacttattgcagcttgtgttgaagatgagtttacttaccaggttttagtagaatgtcatatcatacggttgggtttcctgactcatacactttagatagtctctaccatgactcactctagcctgtaaatttctttcttctttcagatcaagaataaccctgcagcgctcttagctatgtgttggtactgggcttccaatggcgttggttccaaggtgtttttcctcaacttttttgagagttctaaggctatcaaggagattgagttcttattgaccttattactctattcttgctttcttttacaggatatggttgtccttccttacaaggatagcttattgctatttagtcggtatctgcagcagctggtcatggaatcactaggaaaggagtttgatcttgacggtaacactgtaagcatactcttcaattttctctgcagtaccccaaatcaaagttcatgagcatttactgagaactgagaaggtgtaaattggtcttgcaattaatgcccactcttataaatcagaagaccttggttacttaattacttgtgcacatgattgagttcagtttgttaccactccttcatggaagaattgaaacttgtgtactgtttcctcgaccctgttattacgagtgtgatcccaaggaccggttctttgaatttgcaggttaatcaagggttaactgtgtatggaaataagggaagcacagatcagcacgcgtgagtttcatttattcatatagttttactattgagagagcatagcaaataaggagctttttaacagtatttaatttgtttatttcattagctacattcaacagctgagagatggtgtgcacaatttctttgcaaccttcatagaagtgttacgggacagaccccctggtcacgattgggagcttgagccaggtgtcacttgtggagactatctctttgggatgctacaggtctgatttatgaatctcgtttcgcacaaattagtcagagataatatacactctttagtaacactatatatggtgaatttgtccagggaactagatctgctttatatgcaaacggtagagaatccatcagtgttacaatccaggaagtgacaccaacatctgttggggctattatagctctttatgaaagagctgttggtttatatgcctcaattgtgaacataaatgcttaccaccaacccggtagagatattcctcccatatctagaaaccgatgttctgtaattgcctaattgatatttgtttactgaatctgaataaaaaacgatttcaggtgtggaagctgggaaaaaggcagcagcagaagttctcgccctgcaaaagcgggtattgtcagttcttaatgaagccacgtaagaatcagaccgagtccgcttctttgtcaaaaaatcttgtctcgactcatgagagaccacttatatacttctttctgtggctgcagttgtaaagatccggtagagccattgacactggaagagatagctgatcgttgtcatgctcctgaggaagtaacgtccaaatccttgaaacttgttttttcattggtaacttttcgaacgcacgtatcaagaagtttttatctttgaatatgcagatagaaatgatatacaagatcatagcgcacatgtctgcaaacgacagagttctgatagcagaaggaaactgtggatcgccacgaagtatcaaagtgtatttgggcgagtgcaatgtggatgacctgtacgcataacaaaacccaacactttctcaaactccaaactctcattctctccattccttatttctttctgccatgtctatgattttgaaaaagaaaaagattgcaataagagccaggaaacacttgtgtacttgttttgaaataaagataatttcagaatgttacaaatgttgattgtaatgataacattggagatagattcatcaatcaagcaggctcatgtgaaacaatgatctcaacactcttctgcttgttttttggttaggtgttcttttgttgcataaacaaacaaaagcttaagctaatcagcaggttagagatgctcaacaacttcctcccatgtggttagattgtatcaactatagtttcttcaattaaattcacttctgaattttcttagaaaaccccattcagatctaaccaagataactctaaatatttaattttccataataacttttcacttgccacttttgaaattcgaatggaatatgttgacaaaagaaaatggtagatccaccgtaagaaaacaagacataagtcgagtcgattgtccccaccaccacctatttagtagcctaccataacaacaaaaaaattataacgttacaatcccttttatcaattttcaaaaccaagatgttgaatcgctttcccatgtcatcactacccgttatgccatagctcctatcaagctggtgagcgtactaaacgacaccgctttggggaggtcttaccaactcgattgcttttcctctctaccctttcccaaatttgaattcccaattttttcaaaatcaaaagtaaatactaacaaaaagcaaaaatatcaaaaaaaacaaagaaaaatcattttgaagtgcacagatatcaatcgtctctctccctctctctctgtgagaaagctttctgattaagctttcgtcgtctcctccattgcaaaatctagctcgatctgtgaaggtttctctgagttcttcaaaaatctcttctagagaaagacttcattagctcaattttagcaacttcctccacctccttttactcacactgtgcttcgatttcaacttcgcatttcacaatg

SEQ ID NO: 19291 - DNA, 3000 bp, Unknown
  misc_feature (1)..( 3000): 2750-1469P.txt file - cDNA_ID_1821282; gDNA_ID_2926185; Annot_ID_140770
agttggtctgcttccagcagcactacaggtaatttgtacataagcgtaaactttctatgaccattctttgttatttacacgaaagcattgtcatcatataggggattaatgttagggagatgcttactggtgctgctttaatggatgaggctactaggacaacttcggtaagtagtacttattgcagcttgtgttgaagatgagtttacttaccaggttttagtagaatgtcatatcatacggttgggtttcctgactcatacactttagatagtctctaccatgactcactctagcctgtaaatttctttcttctttcagatcaagaataaccctgcagcgctcttagctatgtgttggtactgggcttccaatggcgttggttccaaggtgtttttcctcaacttttttgagagttctaaggctatcaaggagattgagttcttattgaccttattactctattcttgctttcttttacaggatatggttgtccttccttacaaggatagcttattgctatttagtcggtatctgcagcagctggtcatggaatcactaggaaaggagtttgatcttgacggtaacactgtaagcatactcttcaattttctctgcagtaccccaaatcaaagttcatgagcatttactgagaactgagaaggtgtaaattggtcttgcaattaatgcccactcttataaatcagaagaccttggttacttaattacttgtgcacatgattgagttcagtttgttaccactccttcatggaagaattgaaacttgtgtactgtttcctcgaccctgttattacgagtgtgatcccaaggaccggttctttgaatttgcaggttaatcaagggttaactgtgtatggaaataagggaagcacagatcagcacgcgtgagtttcatttattcatatagttttactattgagagagcatagcaaataaggagctttttaacagtatttaatttgtttatttcattagctacattcaacagctgagagatggtgtgcacaatttctttgcaaccttcatagaagtgttacgggacagaccccctggtcacgattgggagcttgagccaggtgtcacttgtggagactatctctttgggatgctacaggtctgatttatgaatctcgtttcgcacaaattagtcagagataatatacactctttagtaacactatatatggtgaatttgtccagggaactagatctgctttatatgcaaacggtagagaatccatcagtgttacaatccaggaagtgacaccaacatctgttggggctattatagctctttatgaaagagctgttggtttatatgcctcaattgtgaacataaatgcttaccaccaacccggtagagatattcctcccatatctagaaaccgatgttctgtaattgcctaattgatatttgtttactgaatctgaataaaaaacgatttcaggtgtggaagctgggaaaaaggcagcagcagaagttctcgccctgcaaaagcgggtattgtcagttcttaatgaagccacgtaagaatcagaccgagtccgcttctttgtcaaaaaatcttgtctcgactcatgagagaccacttatatacttctttctgtggctgcagttgtaaagatccggtagagccattgacactggaagagatagctgatcgttgtcatgctcctgaggaagtaacgtccaaatccttgaaacttgttttttcattggtaacttttcgaacgcacgtatcaagaagtttttatctttgaatatgcagatagaaatgatatacaagatcatagcgcacatgtctgcaaacgacagagttctgatagcagaaggaaactgtggatcgccacgaagtatcaaagtgtatttgggcgagtgcaatgtggatgacctgtacgcataacaaaacccaacactttctcaaactccaaactctcattctctccattccttatttctttctgccatgtctatgattttgaaaaagaaaaagattgcaataagagccaggaaacacttgtgtacttgttttgaaataaagataatttcagaatgttacaaatgttgattgtaatgataacattggagatagattcatcaatcaagcaggctcatgtgaaacaatgatctcaacactcttctgcttgttttttggttaggtgttcttttgttgcataaacaaacaaaagcttaagctaatcagcaggttagagatgctcaacaacttcctcccatgtggttagattgtatcaactatagtttcttcaattaaattcacttctgaattttcttagaaaaccccattcagatctaaccaagataactctaaatatttaattttccataataacttttcacttgccacttttgaaattcgaatggaatatgttgacaaaagaaaatggtagatccaccgtaagaaaacaagacataagtcgagtcgattgtccccaccaccacctatttagtagcctaccataacaacaaaaaaattataacgttacaatcccttttatcaattttcaaaaccaagatgttgaatcgctttcccatgtcatcactacccgttatgccatagctcctatcaagctggtgagcgtactaaacgacaccgctttggggaggtcttaccaactcgattgcttttcctctctaccctttcccaaatttgaattcccaattttttcaaaatcaaaagtaaatactaacaaaaagcaaaaatatcaaaaaaaacaaagaaaaatcattttgaagtgcacagatatcaatcgtctctctccctctctctctgtgagaaagctttctgattaagctttcgtcgtctcctccattgcaaaatctagctcgatctgtgaaggtttctctgagttcttcaaaaatctcttctagagaaagacttcattagctcaattttagcaacttcctccacctccttttactcacactgtgcttcgatttcaacttcgcatttcacaatg

SEQ ID NO: 19292 - DNA, 3003 bp, Unknown
  misc_feature (1)..( 3003): 2750-1469P.txt file - cDNA_ID_1821286; gDNA_ID_1620653; Annot_ID_47789
ataaaatcagaaatcaaatatttacaacaatgagatatataggactatcagattgggtatcggagaagacttacataaatagtgaaaagaattgctaccaccatgatagcatatcccgcattgtagggagagaactcatggcgaaggtgccttgctacaaatacacagaacaaaacaaccggaactatgatcaatagcaaggtaagaggcagtgacctagcatctggtccaaatatcaatctcccacccaggatgaatttctgcaaaagagagagggaccatttattggtatcaccatactgaatttaaaacatgtgaagagtcaagcattgaagatacttccaattgttaataaattacaaggaacattcaacttgatacaaggttatgcaaaaatgcatggtcatgctttgagagtgaatcaagagatacttcaacgattcagctcaacaacattagtttacacgtaccaaagtaaaccaattgcgtaactaagattatgctacacaggtgaaactcgagaaaaaacgaattccaaatcatattcataccagagaacagaattcagagaatattcatctcccaacaaagagaaaacacacaaaaaaccaataaaattccaggctcaatcattcgatgaaaaaaggacttacattgcttcctttccagacttggaatacccgttgtgtcatggagagaagaagattaaagcgacagaatcagaaagtcctaagctaaccagcgacggaattcgaaggatagctgtgtaattctcgccgtgttctccctccggcgaagaagagggtttttatcccgacgaagaaatcgacggaaacctaatagtaccagaaatcgcgagcaaaaccctaaggattacacaattataaggctcgcgtgcgacttctggtctgacctccttcaatgggcgacgaagacgaacgagcgaataacctgagttttttttttatttttatttttttatgtttaaacgtttttgtctgcctttctcttgttttaaattatgacgtaatcatgtttatctcctaaaccacaaattacaattagtgtcctcaatttttctgcgcattttgtgtcagatttcattcctcgtgcaaactatacaatttcagttggtgatttttttgtttttgggatacattatttttttgtaggaaaacaaccaaataccatttatttgagtcattgtccattttgtctttcaattgactatcaattacaattgattatgatcgcaaatcaactggttttgactaattctattgaattgtttgaacctgttccttctcaatgagccaagaatttgacatgtttgaatagacacttaataaaactttgaaagtttgtaatttaaaaataaattgtagagatgaggaaaattccatttaatgttaaaattttacaaacgaattctcgattatttaaagatgatgacatgtataccttgcaaacataaatccctttattattaaaagggaagtacaaattgaatttttttctaatttggcctcaattttgatttcaattttggattttattctttgctattcaaaattattaaggctaatttggtcttaacaatctcctaaactttatatgatccgattcaatctaaaccgtttaataaaattaatttctttcaatctaaaccgttcaacaaaaataaggaatctatgtcgtttttgaaatcaaaatataatcacatttcatctctaaaaacagtatattcaatcacgaaatcaataatcaataatatccaaaccatttattacgattcttcactaatcactagaaatttatatttataagtttaagatatcaaatttattcaaatatttagtataagaaccaaataaattgattgcccgcggtaaaccgcgagttaaaacctagtttatatgtaaatgggtggaaacaataaacaaaaagcagctgaattgtttttaattttagcgtaattatttacttatttttctaggttttgcacgtaaaatgaaaggaatataatctctatttttcatcatgattagtagaaactttaacaggatccgacgtaattacatttttatctttttgtttgcgttaactaagttatccagtcaaacccttaaaatgtctcggcgacataaaaatattcgaaaagctaccatcgtatcatttctatagatctccctaatctatatgatatatcacatttctttcaaaattctttttttttttttttttaacaatttattgagatctatcatgtagattagggagaactatagaaatgtcaataagcacaaaagttatctttatcatcaaaagctatgcgacaacgctcaacaatcgacatccacgcatctagcatatgttgaacacataaagcaacccgactaaatcagcatactccatggatattactctttagatcaccaagaatggtagtctcgtttgtcctttagatgtcgaatctttttttcgaaagcttgtaaactcgaagttctttgaagaacaaccctactcccaatcaacattttaacatacgcataatttcatccaaaacacatacaaattgtttaaaaccacattaccattcattttatagcatatacggttggaagtgctagtttatgttcttcagctcaaaagagtggtagttattctgaatagaaaacaaaacatctgaaaatggcgggccacgtgaaataaaatagaatatgatgccaattgagacaataatatatatacatagtcgtaataagagtgataaaagctttgtgaagcctacctaatctaagcagggccgctcgctcccaccaaaggacaaatctctctcccgcactcatctctgttcattggttcctcccaaaaaatatcaatcaaatcggaataaactatacgaatcctccaatataaagctccaccctttctctttctatctctctctctccattgttgactgtctctcttccctcgtaaacatcgctgtctctaaagatg

SEQ ID NO: 19293 - DNA, 3000 bp, Unknown
  misc_feature (1)..( 3000): 2750-1469P.txt file - cDNA_ID_1821286; gDNA_ID_2926185; Annot_ID_140771
aaatcagaaatcaaatatttacaacaatgagatatataggactatcagattgggtatcggagaagacttacataaatagtgaaaagaattgctaccaccatgatagcatatcccgcattgtagggagagaactcatggcgaaggtgccttgctacaaatacacagaacaaaacaaccggaactatgatcaatagcaaggtaagaggcagtgacctagcatctggtccaaatatcaatctcccacccaggatgaatttctgcaaaagagagagggaccatttattggtatcaccatactgaatttaaaacatgtgaagagtcaagcattgaagatacttccaattgttaataaattacaaggaacattcaacttgatacaaggttatgcaaaaatgcatggtcatgctttgagagtgaatcaagagatacttcaacgattcagctcaacaacattagtttacacgtaccaaagtaaaccaattgcgtaactaagattatgctacacaggtgaaactcgagaaaaaacgaattccaaatcatattcataccagagaacagaattcagagaatattcatctcccaacaaagagaaaacacacaaaaaaccaataaaattccaggctcaatcattcgatgaaaaaaggacttacattgcttcctttccagacttggaatacccgttgtgtcatggagagaagaagattaaagcgacagaatcagaaagtcctaagctaaccagcgacggaattcgaaggatagctgtgtaattctcgccgtgttctccctccggcgaagaagagggtttttatcccgacgaagaaatcgacggaaacctaatagtaccagaaatcgcgagcaaaaccctaaggattacacaattataaggctcgcgtgcgacttctggtctgacctccttcaatgggcgacgaagacgaacgagcgaataacctgagttttttttttatttttatttttttatgtttaaacgtttttgtctgcctttctcttgttttaaattatgacgtaatcatgtttatctcctaaaccacaaattacaattagtgtcctcaatttttctgcgcattttgtgtcagatttcattcctcgtgcaaactatacaatttcagttggtgatttttttgtttttgggatacattatttttttgtaggaaaacaaccaaataccatttatttgagtcattgtccattttgtctttcaattgactatcaattacaattgattatgatcgcaaatcaactggttttgactaattctattgaattgtttgaacctgttccttctcaatgagccaagaatttgacatgtttgaatagacacttaataaaactttgaaagtttgtaatttaaaaataaattgtagagatgaggaaaattccatttaatgttaaaattttacaaacgaattctcgattatttaaagatgatgacatgtataccttgcaaacataaatccctttattattaaaagggaagtacaaattgaatttttttctaatttggcctcaattttgatttcaattttggattttattctttgctattcaaaattattaaggctaatttggtcttaacaatctcctaaactttatatgatccgattcaatctaaaccgtttaataaaattaatttctttcaatctaaaccgttcaacaaaaataaggaatctatgtcgtttttgaaatcaaaatataatcacatttcatctctaaaaacagtatattcaatcacgaaatcaataatcaataatatccaaaccatttattacgattcttcactaatcactagaaatttatatttataagtttaagatatcaaatttattcaaatatttagtataagaaccaaataaattgattgcccgcggtaaaccgcgagttaaaacctagtttatatgtaaatgggtggaaacaataaacaaaaagcagctgaattgtttttaattttagcgtaattatttacttatttttctaggttttgcacgtaaaatgaaaggaatataatctctatttttcatcatgattagtagaaactttaacaggatccgacgtaattacatttttatctttttgtttgcgttaactaagttatccagtcaaacccttaaaatgtctcggcgacataaaaatattcgaaaagctaccatcgtatcatttctatagatctccctaatctatatgatatatcacatttctttcaaaattctttttttttttttttttaacaatttattgagatctatcatgtagattagggagaactatagaaatgtcaataagcacaaaagttatctttatcatcaaaagctatgcgacaacgctcaacaatcgacatccacgcatctagcatatgttgaacacataaagcaacccgactaaatcagcatactccatggatattactctttagatcaccaagaatggtagtctcgtttgtcctttagatgtcgaatctttttttcgaaagcttgtaaactcgaagttctttgaagaacaaccctactcccaatcaacattttaacatacgcataatttcatccaaaacacatacaaattgtttaaaaccacattaccattcattttatagcatatacggttggaagtgctagtttatgttcttcagctcaaaagagtggtagttattctgaatagaaaacaaaacatctgaaaatggcgggccacgtgaaataaaatagaatatgatgccaattgagacaataatatatatacatagtcgtaataagagtgataaaagctttgtgaagcctacctaatctaagcagggccgctcgctcccaccaaaggacaaatctctctcccgcactcatctctgttcattggttcctcccaaaaaatatcaatcaaatcggaataaactatacgaatcctccaatataaagctccaccctttctctttctatctctctctctccattgttgactgtctctcttccctcgtaaacatcgctgtctctaaagatg

SEQ ID NO: 19294 - DNA, 3000 bp, Unknown; identical to SEQ ID NO: 3604
  misc_feature (1)..( 3000): 2750-1469P.txt file - cDNA_ID_1821306; gDNA_ID_1620653; Annot_ID_47783

SEQ ID NO: 19295 - DNA, 3003 bp, Unknown
  misc_feature (1)..( 3003): 2750-1469P.txt file - cDNA_ID_1821306; gDNA_ID_2926186; Annot_ID_140777
aagagagtaagtagaaacttacaatttgagattgataattctatcatcgtcttcttcaatcttgctatagttgcaagatgctgaagacaacgaagaagattctgaagccgtggtggataccacgggccatatgctaacatacgctgttctgtcccatgaatctcctcgttctctatcacccttcaaaatctttagaatcaagctgaagttgatggccaacgagaggaccaacatattcctccaagaaagaaacctcggaatctgtcccattttctctcaaaactaaaacacaaaaccaagaaacaagaatgcaaaatgcttaaagaagaagagcagagtgggatagctggataaagacctcttttaaaaaaaacaaaggaaacaaacaagtggtgtccaacgagactgatcctttttttggctgatattcgaagttatgatttttgtaagagattaaaataacccttgaagaatctcaagagataaaggtatgtataacaatgtgtttatattggattacgaacctaactcatgtacttaactcataaatattaccaatcacgattttaagaaattgaatttttaatcctagtagacaaattctaaactgagactacctatcaaaatacctgtagaattgcaggcagaggatcaaaaggtcacagaacaaattggccacagtgaaaggatcgctagaaggctttttatatgtaaactgaaaaagaagaatgtgtaattaggtcgaagctctttgtttgtttctctccacgataaaagatatttcccattgggaaaaagttattgtattttggctttggcgtgaagagtttcagcttttcggtttgtcaatggcagaccttggaaacgacagtacatgaaccgagtgagacactgaatttattcaggatctctgtttactagtacaagactggtgaatgctttatgtgtaacaatattttctagatttacgtcacttctctgttttcacatctaattagattagcttaaggctcattatattgactatgtaatattttgccctatatatgtttagtgtaatttacacatttggacaaaacgatttagggtgaaattgttgtaataacatattttggggtgttgattgtgaaagtaacaaagagaagaaaataatctctgcaagggtaacattaaaatagataaatgatccatggaccaaaatctacatattgccacggcccaaattgttcaagagtttagcaaagatcatatgggctggatccaagaggtttattatatttggtcattgttcaagtatatttgtttttttgttttcttttcatacattactgtttattgaatatgattctatcaaaggtgaagttgtataaaatggggtgggatcatcatttgtaagcattcaagtgtctcgttctctaactttcttaagtttgttggctttctctctaactcttaagtatcaatttggagaaaagcacgaaaatttaaaatatgctaagactactcgtaataaattaataaaaatcaaactatgcattatctaaaatcttctgtatataaaatttacacaaaattttaaaatttgaaaaaaaataagctagcgttgagctcaaatccgctcaagatcatcctctagcaccatgtacacagtgcatgtacgaacacttccaaccctcgattacaaaacaccggattaatatatgatctttccttagaatgagtgtactccacaaagaaacatgagaggtttggaagataaacataagcattacccaaaaaaccttattcatttgatcatgcctgccatcgtcttacttccctaaacatgtccttaaaatgaagaagtgaacctaccacataattcaatttctcccccatttttaacattcgtaaaatgtaaaagaaaggaaactattttgttaagtattgtttttatggctatcctttttttttttttttttgtcaaactatggctatcttttaaaatgggtaggtaaatatataaatgatgttaatgaataatactactcttttaatttatatatatatttttgttttttggagataggtgatcctttattcgctctattttattttaatcggcattcattttacaattcacaggaaaaaaaaaaagagagagaggaaaagctgagtaaaaccgtgcagccctgaacttcgacgctttctcctctttcaaccaatccgttgaacgtcgtcgtaataagcttcatcttcatcaatcatcatcactttcttctttctcccacagatccttccttttctccttcatcttccccttcttccttttccctcatcgcccaggaacacatccgatctgcaccctcttcgttcgattctcacaattaatatctagggtttgcgaggaccccccctctctattcaaaaaaagagagcagattttctctataatcccctttggtcagtttcttctctacctttttttcccctttgtattccagaggaatcgagtgatgagtttatagaattatcgcattttgaagtaatttgggtccttttgtagagcttgattgacatttctggagacatttgtatgtttcagagctctttttttgttgctgttgttgttctagcaagttgattgcgaaattgtcaacattctgggaatacgtcaattgtttttttagtattgcggtcatttagtctggaacctcttttgattccgcagtttgacgatctttcatacttttaggtttctgtaccaatttgattgtcgaacattgtctttctgttatgatggtgaattttagaaagtatttcaattcatgttggagaatttgtataggcagtctgattctgcaacacatttcacggtagcagtgttatagcaatagttcttcagtgtcggtcttgtttgattctttgggatttgagcttcaaatttcatttgtgaatctgattctgtatgtgacttacaggtttcaagtggtgtaattggatcgtgtagctgcttttataatg

SEQ ID NO: 19296 - DNA, 3000 bp, Unknown; identical to SEQ ID NO: 3603
  misc_feature (1)..( 3000): 2750-1469P.txt file - cDNA_ID_1821310; gDNA_ID_1620653; Annot_ID_47782

SEQ ID NO: 19297 - DNA, 3000 bp, Unknown; identical to SEQ ID NO: 3615
  misc_feature (1)..( 3000): 2750-1469P.txt file - cDNA_ID_1821310; gDNA_ID_1620653; Annot_ID_163538

SEQ ID NO: 19298 - DNA, 3003 bp, Unknown
  misc_feature (1)..( 3003): 2750-1469P.txt file - cDNA_ID_1821310; gDNA_ID_2926186; Annot_ID_140778
ttgagttggggtctgtttcagttccaagcctggatatcaaagtgtctggtgattcgtctgaacaaatcagttccttcactaatgaagagtctcaaaacagagctaaaaacaactggaaatctcaacatgtgcgtaggactcaaagaaactcactggtaaataagcctgcagagaaattttctggcaacaatgctgttatttgggctccagtacatccacagcaaaaagctgatgtttccactggtggagggagtcagactactgtccctgagtttggcacctcttcaaaaagtcagcatcaaggacagactagttctaaaagcaaaagagtggaaattgaaagatatgtaccgaagcctatagtaaaggaaatggctgagcaaatcgtcagtaaaaatctagtaacctctgctccagatatgtcggagaatgtaaaccagaaagaaaatcgtggaggtgagggtacaggaattctccaaccttctggttcaactgcagggaaatctgggtctccttcaaagtcaagacatgggaatggtaggcagggaaagcatggtagagaacatgcatcatggcaccagagaggttctggagcacctactaaagctttggaggatggacaatttgtaacctcaaatcagcccatccgaggaacagtgaactatcactctagtaagcaaaccgaacaaattgctgccaaggatcaaaccacatgtaataaggatggatggaacgatggctggtatatgactcctgaaacgcattactctgctgccgaagaaatggaatccagtgctgttggaaaagatcaaggaatgagcatgcacggcaggcagcatgcttcaagaagcaacaaggatggaggaagcaactatggtgaccctaaaaaaggcaataagagggatttcaataaagctcatacgcagcactctggccatgggtttagccaaccagatttgcctgctgcttcaaaagaaggtcgtgtccctggagatcatgtgtggcatacagctaataggacaggtaagtatggtggtcgtgaaagtacaagggacaaaccttatggatctcaggaaaaaaatgttgttggatacgagcatcaagggtttactacagaacaaaaaacgacatcagctgatacacaagcccagttgcaaaaccgatctaccaataaggaggtccaggttgagcaaaatccgaatagtatgttccaaaagaacacagggcagggtcgacggtttggaagagggcaggagtcacaaggaggttggggtttaccggcgcaagagaatatgcaccatcaccatcagaggccaccttcaaacagagatagacagaagcaaaatctgcattatgaatacaaacctgttgggtctcatacttatgatggagaacgtagtcgagaacaatcgaaagagagttctcagacagaaggtccaagatacagagagaagggacaggggcagcaaaggcagggtggataccaacagcaaaggggtactagtgggagaaacggtggtcatggattcactggtgatagaaactaagattggcctcttattgttatttaggtagtaagagctgccatgctgaggatacttgcattttgagatatggcgattgaggaagctaattcgtaggcacatagcttgggagattgctgagaggagacctatccgaggaggtattggcagattaaaaaaaaaaagtctttgtcttgagagtttattattatatgtttcagtcacttgtttgaatatgattataactactgtagtagccttttgtatacactagatgaatactcatgagtatttttgtttttaaagttgcttaaaaaaatatgattatgttttttggttgattttgatgttcattttgataaattcctatctatttaatataatttttttattttatgattagatttatctataactcgaaatatcaattctagtataatatatatatttatatctattattctaatattttattgtcatgatcacatataaaaacaatatatgatatattgatacaatgtatgcgttttgaaacttgtctaaattaattgtacaaacaattatttattccatatattctcttgtcatcaactacacaatcacatcatgatatgctagtaattcaagtcacactttaattcttttcacttgcatatagccatatagaatctcatatttttttttttgtatgtcgaatgtcgaatgtctcaaatgactattatattataaaattgtatatcaatgttactaagttattagaacgcaccaaaatgtacagaaaaagttcatatgataaattatattcacaaaacgtaataataagaaaatatctaattaaatttactaaatttatatgaggttaggtagcaaacataagagttttaagagtttggattttggaattggtggtgtttgtttctcaaacttcataaattagagtttaaaatgtttttttattttttgtggtcggcataagagttgaagttttaataaaataaaatagtatctgatcattttattggagaaaacataaaagatgtagtattttataagaactcgaattggtcaattttcaaaatgttagtatgaaaaataaaatatctagttatatgtactcgtatctcttgatatttttggctttaacttagggatgttagtttgatttgtctttctggataagccagtagtaaccaaaaaagtcaaaatcttgttggctaagtcagaaattaattaaataaacaaaagggcccattaaattaattattttaataaatattctgtgtaatgatatatagtataaaacgcgaccgtctaaattcttggttgtttacgagaaaagcggattacgggtacgcttcttctaagataaatctctccccgattctctctttttctcgctagatactctttttcttcaattagggtttcttctcgcttgccttttaattctctccagctgatctgatctccgttaccgatg

SEQ ID NO: 19299 - DNA, 3003 bp, Unknown
  misc_feature (1)..( 3003): 2750-1469P.txt file - cDNA_ID_1821310; gDNA_ID_2926186; Annot_ID_200613
ccagtagtaaccaaaaaagtcaaaatcttgttggctaagtcagaaattaattaaataaacaaaagggcccattaaattaattattttaataaatattctgtgtaatgatatatagtataaaacgcgaccgtctaaattcttggttgtttacgagaaaagcggattacgggtacgcttcttctaagataaatctctccccgattctctctttttctcgctagatactctttttcttcaattagggtttcttctcgcttgccttttaattctctccagctgatctgatctccgttaccgatggagtctactgctaacgcactcgtcgtcaaggttagagatacaaccttcctttctttatttgcgaatcgtcagttttctcacagtaattgtcggtgattctgggttttcgtggcgatcgtctcgtttctgttgattttgttgcttgtaatcggtcctttccttttgaatttcgctatggatcgactctctctctctctgtctctgtattataatcttaagtgtaattcgaaaattttccagacatacttagcagtatctgcttgaatcttatacccgaacaatgattaaaactataagttatcgtaattagaatcgtaatctatttcttcgacaattttttttcatttttttcattgaagtgatactaattttgtttgtgattatgtaggtgagctatggaggtgtgcttaggcgtttcagggtgcctgttaaagctaatggacagcttgatcttgaaatggctggtcttaaggaaaagatcgctgctctctttaacctctctgcggatgctgaattgagtctgacttactctgatgaggatggggatgtggttgcccttgttgatgacaacgatctctttgatgttactaatcagcgtcttaagttcttaaagatcaatgtgaacgctggcgtgtccactaactctgctgctccagagagtagtgggagttccacacctgcgggtatgcctaacccggtttccaaaatccagaagggtataaatgatgttctgatggctgtacctaacccgatgcgtgataccatatcaaaggtgtacatggaccttgcatccaaggcctcaacttctagtcctgtagttggtgagatgcttgattgcatttccaagctagggcagctctcaattcctcaggaaagtagtccttgctcacctgttaccaagcctggttcttcaggtgcttccctgagcagggatgttccttccgctggtggaaagaaggatatctctgagaggacccagaccggaaggaaacctgttaatctgaatgaacccactggcgctcattcaaagacttctggtcatgtaccaaactcgtctggactgggtgctaatttcaacgagtgtccctttagtggcagtaccatgaattactcctgtccaaatccagttaacctcaacaagcatcctcgtcgtgtttgtcattccaaaaagagcaccaatggtgattactggacttcattgggtgtattccataagggcatccgttgtgacggatgtggagttcttccaattactgggcctagatttaagtcgaaagtgtaaggatgccttctacttactactttagaaactataaacatgctagaacttattgtgcttatatgtttcgcttgtgaatattgtgcagtaaagaagactatgatctgtgcaccatctgctattcggtgatgggtaacgagggggattacacaagaatggataagcctgtatccgttcaacatctgcatccttttagaggaccgtttacccaagtattgctcttcttctaagtttataattacttttcttcttgtttattctatgtgtcttctctgatagctatgaggaattcttacccttttttttttggtatagtttcctaatccttggttgagccaccctgtgccacgagcaaccaatggaggtgcacctctcaggtgtactcgccctaaactagacagtcggtttgtccttgatgtgaatgtaattgatggaaccgttgttgctccatccgccccatttactaagatttggaaaatgaggaacagtggttcgctggtgtggccacagggcacacagattgtctggatcggtggggacaggttctgcaactccttgtcagttgatttacaggttagaaacaatttccttagttttcactcttttagctcgattcttaccactaacagagcaattatgttgtttgaatttacactcgatggcttgagttaggttgttttcttcacgaagtgactatagctgcttgattatataatactaactgtttttttctctctttacacatggcagattccaaaggagggtgtgcctatctatagtgaacttgacgtcaaagttgattttgttgcaccagagttacctggtcgatacatttcttattggaggatggctacctctgacggtgctaagtttgggcaacgtgtttgggtgttgatacatgtacttactagatttgtgcagcttctgtcctttaattctttgtctctttctatcatatgtgtttgatacattttttctttttgcatggttaggttgatgcatctctgaagaattctgttgtgaatgagtttcatggactgaaccttaatgcctccccctcccttgatgagaattttccaagcgaatttctagggattatgaattatgagtcagctcaacctggcagctccagtgtcaatcctgggaccgtgaaaggtactgatctagagggcgaagttggtgaaacacaggccgtggaaaaagaaaaccttttggttggtgaagctcatcctgctatccctcacggtcattctccttcatcttcatcttcttcatttaacatggtcgacttcccaagcatgcctgctgttgaggtcttgtctggtggttcttcatctactacaaaagacgtgccagttcctcttcaggaggatatagaaaagaatgacgtggagataaccatgctcaaggagctcgaggaaatg

SEQ ID NO: 19300 - DNA, 3000 bp, Unknown; identical to SEQ ID NO: 3596
  misc_feature (1)..( 3000): 2750-1469P.txt file - cDNA_ID_1821326; gDNA_ID_1620653; Annot_ID_47772

SEQ ID NO: 19301 - DNA, 3003 bp, Unknown
  misc_feature (1)..( 3003): 2750-1469P.txt file - cDNA_ID_1821326; gDNA_ID_2926186; Annot_ID_140788
tttgtcaatatcttttgctttatcgataagaaacttcaaagcaaacaatcaagttcgacatagaactctgttcaaggaagataattactttactttgatctcggcggtcatatagtgtgttccatgaacggacaaattcttcctcttccccaaaattttccaaaggttatttttggctatttacgggttgtcacaaattaaaaaggaaatgtgcaaatatttattattattctttgacttgagggttaggatactcaatatttacaacaacccctattcaaaacacagataaataaatatgaaagtgaataacatttaattgatggagtagtaggaatcaatcaaggagagagctagggccgctcatatcaacaagtcttcaccttcactccactccaccaacaagatttgatctataagataaatgtgataacgacaacgaagatttgagtaattgtagcacatgcatcccaaaactgattattgttgatgatgaagggtaaagtaggcaactctatcatgcgacgtatcctttttcttttgtttattctttttcctgtccgtaaagttcgccgagaattcgaaaaataagtaatcttatgctatccaaccatatatcatacgtggcacatttcatgctatcctctctactcattgattgaatgaacgtaattttggtgacatggaacttagaaggattccaatgtcaataaaccctatatactctgaagcaaaacataaaaactttgtttacatctccttttgaaaggtgtttaaagatttcttgatgtcatttgaaatagaactttagttccaacagtttcgaaacggtgagaaaggggatgaattattagttctaatccgcgaaagaactttctaactagagaggaatcatccctaggcatccaataaacgtaactagtaattaacggggttgaatcttcttctcatgagtccaacacttttctgccatcttgatttatatacaagaatattgttttcatttaaggtattttgggtttaccagtgcgctttcgggttacattcaaatctttgtcaccacacggacacttctctctctaatagaagaataacctacacatggccgcatattatggtttagttaatagactcgaaaacgggtcagtaggttcagctcattataacacttggccctggtgctataaaagttctatttggacctaaaattagattattatttttttgtttgcgcaaaaatattactatagattttgttcatttgcaccttggacacttgtcaagaacaggatatgctagtaacaacctaaaactaaaacctactaatagttgataaattggacaaaacaattcatcaaaaaatttccttactccacccataaagtttgatttaagaattcttcagtgcaccagcccttaattggtgtagttggaatttatcaaaagcatccttaaaatcgtactccaactacaccaagcatccttaatattgacaaaggatcttcttccatgaatgaaaaccagccctttactatctctaaccacccaagccgcaccagctagattgtttctctttgaccacgaaaaccccacattacacttaagccactgataattggtgtagttggagtacgattttccataaatattatcgtaagactctttgaataggagttcaatttgcgttgcatactaatgtgattaaatgatcaaattggtattattgtcggttgtatactctcgtaagatttgatgcatgtagagccctggtttttgggtcgaaaataaattggctcacactctatcatgctttagttttattacttttttcttatgatttcctcatttctcttctcgtctcgatttgtatagtttcttaacaataaaaatgtatatttcaacaataaaataaaattagttttccttccaaaccaaaaccattagcgattcacacttctctaaatactttttgatgcttttgtaacgtccataccaatataacatggaaaaactaaaatttgactcgaaaaactaacatggttcaatagacacactagtctaatcacaatttgaaagaggatatcagacatgcaaattgaaggatttttttttgtgggggtctggtcaaggagatgagactcaataactcatgttgaattccaaacaacaaataattgttgcatctagaattccaaataagaaataattgagatagttgaatcagaatatgttggtagaatgaacgaacacgtgagtagagtccccaaacgtggcagagaagcggaccacacgaagtcctgtttttattatttgttgccataaagaaatccaaacttgaaactgaaaccgtcgaacgaatcttaaatgaagcgaagaaggaacaccaaatagtagtcttaactctttctctctctctctctctcttactggttgggctctctgtccaaagactccacctttctctgcaaaaatctctgccctcctactctaacatgtctccccttctcctctgtcccttatctctctctattcactcaaacaacaacgaccctttttctatttttacctctcaccataataacttcccttatttaccactttaccaactacttcttcttcttcttcttcttcttctttcgacaagggattttagggtttaggattctccgcattgtacgccactctgttcaatacaccttggtattccccaatctttgacgttttgtattttcagtttgtcgtttccttatcttaaaccttatttaaatcgttcccaagttttttttgttttgtccatagcttatctgggtctctgttttttgagctctgtgattgttaaatttaataacttttctctcatatgtctctgtgttaccacattttcattgtttatcactaattgcttacattcattattaggtaagtgatgatgagtgttgaatcttgaagttttaggagatagagagaaaggtttaggattgttttgatctgttttggaaaatg

SEQ ID NO: 19302 - DNA, 3003 bp, Unknown
  misc_feature (1)..( 3003): 2750-1469P.txt file - cDNA_ID_1821334; gDNA_ID_1620654; Annot_ID_47825
cccgtgattttcccgccaaaaacgtaaacccgagatttttccgccaaaaacataaacccgtggttttcccgccaaaaacgtaaactcgtaattttgacgctaaaaacgtaaactcgtaattttctcgccaaaaaacgtaaactcgtaatttttccaccaaaaacgtaaacccgtgattttcccaccaaaaacgtaaacccgtgattttcccaccaaaaacgtaaacccgtgattttcccaccaaaaacgtaaacccaagattttcccataaaaaacgtaaacccataaaaagtagaatccgtaaatatcctaagtttgatgataatgaattaataatgataattatttattattattttataatagtaattaagtaaattattaattaaatgggttaacccatttaacaactcaacccatcaaattaaatgagttatgagttgacccaacccatttaacaaaatgagttgagttaacacataactcatttaactctaaactcatttgattatgagttgggttgagttgggttacccattttgacacctctaaatatgtgtctctagcctctactatttttaaaaactaaattttatataataaatttttttatcttaataataaccaagttgaacatattttagttctaaaattaactactcggtttaatattaaactttagaccaggacatgccggataacatggtcttagtgttgtcgtacgtcaccattagagtttcaatttgcataatacaaggtggttgacccaataaaagaaatttgattcaatttcgatataaacaggtttgttttggttcagttttacctattactttttattttgtccaatcccaaaactattatttcaaagacaaattggagaagaaacaaaaaaaaactaatggttggacaaaagattattatatatcaatttcaccacaaaaaacttagcattaaaatattcgaaatggacagcgacgaattcaaaccttcgtgttaattgtctccggcgactatgaattctaaaatcttccactttgcctaaaatatcaatacatcacattcatcctagccttatccactctttcttggaaattctggtctggtttcccttcagcaattcaattaacttcatcaaaccgaccggttcaaacaatcatctagaaattctattttattgttagactagatcatgaaattttgaccgagtcagcacacataaaatctggtacttgacgtggtttagttaacccaacaaagttgttttggttaaacggatttattgacaaacgtgtttcggttcactcactaaaaaacccggttaggtagatactacttcattgacaacaaacgaagcatcctttaatttcaaaaccgcgttttaatcagacttttccttttttattttcagttctaatgtttaaaactttccttttctttttctccatatttgactcgtcaatataaatacaattgtaacaaacagattttgatcaaaagattttacttttctcaattcctttcaactttcaaaatcgaagatctcttaagccatgaacgatcttctctccggctcgtttaaaacctccgtcgcggacggttcatcgccgccgcactcacacaacatcgagatgtcaaaagcgaaagtctccggcggaagttgccacggtggtaacaacctagacacgttcttcctcgacgtggaggttgtaaacgaagaccttaaagagctagatcgtctctgtcacaacctccgatcgagcaacgaacagagcaagacgcttcataacgctaacgcggtgaaggagctgaagaagaagatggacgctgacgtcactgctgcgcttaagacggcgaggcgcttgaaaggaaacctcgaggctttagatcgggctaatgaagtcaaccgaagtttaccggaaagtggaccgggttcgtcgtcggaccggcaaagaacttcggtggttaacgggttgaggaagaagctgaaggatgagatggaaaaatttagtcgagtgagagaaacgatcacgaatgagtacaaagagacggttgggagaatgtgcttcaccgtcaccggcgaatatcccgacgaagctaccctcgagcgtctcatctccacaggtaataattttttccaattctttcttaacaatttttttggtcaatttcaaaattcaaattctaaacgttaaagagcaagaaaatagcgcaagttgttaaacctttttaagaaattgttagtttataatttggttaaatcatgatattgatataaattggaattatattgtaggtgaaagtgaaacatttttgcagaaagcgattcaagaacaaggtcgtggtaggattttggacactattaacgagatacaggagaggcacgacgcagtgaaagatattgagaagagtttgaatgagttgcaccaagtgtttcttgatatggctgtgttggttgagcatcagggtgcacagcttgatgacattgaaggcaacgtcaaacgagctaactcgcttgttcggtctggtgcggaccggcttgttaaggcacggttttatcagaagaacacacggaagtggacttgctttgccattttgctattgctcattattgtggttttaattgtggtgtttactgttaagccttgggagagtaatggtgggggaggtggaggtgcacctcgtcaagctactccggttcaagctcagccaccgccacctccggctgtgaatcggcggctactacgctaaataattttttttttgaggttccctctgtctatgcatgagcatatctatgttttgaagattgttttttattttacagtattttgtctttaatgtttttgtaatgttttggttggttaaactctgtgtatatataatgcgatcaccacatttctttgttttattatggaacgatttgcttattttttacaatcgacttaagttaatttgaccgtctatgatattattattcggagagatctatcaaaatcgatg

SEQ ID NO: 19303 - DNA, 3000 bp, Unknown; identical to SEQ ID NO: 3638
  misc_feature (1)..( 3000): 2750-1469P.txt file - cDNA_ID_1821346; gDNA_ID_1620654; Annot_ID_47821

SEQ ID NO: 19304 - DNA, 3000 bp, Unknown; identical to SEQ ID NO: 3638
  misc_feature (1)..( 3000): 2750-1469P.txt file - cDNA_ID_1821346; gDNA_ID_1620654; Annot_ID_163595

SEQ ID NO: 19305 - DNA, 3003 bp, Unknown
  misc_feature (1)..( 3003): 2750-1469P.txt file - cDNA_ID_1821355; gDNA_ID_1620654; Annot_ID_47815
gatgggttgatttcacattctgttcttctcgtaaacgcaagtgctttagaatcatctggggtctgacccttgttaaagcattcacattttgacgactgttctggtcatacactttctcgaaaggactggtttatgcaaatggatgttcttttgttagggcaaacaaagtttgctaatttttattaaaggagaaaagggttttagattgggtgagcctgaagtaaccatctatattcctttgctctcatcattcaaacacttttgcgttcaaatgatttttggtctccctttggatctcttttgggtctaagctaataaacaaagcccctttcctttctttttttctgtctcaaacgtagacagcgaggacgaaacagtttatgagtttgtgtttattctcataactttcttatttggtcccactagtcgtctgtaactaaggcattggtatgtattctgatatgaaaacgagtttaatacctagcattcatgataattaacttataaattcaagataattcggtgtccttttatacaccatatatacatacatatataatcatgtttcttttgaatcataactttggactgatctcacaaaattcatttgctttttcctcaataatgattgtaggatcatttctctttgttttatggtacattatttgtatgtttttccccattttgagttaatacataaatgcatgggtaaatgatactttagcttcttttgtagaagcattgggagagtgagtgagtgaaatagtacctgttgcagagaatagtggctttcaggtgaaggcttacataaaaacaagtaaaaagctgaaaaaagatgattggggaatgaaaggaagatttcttgtttcttgtgagaggatattgtaatttttattctctattcttcaaattcaccataagaaaagataacttctttacaaattttatttgtcttttaggacatacatatctctatagtgggaatctatagcttaatatgattctcttatcaaagtgtataaatcttattgaagattcctaggcaagttgaatggtggtgtatttttctcttctttctatgcagtggcatgcttcatgtgagagagagagatatgttttcatcaaagtagaagtataataggtaaagctccttgtaccaattactgcaatgatctcatgtttgaataatccatacgcggaatcatttctttttgttcattgattataatagcatattccttaatcactattcagattatggttttgtgtgtttttgtcaatggattcttcaaagatttaagtggcatctgcatctgtttagctttgtgtgtgtatatatatctactatctagtgttatcaggttaatatatataaacatggcttgatatgtttgttagtggtacgagaatcaaacttttcttatctcttacttatgttgcaattataaaataatccatatgcagttctgcttctatgataaaattaatacacagttctgtttcttgttcttgaattacttatttgcttttgttttggtttgtggtttcctgtcacttatctgaaactctgatttcattaggcacttgaaaatgattggtcgtgttgatagcaaatacaatcaaagactgtccccaccaagaaactgactgccttgttcgctttcttttattttttttcttgttcaaaacacattcgtttcttcttcttcttctctcgttttaaaattgaaattaatatatggtccaaaagctacacacttttatgaaagtatcaaagggaaagtgaatgatgcatatatatagtgtctgtgttgggtcagatggtttgatttgctttttagtgttttgatattttagggggttgagtttctaaataccatgcagaaattcaaaaacatacaaagaccaagctagtgatccttatatattctgtgtttcctgccccaaagagtttggttggcaaaaatgattatgaaactaattttaaggtcttattatcaatatcattactagttgtctgaggaaaactagtcgtcaacatttttgatttttgatgatcgatggaacctaattttgtatagagaatgggtcatacatttaatcataatcaaatacatgttaacacttatattaaactgttttcttgatcaaaaccaacaatattcttaggtttgctgagacatagtttggctataaatatacaccctttttccttccaaaatctgttcactcccatgtttttatggctactagattgttgcttacatgtggacttgagtttaagcttacttgactggatctagagtaaaagtctgttgtctgaaaaaagtgttgggagttggctagtagtatagcttcaaggtgctacaaagggagagtgattaaatccccaattttccataaaatgttcttggggctattatttatttatatattatataagtgaatgatgatttgcatctttaattaggttcttttctaaataagtgatacactttgcagaaaagagagagacccacttagctgcagtacccattacatcttaatttttgtgaaatttgagaaagaaaagaatatatgggcaaagctgagttacctttgccttttgatactgctttgtcatcacatgcattccactttgcactacaaaatccactttggaccctcaaaaaaccccccaaattttttgcctctctcacaagaaaagcatacacattttcctccttctccttcctcatatatttgaagaccaaagtccatttttctttctctctctctttctctctcgctctctctatatccttactcttttcttaggtttaagacttagccccaccttccatatagacgccgtgttattagacccttcttctttgggtgtttttgttgtccaagataaatggaatgaagccaagattcttgaagcttttaccatagagctctcacttctgagtattagtactatccccaccttgtgttattttagggtgttttgtcactatg

SEQ ID NO: 19306 - DNA, 3003 bp, Unknown
  misc_feature (1)..( 3003): 2750-1469P.txt file - cDNA_ID_1821387; gDNA_ID_1620655; Annot_ID_47848
tgtattatttctctgtccaaatatgctttgttcttgagcaaatggactgacttttagtgtggagtaaagttcggtttatattctaagacaaaacagaaaaaccaattcgaatcttattagatttggaaaatttcatactattcaaaagaatcgcaatcacaatggacaagttccaaaatacaatgtggcagaacaaggatcatccataagaatcttgttctcatcgattactttagtaaatccaaacgaacttacttttcttcccttgcctttgttgttcatttggatagtattgatacattccgcacaaaactgcaacatgagatttttacaattaactctgaaactccaaaaataaaactcacaaaacttctgttctttcacgtctcggagtgatcacatcacacgtctctttccaacttttcgtaaacgataattttgtaccattgcaaagtaaataaatcacatccatgattttcaaatcatactggtcgccttctgtttttactttttaccgaactatttgcagaaactatataacgtacgcagcattataaactaatctaattagttatcaaataaatactgatatttaacatgcgaagttttatgttttgcctcatcgttctcgtgttggctcttaaaaaaccatgttatgtagatcggagataaaagtagtgaacgatttacgtgaaagagatattcgttaaaagttagtgtttcatgatatccaattatgcatggccaacaagatactaggcttagctagataactatagtacgataaaatagagaagtactatttccaatcattagcctggccactgaccacttcaaacattaatgattctcgtgaaactataataatatttaaacccaatcgtctcaagagtaatctcgactatacctgcgccaatagttctcggttcttgaagctgccgtgcctaacatgattagcgaactatttccaatcattagcctggcctctggccagcttcaaacatcaatgattcgtgtgaaactataacaatatttaaacccagtggtctcaagagtaatctcgactagtccatgcgccaatagttctcgtcttgaagctgccgtgcctaacatgaatagcgtgaacttgacgtctcatgtgtcaatcttttttttttgtttctctttattagtaataataaaatgaaataaagttaataacatgcagagaataagtgccagaagttattattgcgatccaaccaaaggttaaataatcagtacttatttagtattaaaatataagtagagatagtgcttgagcatctaatcatataagaaaagccaattactctggagaatcatcggatcacttcactctttgccttttctacacaaagagacagctcttgtgttcttgaaagcttaaagctctgttttccccaaagctatatgtgatgggtattacaaatagcaagcatacttttcatttccatacatctaaattgagaatataccaattattgtccttttgggtggtcattggagtttattcattaagattttgcagttttttttttccaaacctttgatcattttttaaatgatactattatattattttctcaatcaaattattttaagataaatatcaacttatcgtttaatagtaatgtgtatataatgtaataattgattttaatgttgaaaaatagtatttctaggtttccaaactaaattaaaatgaaagtacaaatgtttgataattttacggtgtattttctgtaggattttggtgttatatccacataatctatctataattaataaaatatatacaagtaaaccgttgaaagtttggaagcttaatccatattttgaccatgttttgtagtactaggctagccgtctttattaaaaaaagtaccgcgtaactacatctagttcaaatttggtaatctctaatatgaggttctaaattagcaaaatcatattttaaagaatttataacatttagccatatttgtcttaggttccaaataatacatagttccaaaggcaaataaactgtcttttatggtttagaaagatttctgccttgagagtaaacttcttaaaataaggttaattccaagagatttgattccagtttatttctaggaataacacaaagaaataatcatttttggtaaacaagataatcagaactcaaacggaaagaaatatgtcagtctgtcaaatccattaagaaaattgatattcacttctactctatttagaaggcacgtcaataattcagaaaaataaaccaagtgcatgcgataatgcaaaagaacacataaatccaaaatatcacaaggttacaaagtcaacttctaaaacttcatattttcttcacacgcttctctttacatttatacacaaagtacgaattaccttttgaaataagttgctaggtacttaatatttataagaaaaacaaaacaaaaaactttgggttgaaatgggaatgttcgttgaataaataagaaaaaaatcgagaaagcaaaagtaggaatggttgatgataagtcactccattcacaaacaatttgagctgtcaataatgtgattttccaaaatctcttttggtaccacaatgttttaaatcattggacatcggaatcaatttattgtattatagtatcgtagtatacaaaagaagttggcttcttctgtttttttttggctctgcagttttcaaatccattgttttaaaataaaacataattcgacttcataattataatcaaagtgttaatctttgaattttaataatctaatattagtggtaccatattgacaagaaggagacaatgtcacagaaacttacctcaggagtcaaaacagaagaattgaaaagaaaaaagaagaaataaaaattggatttttatatttgtttcgaccactatcaactctttctctctcttacaaggagcgaaagagaaacactttccgacttgggtaaggaaaaagagtttgatg

SEQ ID NO: 19307 - DNA, 3000 bp, Unknown
  misc_feature (1)..( 3000): 2750-1469P.txt file - cDNA_ID_1821387; gDNA_ID_2926209; Annot_ID_141872
attatttctctgtccaaatatgctttgttcttgagcaaatggactgacttttagtgtggagtaaagttcggtttatattctaagacaaaacagaaaaaccaattcgaatcttattagatttggaaaatttcatactattcaaaagaatcgcaatcacaatggacaagttccaaaatacaatgtggcagaacaaggatcatccataagaatcttgttctcatcgattactttagtaaatccaaacgaacttacttttcttcccttgcctttgttgttcatttggatagtattgatacattccgcacaaaactgcaacatgagatttttacaattaactctgaaactccaaaaataaaactcacaaaacttctgttctttcacgtctcggagtgatcacatcacacgtctctttccaacttttcgtaaacgataattttgtaccattgcaaagtaaataaatcacatccatgattttcaaatcatactggtcgccttctgtttttactttttaccgaactatttgcagaaactatataacgtacgcagcattataaactaatctaattagttatcaaataaatactgatatttaacatgcgaagttttatgttttgcctcatcgttctcgtgttggctcttaaaaaaccatgttatgtagatcggagataaaagtagtgaacgatttacgtgaaagagatattcgttaaaagttagtgtttcatgatatccaattatgcatggccaacaagatactaggcttagctagataactatagtacgataaaatagagaagtactatttccaatcattagcctggccactgaccacttcaaacattaatgattctcgtgaaactataataatatttaaacccaatcgtctcaagagtaatctcgactatacctgcgccaatagttctcggttcttgaagctgccgtgcctaacatgattagcgaactatttccaatcattagcctggcctctggccagcttcaaacatcaatgattcgtgtgaaactataacaatatttaaacccagtggtctcaagagtaatctcgactagtccatgcgccaatagttctcgtcttgaagctgccgtgcctaacatgaatagcgtgaacttgacgtctcatgtgtcaatcttttttttttgtttctctttattagtaataataaaatgaaataaagttaataacatgcagagaataagtgccagaagttattattgcgatccaaccaaaggttaaataatcagtacttatttagtattaaaatataagtagagatagtgcttgagcatctaatcatataagaaaagccaattactctggagaatcatcggatcacttcactctttgccttttctacacaaagagacagctcttgtgttcttgaaagcttaaagctctgttttccccaaagctatatgtgatgggtattacaaatagcaagcatacttttcatttccatacatctaaattgagaatataccaattattgtccttttgggtggtcattggagtttattcattaagattttgcagttttttttttccaaacctttgatcattttttaaatgatactattatattattttctcaatcaaattattttaagataaatatcaacttatcgtttaatagtaatgtgtatataatgtaataattgattttaatgttgaaaaatagtatttctaggtttccaaactaaattaaaatgaaagtacaaatgtttgataattttacggtgtattttctgtaggattttggtgttatatccacataatctatctataattaataaaatatatacaagtaaaccgttgaaagtttggaagcttaatccatattttgaccatgttttgtagtactaggctagccgtctttattaaaaaaagtaccgcgtaactacatctagttcaaatttggtaatctctaatatgaggttctaaattagcaaaatcatattttaaagaatttataacatttagccatatttgtcttaggttccaaataatacatagttccaaaggcaaataaactgtcttttatggtttagaaagatttctgccttgagagtaaacttcttaaaataaggttaattccaagagatttgattccagtttatttctaggaataacacaaagaaataatcatttttggtaaacaagataatcagaactcaaacggaaagaaatatgtcagtctgtcaaatccattaagaaaattgatattcacttctactctatttagaaggcacgtcaataattcagaaaaataaaccaagtgcatgcgataatgcaaaagaacacataaatccaaaatatcacaaggttacaaagtcaacttctaaaacttcatattttcttcacacgcttctctttacatttatacacaaagtacgaattaccttttgaaataagttgctaggtacttaatatttataagaaaaacaaaacaaaaaactttgggttgaaatgggaatgttcgttgaataaataagaaaaaaatcgagaaagcaaaagtaggaatggttgatgataagtcactccattcacaaacaatttgagctgtcaataatgtgattttccaaaatctcttttggtaccacaatgttttaaatcattggacatcggaatcaatttattgtattatagtatcgtagtatacaaaagaagttggcttcttctgtttttttttggctctgcagttttcaaatccattgttttaaaataaaacataattcgacttcataattataatcaaagtgttaatctttgaattttaataatctaatattagtggtaccatattgacaagaaggagacaatgtcacagaaacttacctcaggagtcaaaacagaagaattgaaaagaaaaaagaagaaataaaaattggatttttatatttgtttcgaccactatcaactctttctctctcttacaaggagcgaaagagaaacactttccgacttgggtaaggaaaaagagtttgatg

SEQ ID NO: 19308 - DNA, 3000 bp, Unknown; identical to SEQ ID NO: 3669
  misc_feature (1)..( 3000): 2750-1469P.txt file - cDNA_ID_1821403; gDNA_ID_1620655; Annot_ID_47842

SEQ ID NO: 19309 - DNA, 3003 bp, Unknown
  misc_feature (1)..( 3003): 2750-1469P.txt file - cDNA_ID_1821403; gDNA_ID_2926209; Annot_ID_141878
caattgatttaatatttgtttaatagattcgagaagattaattgaaaactgtctcggattagggttcgtgcatgttgtaattagttccgcgtgtttacctataatgcatctgaatctttagactaataattttctttaagattcaatctttatttaagcattgtttatgttaaagctagctggtgaaaacaaggttatcttagatataagtaacactaagattctctagcggaataagatctaatctatatacgatagaatggtaagagttttaagaaaataattaaaaatagaatggttggagtcttggagatcgtggtgagtttgagatcaagtcaaacaacgaaatttggcaagaataatactaattaagcttccgtgaaattaaaatgttttcccttttcttagttggcttaaattttacaaaacggctcaatatctgcttatgaatttcatgttttaagagatcaattctgttctctagtatttggttggatatacgtttgaaactttcttttacattttggtacaacacaagttttgttttctttcttgattcaagtgtttttttcttttcttttctgatctgattcaaaattaattaatataccagaaaatcagtgcatttcgaaagcacaaaactaaatatttttctttattaagcatatatatagcagaatatcctacatacgttatacttatcatcaaatcacaacatgtacattgacctattaattagaaggaaacatccaatatacctacagacattatatatatatatagatactaattagagtcctaacctaagatctaaacaacaccctgatgtgtccgaagtagaaagatcctgtattgttggaggaacattcaaatccaaagcaccactgatcatcggctcctcctccttttcccaatgacatctcatgtgacctcctaaagcttgaccactcgagaacactctaaaacagatattacacttatgatgccctgaaaacgtaaggatttttccctgatgatcatgcccactagaagtagaaaccgtcataggatcatcggttacgtttgtgatagcgaaacagcctttaacgtttttatgactcgctctgtgtcctcctaaagcctgatgtgatccaaacactttcttacatcctccacactcgaaccgttcaatactcgatgatgatggtgtaccattagacagcattaagagacaagaagcgacttcatggtcttcctcggacataaatgagacccaatttggtaatatctggtttaactgttttgaagaagccgcggtgggcacacggtagttaggaggaggattaatgccacgccattgacgctcagggtgacatctcatgtgaccaaagagagccttccaagaccaaaactttctgccacattcagtacatggacgtgtgattttgggggcatttgggtctggttttttggtgtattttggttttgacgcggattttggtgaagaactagaggatgaagcaacggttttggtgcgtttcttcttaggactgtgatcgtagcttgaagataaagcaaactggagatttggattagggttgcttgtgttagaaggatgaagtggaatgtgaaaactgcgatcatcataggaatgattgttgttcattgtgagcacgtagaggaagtgatggaagaaaagtgggaaaaaaaagagtagaagttagagaaagggttgcttaagtagaagaagaaggagaggttacgtgggaaagaagttatggaggaacagggagacagttaacttcagttgaggaacagagcggtttactatgtaaggaagagacttatctctttgcagtttgaaaccaccacgttttttatgtatcagttttgctgcttattatttgttggcccaagtttatctttgatgggccttataatactagagttcattatttcttatgggccttataatactagagtccattatttctgataggccttataaatcttgcgtctattattaaattctaagcctatgcaagaatattgaagcaacaaaattccaaagccaacaaaattccaaagccaattggaagatttggaaaaagtaaagattttagtggagtttgagcttccattactcaatttcggtggaggttccacacttccacagaaataaaatcgccactctcccatcccatgattcacactattgaaattggacatttgattacgatttgtttcctagattattatttttgtttctatatccgttagattttctttatcgtgcgttttcttatcttcctgaaacatttaaataataacaagaattgtttttggtataagtaaacttgtctctcttttttggtaagaaggtttaaggttgcctatataggacaacaaaatcagaaaatgccataagcatctgtaatttttattggtttggggtaaaaaaaggttacaaataaaagaatggtccaacaacatacattcatttttggagttatgtcatatgtggaacatgggaagatgttttaaatacctgaaccaaataatattcgaaatatccagactttctcattgtcgcatgaaagaccacaaaatataatactattacttttcaaaaaagaaaatgaaacaataaaataaatttaaaacagtcattggatcaaggtataacggaatccaaatacaagtataatatataattataaaatactgattcaataatcaaaagtataatcatacaactccatgacgcaaacgattaatggtcccaaagatgatttggttaattatctctttttttgggttaatgatttcactagccaataaaagattatagactaccattatagattatagtaaggaataatatgtttctcatcatcatcttctttactttggctgggaaccaaaagggtcacttcgtcacttgcaaacaaaacaaaaagttttcatttttcactggaaacaaaacttacaagttaagaagttcacatttttcaatcgataatg

SEQ ID NO: 19310 - DNA, 3003 bp, Unknown
  misc_feature (1)..( 3003): 2750-1469P.txt file - cDNA_ID_1821407; gDNA_ID_1620655; Annot_ID_47841
gaaggaatctgacttaaaaggagaaactaaatttaggggagacaaaagagaaaagtcgaacaacaaaggaaagctacaatattttatgtttatttatttcagagattgaagtaagaataaaaatagattttttaagagctttggtttggtcggatagattagattcgttggatgagaatgtgatggtgttttattttacggcggcgattgagcgaagaaaggtcttttattagtgctcaccagctactacttctacacctctctgactctgtctctctccgctgtttcctctcaccttctttcttctgcttttgcattattaaatttaaaccagtttctcttttgtttatcgtttaaattgtaattgaaaaaaaaaactaaaattagaatgttggtttgtacaaaatcaaaatgcatttctggttttactagttaccgttaattgtaaaaaaatttaagtattaagcacgatggttttattctcgtcgtatgagaagactaatttaaatacatgtgatctacttgtaaaagaagcaaccgttcattcaatctcctatcagaaagaatagtaatctcttgagattttttcttaagataaagatatgccaaatatttaaacagtattatggcgtcactgactattatgacgtaagagattgacttttccatatattgcaactttctggagccccgcacataatccctaataagttttacttttgggccttgtttattcactgatccagcccaatgttcaaatacaaaattcagacaccccaaaggccgtattattgtattgttttagactttagaccttacaataaggcctaaaatgataacatattacacatttcaattccagataaaaaaaagaaccgaaaattttaattataaacgctatcaaattgacattttcacaagactgaatcaaatttgacacctccacgtacacaagcaaaattatattttgggttttgtatcaatgtgctggctgattttttttagcaaaactgtcctgtaacatctctccaacttggtttgaattcgttttaacattagtttggtgacaaacataacgttattgaatttttcatttttccgtaataatcattctgatttttttcttttcaaaatgttgttactagatgtttctttcccaagaataatatcttaaatcagtaatcactactaccagtaaacataaatggtacgtttctcctcattctacggaatttttaagaagcaatgatgatgattaattgaggatgtggacaagaatctttatatattcgcattcacatgccataactttcaaagtctatgaaaaaagattctattgcgtgtttatattctgtggtgtgtactgtagttccaaacataacgcttgtactacgttcatttccggaaaatatctaagaaatatggagtcataaatatttattaaccaattagatgtttttcctatgttctaaatacatttatggtaatctttgcggtcaaatatacgaactttaacaacgacgtttaacaatatatcttttgttttatacatatcaagttttgatatacggacgatagatatttattttcagaaaaccagtagttgtcgtagtcacatggtttgtttttcgttgatcaaaatttgttaatgttattcatttagaattagagactgtatatcgaatttggtactcggttctaaaaaaaaaaaaaactcaatatgattttttatacattctttttcttcccttttaatctgtaagaagaatagtaaagtgaagaagaaaaaactattcattatattgtaacatacgaatacgactcacaattaactaaagttaaagtgtctcattgtatttggactttggacattattctccattattgcattgtttctttctttcttgattaattatgtaaagttgaaatgatttgaagatgctttccggatgtaaacaaactaaactttactttaccaataactttgttttcagaaaactcagatatttatctctagtttctcgtataagtcccaatgaatctaagatttcaaaaaccaatcctatatttgtttcatatttacaaaaaaacaccaaatatttttccccaattatgccgacattaaactcatctttttacatacaaaatcccaaattaatatccgtttttacctttacttcatgaaagcgaagatggtaaaaagcagaaacatttcgagatattaatttgattgtataggcccgtgaataaactcgtggacccaaatcgaaaagataacaaaatttaaagatgtacttaattctctgaaaaaattctgtacgcaaacacgagaaagagaagagagacatacacacacaatacacatacgtggtttgagaggacaggagcaaaacggcaggtgtcactaatcccataggcttctctctctgttcactgtccttccgcacaaaaaaaaaaagtattcatttttatattctcacggttacttcgaaatctagctttcgttttctttttttttgatttaaaccaaaagggtaaacaatgctttatgattgcttagtgacgccattgaagcagcggctcactgatagtggcttcttctgcctccaattccaagttgctaaccctagttttcatctctctctctgtatatcatattctctcgtactttcttactttctcttctacttggtagagataaaaagtagtcaaattttattcaaagttttgattttgacatctgaggtttcacctctgttttttttttctagaactcctttgggtatgtgtcttttacgtcactaaagggtttgttatagtcttaggtcatgctttttggtgttatctctctctgttttatcttttagctcaccaagtgattgtgtctgattttcgaattttcaggtggattttgtttcactcactcatcgtcgttgatcagtgactctgtttttgcgaaattctcttcagatttcttgataaaagatagaagacggaattatg

SEQ ID NO: 19311 - DNA, 3000 bp, Unknown
  misc_feature (1)..( 3000): 2750-1469P.txt file - cDNA_ID_1821407; gDNA_ID_2926209; Annot_ID_141879
ggaatctgacttaaaaggagaaactaaatttaggggagacaaaagagaaaagtcgaacaacaaaggaaagctacaatattttatgtttatttatttcagagattgaagtaagaataaaaatagattttttaagagctttggtttggtcggatagattagattcgttggatgagaatgtgatggtgttttattttacggcggcgattgagcgaagaaaggtcttttattagtgctcaccagctactacttctacacctctctgactctgtctctctccgctgtttcctctcaccttctttcttctgcttttgcattattaaatttaaaccagtttctcttttgtttatcgtttaaattgtaattgaaaaaaaaaactaaaattagaatgttggtttgtacaaaatcaaaatgcatttctggttttactagttaccgttaattgtaaaaaaatttaagtattaagcacgatggttttattctcgtcgtatgagaagactaatttaaatacatgtgatctacttgtaaaagaagcaaccgttcattcaatctcctatcagaaagaatagtaatctcttgagattttttcttaagataaagatatgccaaatatttaaacagtattatggcgtcactgactattatgacgtaagagattgacttttccatatattgcaactttctggagccccgcacataatccctaataagttttacttttgggccttgtttattcactgatccagcccaatgttcaaatacaaaattcagacaccccaaaggccgtattattgtattgttttagactttagaccttacaataaggcctaaaatgataacatattacacatttcaattccagataaaaaaaagaaccgaaaattttaattataaacgctatcaaattgacattttcacaagactgaatcaaatttgacacctccacgtacacaagcaaaattatattttgggttttgtatcaatgtgctggctgattttttttagcaaaactgtcctgtaacatctctccaacttggtttgaattcgttttaacattagtttggtgacaaacataacgttattgaatttttcatttttccgtaataatcattctgatttttttcttttcaaaatgttgttactagatgtttctttcccaagaataatatcttaaatcagtaatcactactaccagtaaacataaatggtacgtttctcctcattctacggaatttttaagaagcaatgatgatgattaattgaggatgtggacaagaatctttatatattcgcattcacatgccataactttcaaagtctatgaaaaaagattctattgcgtgtttatattctgtggtgtgtactgtagttccaaacataacgcttgtactacgttcatttccggaaaatatctaagaaatatggagtcataaatatttattaaccaattagatgtttttcctatgttctaaatacatttatggtaatctttgcggtcaaatatacgaactttaacaacgacgtttaacaatatatcttttgttttatacatatcaagttttgatatacggacgatagatatttattttcagaaaaccagtagttgtcgtagtcacatggtttgtttttcgttgatcaaaatttgttaatgttattcatttagaattagagactgtatatcgaatttggtactcggttctaaaaaaaaaaaaaactcaatatgattttttatacattctttttcttcccttttaatctgtaagaagaatagtaaagtgaagaagaaaaaactattcattatattgtaacatacgaatacgactcacaattaactaaagttaaagtgtctcattgtatttggactttggacattattctccattattgcattgtttctttctttcttgattaattatgtaaagttgaaatgatttgaagatgctttccggatgtaaacaaactaaactttactttaccaataactttgttttcagaaaactcagatatttatctctagtttctcgtataagtcccaatgaatctaagatttcaaaaaccaatcctatatttgtttcatatttacaaaaaaacaccaaatatttttccccaattatgccgacattaaactcatctttttacatacaaaatcccaaattaatatccgtttttacctttacttcatgaaagcgaagatggtaaaaagcagaaacatttcgagatattaatttgattgtataggcccgtgaataaactcgtggacccaaatcgaaaagataacaaaatttaaagatgtacttaattctctgaaaaaattctgtacgcaaacacgagaaagagaagagagacatacacacacaatacacatacgtggtttgagaggacaggagcaaaacggcaggtgtcactaatcccataggcttctctctctgttcactgtccttccgcacaaaaaaaaaaagtattcatttttatattctcacggttacttcgaaatctagctttcgttttctttttttttgatttaaaccaaaagggtaaacaatgctttatgattgcttagtgacgccattgaagcagcggctcactgatagtggcttcttctgcctccaattccaagttgctaaccctagttttcatctctctctctgtatatcatattctctcgtactttcttactttctcttctacttggtagagataaaaagtagtcaaattttattcaaagttttgattttgacatctgaggtttcacctctgttttttttttctagaactcctttgggtatgtgtcttttacgtcactaaagggtttgttatagtcttaggtcatgctttttggtgttatctctctctgttttatcttttagctcaccaagtgattgtgtctgattttcgaattttcaggtggattttgtttcactcactcatcgtcgttgatcagtgactctgtttttgcgaaattctcttcagatttcttgataaaagatagaagacggaattatg

SEQ ID NO: 19312 - DNA, 3000 bp, Unknown; identical to SEQ ID NO: 3658
  misc_feature (1)..( 3000): 2750-1469P.txt file - cDNA_ID_1821411; gDNA_ID_1620655; Annot_ID_47840

SEQ ID NO: 19313 - DNA, 3000 bp, Unknown; identical to SEQ ID NO: 3658
  misc_feature (1)..( 3000): 2750-1469P.txt file - cDNA_ID_1821411; gDNA_ID_1620655; Annot_ID_163626

SEQ ID NO: 19314 - DNA, 3003 bp, Unknown
  misc_feature (1)..( 3003): 2750-1469P.txt file - cDNA_ID_1821411; gDNA_ID_2926209; Annot_ID_141880
tgaaaactagggttagcaacttggaattggaggcagaagaagccactatcagtgagccgctgcttcaatggcgtcactaagcaatcataaagcattgtttacccttttggtttaaatcaaaaaaaaagaaaacgaaagctagatttcgaagtaaccgtgagaatataaaaatgaatactttttttttttgtgcggaaggacagtgaacagagagagaagcctatgggattagtgacacctgccgttttgctcctgtcctctcaaaccacgtatgtgtattgtgtgtgtatgtctctcttctctttctcgtgtttgcgtacagaattttttcagagaattaagtacatctttaaattttgttatcttttcgatttgggtccacgagtttattcacgggcctatacaatcaaattaatatctcgaaatgtttctgctttttaccatcttcgctttcatgaagtaaaggtaaaaacggatattaatttgggattttgtatgtaaaaagatgagtttaatgtcggcataattggggaaaaatatttggtgtttttttgtaaatatgaaacaaatataggattggtttttgaaatcttagattcattgggacttatacgagaaactagagataaatatctgagttttctgaaaacaaagttattggtaaagtaaagtttagtttgtttacatccggaaagcatcttcaaatcatttcaactttacataattaatcaagaaagaaagaaacaatgcaataatggagaataatgtccaaagtccaaatacaatgagacactttaactttagttaattgtgagtcgtattcgtatgttacaatataatgaatagttttttcttcttcactttactattcttcttacagattaaaagggaagaaaaagaatgtataaaaaatcatattgagttttttttttttttagaaccgagtaccaaattcgatatacagtctctaattctaaatgaataacattaacaaattttgatcaacgaaaaacaaaccatgtgactacgacaactactggttttctgaaaataaatatctatcgtccgtatatcaaaacttgatatgtataaaacaaaagatatattgttaaacgtcgttgttaaagttcgtatatttgaccgcaaagattaccataaatgtatttagaacataggaaaaacatctaattggttaataaatatttatgactccatatttcttagatattttccggaaatgaacgtagtacaagcgttatgtttggaactacagtacacaccacagaatataaacacgcaatagaatcttttttcatagactttgaaagttatggcatgtgaatgcgaatatataaagattcttgtccacatcctcaattaatcatcatcattgcttcttaaaaattccgtagaatgaggagaaacgtaccatttatgtttactggtagtagtgattactgatttaagatattattcttgggaaagaaacatctagtaacaacattttgaaaagaaaaaaatcagaatgattattacggaaaaatgaaaaattcaataacgttatgtttgtcaccaaactaatgttaaaacgaattcaaaccaagttggagagatgttacaggacagttttgctaaaaaaaatcagccagcacattgatacaaaacccaaaatataattttgcttgtgtacgtggaggtgtcaaatttgattcagtcttgtgaaaatgtcaatttgatagcgtttataattaaaattttcggttcttttttttatctggaattgaaatgtgtaatatgttatcattttaggccttattgtaaggtctaaagtctaaaacaatacaataatacggcctttggggtgtctgaattttgtatttgaacattgggctggatcagtgaataaacaaggcccaaaagtaaaacttattagggattatgtgcggggctccagaaagttgcaatatatggaaaagtcaatctcttacgtcataatagtcagtgacgccataatactgtttaaatatttggcatatctttatcttaagaaaaaatctcaagagattactattctttctgataggagattgaatgaacggttgcttcttttacaagtagatcacatgtatttaaattagtcttctcatacgacgagaataaaaccatcgtgcttaatacttaaatttttttacaattaacggtaactagtaaaaccagaaatgcattttgattttgtacaaaccaacattctaattttagttttttttttcaattacaatttaaacgataaacaaaagagaaactggtttaaatttaataatgcaaaagcagaagaaagaaggtgagaggaaacagcggagagagacagagtcagagaggtgtagaagtagtagctggtgagcactaataaaagacctttcttcgctcaatcgccgccgtaaaataaaacaccatcacattctcatccaacgaatctaatctatccgaccaaaccaaagctcttaaaaaatctatttttattcttacttcaatctctgaaataaataaacataaaatattgtagctttcctttgttgttcgacttttctcttttgtctcccctaaatttagtttctccttttaagtcagattccttcctaatcccattctttcagtcttctctttcgcccttctgagttcaacaactggtaactagatcctctttttgctttacttcattctctgttttgttattcctttaaaagatccatcgaaacttcttagctctttgtcttttttttggttattttgactctttgatctgatgtgggttttgcgtctttctttacttgtggtattgttaaagttcgttactttgttctcgtttagcttcttgtatttggtctaatttaagtcttttgacttttgacagtgttatctctatgaacagttcctttgatgaagaacacaaagtgaaagttgctgtctttataaccaggatttggtaattcccattgtttcatg

SEQ ID NO: 19315 - DNA, 3003 bp, Unknown; identical to SEQ ID NO: 19314
  misc_feature (1)..( 3003): 2750-1469P.txt file - cDNA_ID_1821411; gDNA_ID_2926209; Annot_ID_202464

SEQ ID NO: 19316 - DNA, 3000 bp, Unknown
  misc_feature (1)..( 3000): 2750-1469P.txt file - cDNA_ID_1821415; gDNA_ID_1620655; Annot_ID_47838
tgcaaaagggaaatgctggtgttggaagaaggacgatgagaaatagtctaaacattagcatgagagacgcgtagaggttgttttccccggtgtttaatatgttagtgcgatcgtgactgcgaaaatgttcttattcatggaatcaacaacctcaatgctcaccacctagaaggcgatgaaagaagaccaaaccggattcatacctgtggatggttcgagttttgtttaacgactgtgtgattaatcgtcaagtagttttggaggttttttctttacctctttgttgtttgttcattatggccattgttgaagttagtgagctttgttcatcatctgccattgttaaactttgttcacttgtatttgaaaaaaacaaaaatgtctttgtatgttgtgtgatttctaagcatttttactttgaaaatctatttcttcttttctagacgatcacgacccttcatccatatcggactacacaactcgatattgaataaatttatatgagaatagtaccaatggcctatgatgtggaagatgatgagctagcaagtctcaatcatgtaaatgaaagtgctttttctaagtaatctgtatttaaactcaaataaaaccaaaactcaaagctgttccaagcaaattattcattggccacaatctgtaatttggaacattatgcaccaaaaccatttttaatgtattttacatatacaggttttttggtacttctcctatacacatggcatattcatattaacaaaaaatatttattttggtgtcacttttcatattttattagtgtaaaataacctcttcttaagagtaacgtatggcaatttggtcagctttgttatttaaaaattatatgttaattagctaaaatacgatcatttgtacccaaattctcttaatttaaaactagtccgacttgaaagtaaaagtttagtttaaactataatcagaacaataaatatcaatacgccaccgacgatttgctgccaccgacaaatgttttgtcggccacacgcgtctcagttttatggaaccgaactctcgttaatactttgcttttttacataccatttttgttgaaaaccccacaaaatgggaaaataattcggtgaaatattttagatttttagttctacttgtatcatgaaattaagagttcttcgacatagattgttgttatcatcaattatcattatgatcattgtgtatatgaaactatacaacgaaattcagaatcataattagatagaagaatctcatgttgtttttcacattaaaaccaaaaaaaaaaaagaatctcatgttggcgcgtaaaagattaaaacgaaaataacggatttttctatataatttgcatggttattaaaatacaaaaatacaactgcacagccacaaactcgtaaccacaaataaaataaataaattgattaataataatctaggcaaattaattatagcaaaatacaacatcaagtttaaaaaaaaaaagacgaattatacattcattatactccattgcacaaaagtaaaaaaagaacagacaaatcacaaaatctcaaccttatatgaatcattttatcgttgacgcttgtatttgcaagaaagaggaagagaatcttctgaagaaggtcccatgaaattacggatctgagatcggagtttgaagaaaacgtgcattatacttcctctgttttgtgaaccaatcgatttagcttcgtctttgttaagctcaagatctctgatgaatataggttttcttgaaaggatccatgaccaaccccattcccaccattctttcacagagcttcctgcttgttctcccatggcggaaacagatttggatctcgggaatctagctgcgatcgctgctggttggtttgagaggttgagtgatagagaagagagacgacggcggatgagaccaggctcatcgtcggcggtggctgctgcattagggcgttgagaaacggggagggaagtgggtttacgaatctggagagtctccatcattgagctcataacttctttgttcttctttgtgttgagagagattgaagaagaagatgaatgtgaatgtgagagattgattagtgaacacagctctaacacaggctggggttttattccactttatttttgtggggtccatttacttttatgcccccagccaattacattcattttgttgttgctgtttgtttttgtattaaataatttgtattgttatgtttatttgttgatttgtatagttagttgttttgtgtatgaatgaatgcacctataatattggaaatataacaattttatttttagtgaatatagataaacattgttttcaggtagggttccatcacaagtcacaatacaaatttaattaaaaaaattctttgtaattttattttaaaggttattttcccagtacagaaatctgttgaaattgcattggctttgatttttttataataaaaatcagaaaaatgtagcagaatctgtccaatgtccatagccaagcaaatttatgttgacagaaaaaagaacaatcacatacaaaaatccaaaaaagaaaaaagatatcccagacgggcctaatcaggtattagactaaggcccaataaatttcaagcccaaaatcgaaattaagcactttattctttctttttttaatagctatcgagtgtgtatgttcggagaagagatcacagagatctgagagcttgaaacaatggagtaccggaaaatcaaagatgaggttcgttacttccatttcactttgtctttctgctgcttttaatttaagatttggactctctttaatgctcaattttgttccgagcttcttcaggacgatcatgacgttgcttctgatatcgagagtgtgaaaggaaaatctcataccggtgagatattcttttctcaaattccacttctcgtgttctttaatgtgctcattggtgctttgatttgacagttgcttcgagtaacattgcaatg

SEQ ID NO: 19317 - DNA, 3003 bp, Unknown
  misc_feature (1)..( 3003): 2750-1469P.txt file - cDNA_ID_1821415; gDNA_ID_2926209; Annot_ID_141882
tgatgcaaaagggaaatgctggtgttggaagaaggacgatgagaaatagtctaaacattagcatgagagacgcgtagaggttgttttccccggtgtttaatatgttagtgcgatcgtgactgcgaaaatgttcttattcatggaatcaacaacctcaatgctcaccacctagaaggcgatgaaagaagaccaaaccggattcatacctgtggatggttcgagttttgtttaacgactgtgtgattaatcgtcaagtagttttggaggttttttctttacctctttgttgtttgttcattatggccattgttgaagttagtgagctttgttcatcatctgccattgttaaactttgttcacttgtatttgaaaaaaacaaaaatgtctttgtatgttgtgtgatttctaagcatttttactttgaaaatctatttcttcttttctagacgatcacgacccttcatccatatcggactacacaactcgatattgaataaatttatatgagaatagtaccaatggcctatgatgtggaagatgatgagctagcaagtctcaatcatgtaaatgaaagtgctttttctaagtaatctgtatttaaactcaaataaaaccaaaactcaaagctgttccaagcaaattattcattggccacaatctgtaatttggaacattatgcaccaaaaccatttttaatgtattttacatatacaggttttttggtacttctcctatacacatggcatattcatattaacaaaaaatatttattttggtgtcacttttcatattttattagtgtaaaataacctcttcttaagagtaacgtatggcaatttggtcagctttgttatttaaaaattatatgttaattagctaaaatacgatcatttgtacccaaattctcttaatttaaaactagtccgacttgaaagtaaaagtttagtttaaactataatcagaacaataaatatcaatacgccaccgacgatttgctgccaccgacaaatgttttgtcggccacacgcgtctcagttttatggaaccgaactctcgttaatactttgcttttttacataccatttttgttgaaaaccccacaaaatgggaaaataattcggtgaaatattttagatttttagttctacttgtatcatgaaattaagagttcttcgacatagattgttgttatcatcaattatcattatgatcattgtgtatatgaaactatacaacgaaattcagaatcataattagatagaagaatctcatgttgtttttcacattaaaaccaaaaaaaaaaaagaatctcatgttggcgcgtaaaagattaaaacgaaaataacggatttttctatataatttgcatggttattaaaatacaaaaatacaactgcacagccacaaactcgtaaccacaaataaaataaataaattgattaataataatctaggcaaattaattatagcaaaatacaacatcaagtttaaaaaaaaaaagacgaattatacattcattatactccattgcacaaaagtaaaaaaagaacagacaaatcacaaaatctcaaccttatatgaatcattttatcgttgacgcttgtatttgcaagaaagaggaagagaatcttctgaagaaggtcccatgaaattacggatctgagatcggagtttgaagaaaacgtgcattatacttcctctgttttgtgaaccaatcgatttagcttcgtctttgttaagctcaagatctctgatgaatataggttttcttgaaaggatccatgaccaaccccattcccaccattctttcacagagcttcctgcttgttctcccatggcggaaacagatttggatctcgggaatctagctgcgatcgctgctggttggtttgagaggttgagtgatagagaagagagacgacggcggatgagaccaggctcatcgtcggcggtggctgctgcattagggcgttgagaaacggggagggaagtgggtttacgaatctggagagtctccatcattgagctcataacttctttgttcttctttgtgttgagagagattgaagaagaagatgaatgtgaatgtgagagattgattagtgaacacagctctaacacaggctggggttttattccactttatttttgtggggtccatttacttttatgcccccagccaattacattcattttgttgttgctgtttgtttttgtattaaataatttgtattgttatgtttatttgttgatttgtatagttagttgttttgtgtatgaatgaatgcacctataatattggaaatataacaattttatttttagtgaatatagataaacattgttttcaggtagggttccatcacaagtcacaatacaaatttaattaaaaaaattctttgtaattttattttaaaggttattttcccagtacagaaatctgttgaaattgcattggctttgatttttttataataaaaatcagaaaaatgtagcagaatctgtccaatgtccatagccaagcaaatttatgttgacagaaaaaagaacaatcacatacaaaaatccaaaaaagaaaaaagatatcccagacgggcctaatcaggtattagactaaggcccaataaatttcaagcccaaaatcgaaattaagcactttattctttctttttttaatagctatcgagtgtgtatgttcggagaagagatcacagagatctgagagcttgaaacaatggagtaccggaaaatcaaagatgaggttcgttacttccatttcactttgtctttctgctgcttttaatttaagatttggactctctttaatgctcaattttgttccgagcttcttcaggacgatcatgacgttgcttctgatatcgagagtgtgaaaggaaaatctcataccggtgagatattcttttctcaaattccacttctcgtgttctttaatgtgctcattggtgctttgatttgacagttgcttcgagtaacattgcaatg

SEQ ID NO: 19318 - DNA, 3003 bp, Unknown
  misc_feature (1)..( 3003): 2750-1469P.txt file - cDNA_ID_1821417; gDNA_ID_1620655; Annot_ID_47835
aaaaaacacggatcatttcaaatgggagtcgaggatctgaaggaagtcgacataaacaagttcttaattatataaaaaagtgggcgtcagcttcaagaaacaaagtatcttcccatgtggttcatggtcggctgctaccatatcttcgggacacagcagtgtctgataaggtatcccacacctgcacaagcatgcgtatacatatacgttggttatctcaaaaacagaatttgttatttcttgtaccatcaaaatccctacttacatttagcccctctgagccaccaacagcgagtaagaaggggcagtccgctgagaatgagaccgagaaaacttctccctgtttgatatatcaaagtttggaatggtaaacaaagaaaccagaaacaaacatatggcagcaaaagttcttattcatggctcttacagcatttggcttgtttgtagcaatccatgatggttggttgtttgaaagatcccaaagtttcacactttcatccgcagatcccgtagccaaaagctgcacagctcggatattaaacgactacactatgaatatggtaggagacaagagagaaagagagatatatgtgtgtacattgggggcatgtatgttgtatgatatggaggagacttcactatcatgagcatggataatgaaacttggtgataaatcagaagcacgtgtatcaaagcccttcacagttccatctttgagactcacctaagatggaagaagaaaagttaacgattcacatcagatatctgaatcattcagatgtttgtgttagaagagcaaagaaagcgtaatgcaccacaaaggagtgttcgctgtgaggatcccaagccaatttttcgactttggcctcggtagaccatttcaaacccgagtttgaagggtcccttccatctttctcaaacatatatatatatatatatatatatatataaaagactgatcaacataatgataaaaaaatttcatgtacaagactcaacacataaatggaacaaaacagtcaccaatactacagtacgatcacgagacccactgaggagtacttctggagtataattgttccatgcaaccgcgtgaacctgttagccaaacaacacacaataaataaaccatgagcatgcacagatgctagcttgaaagagcatggaaacagtttcaccttcataccttcttttcgtgatgctccatagtaaccttgcatttccccgtagccacatcccaaaccttcacttttttgtcttcactaccactagcaactatattcctattttcccagttaaaagttaaaaaaaaaagagtctggtaagcaagttctggagattattttcaatcatgaaaccagcgagcttaaacatatgtaccgaaactccttgttccaagcaagatcaattactggaccagtgtgggaatctgatgtctagagtgagagaaagacaactaacatgttacatttggaaaaacagaggagctaaataattttcaaaagttggttgtcacacctgcccggctatccgtcccagttgtacacaaggtagcacctcattcacctgaagcattatataatcagcttacaaatcattatctcatgatggataaaacaaaaggtaaacatcatcaaaaaaacagttaacaagtacatacaaggtcaagatcccatatctctatagaggactccattgtcccgatagctacaaagttccctgcgaacacgaaagcaaaacttgaggaaaatgatcataatctcatccacagctattcttggatacacacaaaccttttccccctcctttgagaggacaatcaagccatgctgtgcacaatggaagctcggatataatcatgtcattgcgaagataaatgttttcggattcctcatatacataaacctcgagatagttgacttcatgtttaatagcagcacagatgatcagtgaatcggttggcctaattgtcaagtcatcgtgatcctctgagtcatagtcaccctaggggatatcaagatcagtatttactattgagtctccacaattagtaagagaaaaattaatggtgtttcttacgtcagtatcctttaggtatggatccatgtcattgcttggataataaaggtgtccctgcccagagctaaacagttcaatctctgagtccaaacgcaagaatgaaggaaactgtacattagcatatatgcaatgaaaatatgcaaatatgtaggaaaaacagaagaaagttatataccatcatcctcttcatcatagttatccatgtcgagttctttcaagaacttgacaacttcatcagcatctgttgaagaagaagaagcaaccttgcttttcccaaaagattttgctacagacttggcatgagtaacttgagcattctgaatttcatcgtccatcttttcttccatacaaggagattcagcagcaacaggcatagcctttgatgcctcttttgggatccatgaaagtgcaactatcgtcattctgcaaaaatcaaaagagatttttacttaataagcgcagctcggttaggaaagcagagaacgccatgaagcaactatgaatgaatcagcaaactagagatgacttttagggtctgtaaacttggcaactaaagagcttacgatccaaaaaggtttcaactttaagaaagagagactccaattcatctatacaagactattgtatatacaatgcactatacaaatgaactatatactatgatagcttactatcagaaacgaaaaccacacaacaacgtaggactcgtcgaagaggagaatccaagaagcttgctctgcttgggaacgcgcggcacaaggaggcaaggaggataaacgagaaacgcttgaaagcaattaaaataagggtttcctcttaacttgccatttttctgttttaaagaaaaatcacttttttattctacagtgtttcattttcatatctcacacgtacgaacgaagaatggagagcgactccgagatg

SEQ ID NO: 19319 - DNA, 3000 bp, Unknown
  misc_feature (1)..( 3000): 2750-1469P.txt file - cDNA_ID_1821417; gDNA_ID_2926209; Annot_ID_141885
aaacacggatcatttcaaatgggagtcgaggatctgaaggaagtcgacataaacaagttcttaattatataaaaaagtgggcgtcagcttcaagaaacaaagtatcttcccatgtggttcatggtcggctgctaccatatcttcgggacacagcagtgtctgataaggtatcccacacctgcacaagcatgcgtatacatatacgttggttatctcaaaaacagaatttgttatttcttgtaccatcaaaatccctacttacatttagcccctctgagccaccaacagcgagtaagaaggggcagtccgctgagaatgagaccgagaaaacttctccctgtttgatatatcaaagtttggaatggtaaacaaagaaaccagaaacaaacatatggcagcaaaagttcttattcatggctcttacagcatttggcttgtttgtagcaatccatgatggttggttgtttgaaagatcccaaagtttcacactttcatccgcagatcccgtagccaaaagctgcacagctcggatattaaacgactacactatgaatatggtaggagacaagagagaaagagagatatatgtgtgtacattgggggcatgtatgttgtatgatatggaggagacttcactatcatgagcatggataatgaaacttggtgataaatcagaagcacgtgtatcaaagcccttcacagttccatctttgagactcacctaagatggaagaagaaaagttaacgattcacatcagatatctgaatcattcagatgtttgtgttagaagagcaaagaaagcgtaatgcaccacaaaggagtgttcgctgtgaggatcccaagccaatttttcgactttggcctcggtagaccatttcaaacccgagtttgaagggtcccttccatctttctcaaacatatatatatatatatatatatatatataaaagactgatcaacataatgataaaaaaatttcatgtacaagactcaacacataaatggaacaaaacagtcaccaatactacagtacgatcacgagacccactgaggagtacttctggagtataattgttccatgcaaccgcgtgaacctgttagccaaacaacacacaataaataaaccatgagcatgcacagatgctagcttgaaagagcatggaaacagtttcaccttcataccttcttttcgtgatgctccatagtaaccttgcatttccccgtagccacatcccaaaccttcacttttttgtcttcactaccactagcaactatattcctattttcccagttaaaagttaaaaaaaaaagagtctggtaagcaagttctggagattattttcaatcatgaaaccagcgagcttaaacatatgtaccgaaactccttgttccaagcaagatcaattactggaccagtgtgggaatctgatgtctagagtgagagaaagacaactaacatgttacatttggaaaaacagaggagctaaataattttcaaaagttggttgtcacacctgcccggctatccgtcccagttgtacacaaggtagcacctcattcacctgaagcattatataatcagcttacaaatcattatctcatgatggataaaacaaaaggtaaacatcatcaaaaaaacagttaacaagtacatacaaggtcaagatcccatatctctatagaggactccattgtcccgatagctacaaagttccctgcgaacacgaaagcaaaacttgaggaaaatgatcataatctcatccacagctattcttggatacacacaaaccttttccccctcctttgagaggacaatcaagccatgctgtgcacaatggaagctcggatataatcatgtcattgcgaagataaatgttttcggattcctcatatacataaacctcgagatagttgacttcatgtttaatagcagcacagatgatcagtgaatcggttggcctaattgtcaagtcatcgtgatcctctgagtcatagtcaccctaggggatatcaagatcagtatttactattgagtctccacaattagtaagagaaaaattaatggtgtttcttacgtcagtatcctttaggtatggatccatgtcattgcttggataataaaggtgtccctgcccagagctaaacagttcaatctctgagtccaaacgcaagaatgaaggaaactgtacattagcatatatgcaatgaaaatatgcaaatatgtaggaaaaacagaagaaagttatataccatcatcctcttcatcatagttatccatgtcgagttctttcaagaacttgacaacttcatcagcatctgttgaagaagaagaagcaaccttgcttttcccaaaagattttgctacagacttggcatgagtaacttgagcattctgaatttcatcgtccatcttttcttccatacaaggagattcagcagcaacaggcatagcctttgatgcctcttttgggatccatgaaagtgcaactatcgtcattctgcaaaaatcaaaagagatttttacttaataagcgcagctcggttaggaaagcagagaacgccatgaagcaactatgaatgaatcagcaaactagagatgacttttagggtctgtaaacttggcaactaaagagcttacgatccaaaaaggtttcaactttaagaaagagagactccaattcatctatacaagactattgtatatacaatgcactatacaaatgaactatatactatgatagcttactatcagaaacgaaaaccacacaacaacgtaggactcgtcgaagaggagaatccaagaagcttgctctgcttgggaacgcgcggcacaaggaggcaaggaggataaacgagaaacgcttgaaagcaattaaaataagggtttcctcttaacttgccatttttctgttttaaagaaaaatcacttttttattctacagtgtttcattttcatatctcacacgtacgaacgaagaatggagagcgactccgagatg

SEQ ID NO: 19320 - DNA, 3000 bp, Unknown; identical to SEQ ID NO: 3661
  misc_feature (1)..( 3000): 2750-1469P.txt file - cDNA_ID_1821423; gDNA_ID_1620655; Annot_ID_47833

SEQ ID NO: 19321 - DNA, 3003 bp, Unknown
  misc_feature (1)..( 3003): 2750-1469P.txt file - cDNA_ID_1821423; gDNA_ID_2926209; Annot_ID_141887
gtgaatcgttaacttttcttcttccatcttaggtgagtctcaaagatggaactgtgaagggctttgatacacgtgcttctgatttatcaccaagtttcattatccatgctcatgatagtgaagtctcctccatatcatacaacatacatgcccccaatgtacacacatatatctctctttctctcttgtctcctaccatattcatagtgtagtcgtttaatatccgagctgtgcagcttttggctacgggatctgcggatgaaagtgtgaaactttgggatctttcaaacaaccaaccatcatggattgctacaaacaagccaaatgctgtaagagccatgaataagaacttttgctgccatatgtttgtttctggtttctttgtttaccattccaaactttgatatatcaaacagggagaagttttctcggtctcattctcagcggactgccccttcttactcgctgttggtggctcagaggggctaaatgtaagtagggattttgatggtacaagaaataacaaattctgtttttgagataaccaacgtatatgtatacgcatgcttgtgcaggtgtgggataccttatcagacactgctgtgtcccgaagatatggtagcagccgaccatgaaccacatgggaagatactttgtttcttgaagctgacgcccacttttttatataattaagaacttgtttatgtcgacttccttcagatcctcgactcccatttgaaatgatccgtgttttttttatatctaaacgttgttgattgttgcatacaataatctcaaacatattttcattcaaaaaaataaagtttcaaaaatattttcttatttatgtctcagtatctgtctagttttgctaatttctctagttaattctattgttttaataataaaacaaaacaaacccaaagccagtttattattcaatcgggttttgtttggtacattgctaatttcaaggcccgttctgatcaaaggtttggatgttggataaacattttttcagagagagccaaaccaatcgaagcgacaaaccctaattcccaattttctgagcaaaagacaccgtcagcaagagatgatgcgtgcttccgtgtatgccaaggtacgcgaatatgaacagaacctgcagctgaattctctttgtttgatccgctggtttcattgattatatatgattccaaatgcatttcagtattgtgtatccctgatctcgcaatttttcaaccagagtaggggtaagcaagaataatgtgtatttttttttctcttggatatgaatacaaatttcatggaaccctaagatataagaggttcaaatttggattgagagaatcagaacaaagtttaagattaagcgaaaggagtttggagaagacttataaaaggctagtggaaaaggaacaacaactttgtgaccggctaaatcaggtaattaataagcataaccaataacgggcatttttagtttggatatgatcataccaattttatttgatcaaaacaaatttagagatcgaagaaagtaaaacaacgtttgaaagaaaccgagttgagtttggatgagatttctgcaaagcttgaggaaagacatcgacgactctttgataggcttgaggtaactaagaacgagttttttttgtgtctttcttttataaacactaattatattgaccctatgttatgtttggtagaaatcagtacaaaaattggaactaagtgaaacgaatttggaagagtgcttgaaaagctacgactatgccattacaaagttgaggaagtgtggatgaaggaatcgatgaggaagagtagtactgagagaatcatgaatcaaaacctttggaataataattaattagtaaaatgtttctagaagtcttgttacggttttaggttcctttgatcctattaggactaggtcttatttggatgattgatacaaggtaaaacgttacatcttccttccatcaccatttggtttatccaagcaaattcaattgcttcctttgaaaatgtcaatttatgtataaacccactactgcaaaatgaatgcaaccaatcaaatataattatattaatgtatgcatataatatatacttttgtagaaatgacgatatattcctatttcttagacagcatattgcgatgtccttacggtcgagaatattgcaagacaatcaatgtatatcatcaaaatgtcgtcgtgtttggcgtttggacaccagtatagttggattaaacccacaataatctatggcctagaaaccaaaataatcatttgacttgttacacttgtacttatacaagtcggattaattttagtcgtagtgaattgattgataagtcatacccaaattttggaatcatcttttttctctctctttggtcgtctatctatagtttcttaatccctaaatcaacatttcataaactatcttttattttacccatatacgatactaaatgttcgaagaataaccaatgcattaatatgactaatgactacattatcgtgggaattgaagaaaatcatagtcattacttactttactttactactgttacgttcaaaaaaagtcatacaagaaagctagaaaatgtataagtgcaattatgtttctactttctagattactacggttacgttcccatcaaagtcaatttgattaagacgcattactatactttttaataacgtgaccattagtatacatttgtatggtatcaatatttaaaaacatttgattggatcatagttgccatatgggacgtgggagatgagtgggtaataagacagtcacacgcgcctctctataacacatgatctccacgcgctcttcctcttcagcaggaaagcttttaccaattcagcaaatcaagaagctatataaatgccgcacttaacgtattgaaacttacgatcaaatatcaatctctctctctttcgaccaatggactaaatcaaaacttttgattttccggcgatg

SEQ ID NO: 19322 - DNA, 3003 bp, Unknown
  misc_feature (1)..( 3003): 2750-1469P.txt file - cDNA_ID_1821429; gDNA_ID_1620655; Annot_ID_47829
aactcttgattgattcgttaagaggactttgttatatgttgttacagggttcaatgcagctgtggctggatgcttctttgcagttgaatccgttttgtggccttcttcatcaactgattcatcaacttcacttccaaacacaacttctatggttattcttagtgctgttactgcttctgtggtttccgaaatcggtctcggctctgaacctgcgtttaaggttcctgactatgacttccgctctcctggaggtaatatgcattgccattcttatgctttttacgcaagggaaccagaaaccaaacttatgagagctggtcactgattttcagaacttccactctatcttttattgggcgctctgtgtggcttggtctcgttggcattatctcgatgtacatcatccatgacatctgctgttgacagtcttaacaaggatgctgggataccaaaggctgtatttcctgtaatgggtggattaagtgttggtatcatagctttggtataccctgaagtattatactggggttttcagaatgtggatattttgttggagaaacgtccatttgtgaagggtctttcagctgatcttttgcttcagctggtagcggtcaagatagctgcaaccgcatggtgtcgggcttctggacttgtcggtggatactatgctccttctctctttattggcggggcagcaggaatggcctatggaaagtttattggacttgctttggctcagaaccctgatttcaatctctctatcttggaagtggcatctccacaagcttatggtctggtactgttcttatgtggtcaatgtttcaaaattgtcttaatttcagactttcttgattggttacctatcaatactttgaacagaatattttttcgggttaactgagaatggatgctagtttttttgtagcttcattgccaatgatcctgtttgtctcattgtttaacaggttggaatggctgctacacttgcgggggtttgtcaagttcctcttacagcagtactactgctatttgaacttacacaggattatcgtatagtgttacctctactgggagctgtaggcatgtcttcatggattacatctggacaatcaaagagacaagaaactagagaaacaaaagaaactaggaaaagaaagagccaagaagctgtacagtctctgacgtcatctgatgatgaatcatcaacgaataacctttgtgaagttgaaagttctctttgccttgatgattctctcaaccaatctgaggagctgccgaagagtatttttgtttcagaagccatgcgaacaagatttgcgacagttatgatgagcacttctttggaagaggcattaactcgtatgctgatagagaaacaatcctgcgccttgattgttgatcctgacaatatctttctcggtatacttacactttcagacattcaggaattcagcaaagcaagaaaagaaggaaataatagacccaaggtacgaaattgaatagtctgaaataactatttctttgatcattaattgaagcatttctttggcttaggatatttttgttaatgacatctgttcgaggagtggaggaaaatgtaaagtgccatggactgttacacctgatatggatcttctcgctgcccaaacaatcatgaacaagcatgaactttctcatgttgcagtcgtttcaggcagcattgatgctcccagaatacaccctgttggggtcctggatagagaatgtatcactctaacacgcaggtaaacctgcatctatttcccctcggtttaactgtttgtcccaagatcaccttttcatatggattgtttttaatgaacctaactgactaacctagtcttccatatgacaagagtgtgtagagagtctgtgtaactataacttgggctgccaggtttcccacattggatgtagtagaagttaaattagttaaaaaaaattacttgcaactttttgtttgctcatcagaggaaaggagtgagtcgcaaagtccagtttgctagatttttaattttagagctttcatctgtattagagttgataccgaaaatattgacccagcaaataaggttcctcaattcatttgaaacttttcggtgtagatgctgcattggagatgatactggtttttcttaaccttttctcttgcttgacctggcagggctctagcaaccagaatgtacctcctaaattcgctgtatctgtaaatggtcttgctttgtaactcttctgagctgaccagggtgatttcaatttgtttcttctgtgaggctccgggccaatttttgttctttgtattaagagatttggggagaatgagttggctggtgcagcgtggatgttttttgtctactccatctgttggtttaaatggtgaagcccccatttctcacttaaggtgctgagcaatccaaagggaatcgaaacatggagcgtggttctgagaaaatcttcagaaattttcctgaaaccaaagatatgtgctcaggtgattcgttaccatttacacttttttcttacagattgttactgtaccttacttagtattgtctattttgtaaagtgctttctgacttatatcatattgagaaagttttgactacttaaagactaacagtgtcaacaattgtaagggtttccttgtccactattttgtatattgaagaacattgaaatatattggaatgcccttatttctggtgtgtgtgtctctctcggtgagccgcaagggcatgttgacatctaattgtatggatatttttctctaagaaaattcctagagaaaacagtagtcaggccattgtgttggttaaacaaccctcctaaaaccttttaggtaaagaagaagcaaccccgcatgggttgaatgacctacctaacctatacttacctccatcatgatatagctagtaccctctgaacatgcatggatacacatgctatataatcattcgggtgtgattccatttataccggaaaatg

SEQ ID NO: 19323 - DNA, 3000 bp, Unknown
  misc_feature (1)..( 3000): 2750-1469P.txt file - cDNA_ID_1821429; gDNA_ID_2926209; Annot_ID_141891
cttgattgattcgttaagaggactttgttatatgttgttacagggttcaatgcagctgtggctggatgcttctttgcagttgaatccgttttgtggccttcttcatcaactgattcatcaacttcacttccaaacacaacttctatggttattcttagtgctgttactgcttctgtggtttccgaaatcggtctcggctctgaacctgcgtttaaggttcctgactatgacttccgctctcctggaggtaatatgcattgccattcttatgctttttacgcaagggaaccagaaaccaaacttatgagagctggtcactgattttcagaacttccactctatcttttattgggcgctctgtgtggcttggtctcgttggcattatctcgatgtacatcatccatgacatctgctgttgacagtcttaacaaggatgctgggataccaaaggctgtatttcctgtaatgggtggattaagtgttggtatcatagctttggtataccctgaagtattatactggggttttcagaatgtggatattttgttggagaaacgtccatttgtgaagggtctttcagctgatcttttgcttcagctggtagcggtcaagatagctgcaaccgcatggtgtcgggcttctggacttgtcggtggatactatgctccttctctctttattggcggggcagcaggaatggcctatggaaagtttattggacttgctttggctcagaaccctgatttcaatctctctatcttggaagtggcatctccacaagcttatggtctggtactgttcttatgtggtcaatgtttcaaaattgtcttaatttcagactttcttgattggttacctatcaatactttgaacagaatattttttcgggttaactgagaatggatgctagtttttttgtagcttcattgccaatgatcctgtttgtctcattgtttaacaggttggaatggctgctacacttgcgggggtttgtcaagttcctcttacagcagtactactgctatttgaacttacacaggattatcgtatagtgttacctctactgggagctgtaggcatgtcttcatggattacatctggacaatcaaagagacaagaaactagagaaacaaaagaaactaggaaaagaaagagccaagaagctgtacagtctctgacgtcatctgatgatgaatcatcaacgaataacctttgtgaagttgaaagttctctttgccttgatgattctctcaaccaatctgaggagctgccgaagagtatttttgtttcagaagccatgcgaacaagatttgcgacagttatgatgagcacttctttggaagaggcattaactcgtatgctgatagagaaacaatcctgcgccttgattgttgatcctgacaatatctttctcggtatacttacactttcagacattcaggaattcagcaaagcaagaaaagaaggaaataatagacccaaggtacgaaattgaatagtctgaaataactatttctttgatcattaattgaagcatttctttggcttaggatatttttgttaatgacatctgttcgaggagtggaggaaaatgtaaagtgccatggactgttacacctgatatggatcttctcgctgcccaaacaatcatgaacaagcatgaactttctcatgttgcagtcgtttcaggcagcattgatgctcccagaatacaccctgttggggtcctggatagagaatgtatcactctaacacgcaggtaaacctgcatctatttcccctcggtttaactgtttgtcccaagatcaccttttcatatggattgtttttaatgaacctaactgactaacctagtcttccatatgacaagagtgtgtagagagtctgtgtaactataacttgggctgccaggtttcccacattggatgtagtagaagttaaattagttaaaaaaaattacttgcaactttttgtttgctcatcagaggaaaggagtgagtcgcaaagtccagtttgctagatttttaattttagagctttcatctgtattagagttgataccgaaaatattgacccagcaaataaggttcctcaattcatttgaaacttttcggtgtagatgctgcattggagatgatactggtttttcttaaccttttctcttgcttgacctggcagggctctagcaaccagaatgtacctcctaaattcgctgtatctgtaaatggtcttgctttgtaactcttctgagctgaccagggtgatttcaatttgtttcttctgtgaggctccgggccaatttttgttctttgtattaagagatttggggagaatgagttggctggtgcagcgtggatgttttttgtctactccatctgttggtttaaatggtgaagcccccatttctcacttaaggtgctgagcaatccaaagggaatcgaaacatggagcgtggttctgagaaaatcttcagaaattttcctgaaaccaaagatatgtgctcaggtgattcgttaccatttacacttttttcttacagattgttactgtaccttacttagtattgtctattttgtaaagtgctttctgacttatatcatattgagaaagttttgactacttaaagactaacagtgtcaacaattgtaagggtttccttgtccactattttgtatattgaagaacattgaaatatattggaatgcccttatttctggtgtgtgtgtctctctcggtgagccgcaagggcatgttgacatctaattgtatggatatttttctctaagaaaattcctagagaaaacagtagtcaggccattgtgttggttaaacaaccctcctaaaaccttttaggtaaagaagaagcaaccccgcatgggttgaatgacctacctaacctatacttacctccatcatgatatagctagtaccctctgaacatgcatggatacacatgctatataatcattcgggtgtgattccatttataccggaaaaatg

SEQ ID NO: 19324 - DNA, 3000 bp, Unknown; identical to SEQ ID NO: 3697
  misc_feature (1)..( 3000): 2750-1469P.txt file - cDNA_ID_1821437; gDNA_ID_1620656; Annot_ID_47869

SEQ ID NO: 19325 - DNA, 3003 bp, Unknown
  misc_feature (1)..( 3003): 2750-1469P.txt file - cDNA_ID_1821441; gDNA_ID_1620618; Annot_ID_46967
gcaagagttttgtttaacaacgttcattataacttacctccttggtcaatcagtattcttccagactgtagaaatgcagtcttcaatactgcaaaggtaagtgtatatggttgaaactcagaattatggttcctcaaattctctgtgttttttctgattcttgtggatttctcttgtttaatttaaggttggagttcaaacatcccagatggaaatgttgcctacagacacaaagaatttccagtgggagagttatttggaagatctttcttctctagatgacagctccacattcaccactcacggactcttggagcagataaatgtcacgcgtgacacaagcgattatctttggtacatgacgaggtaaaagaaaaacccgtctgctaccttatacaatgtaaactttccctagcttcaaagtgattctcgacacgtgctaacaaacatgtggaattggtatgtagtgttgatatcggtgacagtgaatcattcttgcatggaggagagctaccaactctcattattcaatctacaggccatgccgtgcatatatttgtcaatggacagctttcaggtatgatacttccactagtttggcctgttaatttgttctattagagaatttctgatgcaaacttataatatatgaattgcaggttctgcctttggaacaaggcaaaacaggagatttacttatcagggaaagatcaatctgcattctggaactaacagaattgcgttgctgagtgttgctgttggattaccagttagtagtcttttctctcttccgtgtaaacgatgtttttcgtttttctcttatcctgacccctttcctctttttcgtttttgaagaatgtgggtggacactttgagtcatggaatactggaatcttgggtccggtggcattgcatgggttgagtcaagggaaaatggatttgtcatggcagaaatggacataccaggtgttttatctatcctattttctcgtgatttctctcttttgatcccttttttctgtattaagttgtttaactctgttttcatcaggtgggactgaaaggtgaagctatgaatcttgcatttccaaccaacactccctctattggatggatggatgcgtccttaactgtacaaaagcctcagcctttgacatggcacaaggtttgattgaatccaacacaactcaacaaagctttttttctaattaagaatctgaactaacgagtatattttgttttatttcagacttattttgatgcgcccgaaggaaatgagccgcttgctttggacatggaaggaatgggaaaaggtcagatttgggtgaacggtgagagcatcggaagatactggacagcatttgcgactggtgactgcagtcattgtagctacactggaacatataaaccgaacaaatgccaaaccggctgtggtcaacctacacaaaggtggtaccatgtgccgagagcttggttaaagccgagccaaaatctgttggtcatattcgaggagcttggtggaaacccatcaactgtctctttggtcaaaagatcagtatcaggagtttgtgctgaagtttctgaataccacccgaatatcaagaactggcaaatcgaaagctacggaaagggacagacatttcatagacccaaggttcatttgaaatgtagtccaggtcaagcaattgcatccatcaaatttgcaagctttggaactcctttaggaacctgcgggagttaccaacaaggagagtgtcacgcagctacctcatacgctatcttagagagggtaaaagatataatctttacacagctaaaactggaatcagactcttcttctttttttttctaaccacggtgtgttttgatatatgcagaagtgtgtagggaaagcgagatgcgcagtgacgatatccaacagcaatttcgggaaagacccgtgtccaaatgtgctgaaacggttgactgttgaagcagtttgtgccccagagacatctgtaagcacttggagaccttaaagacaaccattgagccctttgtctacaaaatgtataaccaaacaatacagagagagttgaagaaaagaaattgtaagctgtgtttaaaatatgtgtgtgtgtgtgttagtttgaacagagacatttgtgggttagagtagtttcagatagataagagagaagagtctgtagagttgtgatgagtctcgggcaattccgtggctcattaaaaacgttcaggccaccggtcaccaccgaccattttaaccggttatggagaccgggattggtgggtctgaatgaagtcagtttaaggtttggttttgatttgtctttgtaatcaactaaagagggttcaggtttaggagaaaggagatcctatggtgacccatttctttcaaacctattgtcgtttcactttctaatttagttctattttccctttttctttttatctaacaaaatatttatgtttcataaactattttttcttcgtaaattataaaagctttttctccgaagttaaattggagaaaatctttaatattaaaaaaatcgagagaaataccctagaatagctattttttttttgtcggcagaatagctatttttccaatatatattttacaataaagtaaaaaataactgaattattccccttaaactaaattatgaaacctttatgacttgaaaccaaattttgacttttaagaagcgataaaattatgctatacgaggttaattatgcaacattatcccaaaaagtttgtttcgaaaatacgaccatgataatctcaataaccgtttaatatctataactaggctataagaatcctatttctattcgaatattctttaaaatccaactttatctcttcttttgcaaaaaaaaaaaaaacttcaatttaagttctatataaaacgttgtcacccatacgtttaatcagaaaacagaaagaaacatactcaaaactttttaagcagcgacgatcatagatcaaatatg

SEQ ID NO: 19326 - DNA, 3000 bp, Unknown; identical to SEQ ID NO: 3680
  misc_feature (1)..( 3000): 2750-1469P.txt file - cDNA_ID_1821441; gDNA_ID_1620656; Annot_ID_47868

SEQ ID NO: 19327 - DNA, 3000 bp, Unknown; identical to SEQ ID NO: 3680
  misc_feature (1)..( 3000): 2750-1469P.txt file - cDNA_ID_1821441; gDNA_ID_1620656; Annot_ID_163679

SEQ ID NO: 19328 - DNA, 3003 bp, Unknown; identical to SEQ ID NO: 19325
  misc_feature (1)..( 3003): 2750-1469P.txt file - cDNA_ID_1821441; gDNA_ID_1620618; Annot_ID_162157

SEQ ID NO: 19329 - DNA, 3000 bp, Unknown; identical to SEQ ID NO: 3680
  misc_feature (1)..( 3000): 2750-1469P.txt file - cDNA_ID_1821441; gDNA_ID_2926211; Annot_ID_141976

SEQ ID NO: 19330 - DNA, 3000 bp, Unknown; identical to SEQ ID NO: 3680
  misc_feature (1)..( 3000): 2750-1469P.txt file - cDNA_ID_1821441; gDNA_ID_2926211; Annot_ID_202618

SEQ ID NO: 19331 - DNA, 3000 bp, Unknown; identical to SEQ ID NO: 3694
  misc_feature (1)..( 3000): 2750-1469P.txt file - cDNA_ID_1821457; gDNA_ID_1620656; Annot_ID_47864

SEQ ID NO: 19332 - DNA, 3000 bp, Unknown; identical to SEQ ID NO: 3694
  misc_feature (1)..( 3000): 2750-1469P.txt file - cDNA_ID_1821457; gDNA_ID_2926211; Annot_ID_141972

SEQ ID NO: 19333 - DNA, 3003 bp, Unknown
  misc_feature (1)..( 3003): 2750-1469P.txt file - cDNA_ID_1821461; gDNA_ID_1620656; Annot_ID_47863
agataagagatcctctggcggtgaaagacgggtactttggtcagaaaagctcttaaatttctcacgttcttgttcgtcttcttttctttgtgacgaagacgactctaaagaagtgtcggcgttagagaggtcgagaagatcgtcgacggaaaaatcaccgagaaatgcttctacacactccatttttgtctctagccgtatgaaagcactacaagtattttaaataaaggaggagcgaagcgaatccatatttgaaaaagtttgttcgtgttccaatatattttacacaaatttcattctttctttttcaaaattttaaattctttacgtgtctatcgagtgagagagacagtggagagtggacagcactgattggggtttgtaagcaagagtgggttttaggtttttgtgattttggaagacttgtttggtatttgtctcgttacaaatctcgtaacaaatcatgcattgccatgtcagcatttcacattgaaaaggaaaccaaaaatacgtttccttcgtaagtaaaatgttttttttttttttttttaaatgttatctgaacttatccgtagaattttatttaaagataaccgctctttgtagtcaattcaatttattagagttcttaatgccaaattttaagttcataatattaaaagacagcaaagatttcttcataatttagaactatcatttttgacttaaccatcggcgcagagtttgcaagtctttttaagttcttttactatcaaaataactgaataaagtcattcagaactagtggtattctaacgatctaatggctcaacctaattaatcatgaccgttgaaagtgttgttgggccaaaaatatcgtcggttaatacaactttccctctatataaagctagtttcttgcaaaatatggtttttttttgttaacataaaaaagaaactagtagcacatatatatatatatatatatatatatatttttttttttttttgttgtatcagtatttcgaaggttttacagaaaagaagaaaaaaattaacaataattcatacgtcgagagtaatgattggactatcaggcttctcgggcccactcgaccgtcggtggaaggcccaattttaccaaaacaaacaaaaacgttattagtaagggcctattatttatttcttctttaatttcaaggaaagagtgaccatcatatgttgagcgcgtgaaaatatcgctcatggttatatatttgttttttctttgagataataatttccattagaaaaagtcggtttcaaagttagaaaaaaaacatctaaacattcacgtaaagtttaccaggagcaatggagcataaacatattcaaattacacacatacctaaatagtaaataataataaaatacatagacttgtatttttattataaatataatgaactacattccaaacaattgggtgtttggtctagtggtatgattctcgcttcgggtgcgagaggtcccgagttcgattctcggaacacccctctttaaattctctactgctacatcaatttttttcccctcggattaaattaacgcaagaaagtcgtagactgatgacatacaatatggtggtggctcactaaactgactatatgcctaattagcccgatgggccacatgggctcaatgcaagtcggtaaaaggtggaatgttattgaatgcgatgtatgttggcagaggagtaaccgtacaaattagactattttatacccatgaaatcattatcgttcgataacataagatagtaaactttcatgatctcgttctctatgcatccatctctcatctgtgtagtgtagctttttttttcttttttccccacagtatttatctcgtaaactatactttcatatagtcatatatgtgatatgaacattgacactgtacgtaacttatatgatgattaagtttacatgaaaaccattcaagtttttttaaaagcgtaaatacaaaattacttcatgaaatttacgtttataatttaaaatgaacttcgatttaagttatttgcattcagagaaaatagaaattaattaaatgtagcaacgatgtaagtgatagccataaaaatatcacattctttgtatatcggaaatttggttgagcttttaagtcttgaaccctcggataaaaaaaaatgtacacttgaaaccaatatagcattgctccataaatatcaatatcttagacccaaaaaacgatattgttattccatatcggattttagtcatttcgactattttcccaactatttttcctactgaaagattaattacagatctactattggccccaacatttggttcactagacaacctgtaataatatagttcaagtagtactattcacgtttcaacacactaacttttattgagcttcccaactacatttacaatattaatcgtatcactccacataatatcatctatactctagtttattcgacataaaagcatatttaaaaattgtagatgtgaatttgatagttgacaaaccaaatattttactgtacatatgaatttgatattagttgcccggaagcatttaatgaccggtgccagtaaccagacgtttcggactatgttaggtgagacaatgaatagagacacatcaataaatgtcaccgatacatatacttcatataatctaaagtatttcttgaaaaaatctaacatgtgaactaatgaaaatctatcaattacaacattaaattcaacgatatggacttccatcttcttgataacgatcttcaaaagtaagtaagacagcaaacctatttaatatttttaccttattattccccaactagttccttttccacttttaaccatcaccctataagtggttataactagtaacttgaaatagaaacactctatctctaaaagaggcaaccaaacaaacaaggtctagctttttataaccaaactctgcttctgaacagagttagtcaaagagagagaagccatg

SEQ ID NO: 19334 - DNA, 3003 bp, Unknown; identical to SEQ ID NO: 19333
  misc_feature (1)..( 3003): 2750-1469P.txt file - cDNA_ID_1821461; gDNA_ID_2926211; Annot_ID_141971

SEQ ID NO: 19335 - DNA, 3000 bp, Unknown; identical to SEQ ID NO: 3684
  misc_feature (1)..( 3000): 2750-1469P.txt file - cDNA_ID_1821468; gDNA_ID_1620656; Annot_ID_47860

SEQ ID NO: 19336 - DNA, 3000 bp, Unknown; identical to SEQ ID NO: 3684
  misc_feature (1)..( 3000): 2750-1469P.txt file - cDNA_ID_1821468; gDNA_ID_1620656; Annot_ID_163666

SEQ ID NO: 19337 - DNA, 3000 bp, Unknown; identical to SEQ ID NO: 3684
  misc_feature (1)..( 3000): 2750-1469P.txt file - cDNA_ID_1821468; gDNA_ID_2926211; Annot_ID_141968

SEQ ID NO: 19338 - DNA, 3000 bp, Unknown; identical to SEQ ID NO: 3684
  misc_feature (1)..( 3000): 2750-1469P.txt file - cDNA_ID_1821468; gDNA_ID_2926211; Annot_ID_202608

SEQ ID NO: 19339 - DNA, 3003 bp, Unknown
  misc_feature (1)..( 3003): 2750-1469P.txt file - cDNA_ID_1821472; gDNA_ID_1620656; Annot_ID_47859
atgcaggactctttgaatgttaagtttaatagaagtggcgatgttgagaatccgtggtttttcttcggagcttcttattctggagctttaagtgcttggttccggcttaagttccctcatttgacctgtggaagccttgctagttctgcagttgttcgtgcagtctacgaattccctgaatttgatcaacaggtatttgtttcaagattaaactttaaatgaagacatggtgtgtttcttcatatagagtttagttgctgacagaatcgaaatttttgtgccttattgagtagataggtgagtcggctggaccggaatgtaaagctgcactacaagagactaataagctcttggaactagggcttaaagtgaataacagggctgtgaaagctctcttcaatgccaccgaggtctagctttgttgtttttctttctattcgttggatatttaaaaaattatggaagtcaaaagtctgtctctaatatgtatatgtttctgaaatctgcagcttgacgttgatgctgatttcttatacttgatagcagatgcagaagttatggcggtaagcttgttcatttcgtactcttatgattttcattttctttctagttttagatgtttatcttcaaaaattttggcagatccaatacggaaacccagataaactatgtgtaccactcgtggaagctcagaagaatcgtgatgatttagtggtaagttcttttctttttagatccctctttgcttatgcttggtgtatatatgatcaatgattgatcatatatgctagaagaactcgttttgcaaactaaatatttgtatttgctgatacattagatgtggtgtattaatgcaggaagcatatgctaaatatgttagagagttttgtgtgggggttttcgggctaagctctaaaacatatagccggaaacatctgctagacactgcggtcaccccagaaagtgcagataggctttggtggttccaagtttgcactgaagtggcatatttccaagtggcacctgcaaacgatagcatccggtctcatcaaatcaatacagagtacacacagtcccaagcttttatccataacttttttcatggtttatatttattgtcctgcttacgtttcttttaatttgataggtatcatttggatctatgcaagagtctgtttgggaaaggtgtttaccctgaagtcgatgcaacaaacctgtattatggaagtgacagaattgctggtatgtaataacggaaaacatctcgatgctactcatatattttcgcacattccaacagtttcttcttattcgtaatttgcagcgaccaagattatcttcacaaatgggtcacaggatccatggcgtcatgcatccaaacagacctcatctcctgaacgtaagtctccatttagtatgatcaaatccttataacattatctcaggcttagtctatgtcgtacagtagcactcagacaaatactttctatgcgacactaacaagttaatacttgacgacacagtgccttcttacattgtgacttgccacaactgtggccatggaagtgatctccgtggatgccctcaatctcccatggtcattggaggtatattactggcctcttctctctttccgatccctgaagtcaaagacagactagtattggaacaactgttaaaaaaatattatttttccctgcttttttcattctcatattcaggtgattccaagaattgcagttcacctgatgcagtgaacaaagtgaggcaacatatagtagatcatatggacttgtggctctctgagtgtcgtggagggattaggagttccatgtaaagagtcacacgaagtcagaaactgcggttatgcaaataaataaaacatcagatgtatgtttcaaacctgtatctgtgtaactgtaacctctgatgtatgtttcgaacttgtctctacggacctaatacagtagtttacacgatgagacgatagaattaccgtcaagccatgaattgagaaagctgtctaaaattattttagtaacatatcagtctctttcgtaattactgtctaaatatattataaattgttacctatcacaaatccgttgtagtctagctggtcaggatactcggctctcacccgagagacccgggttcgagtcccggcaacggagatttttttatttctcgggattgactttgtttgtgaaacgagtcaacagagtgaaggacagatgtctcctgctattggaccggaaggaaaatataacggatgactcatatagtcacggattcatctttctcgggatttcgaaatttgacggtgatctgatttccaacgattttttctcttccatggctttttttcgctgatcggtaaatcaaacgtttgtttcggtttcgatggtggaagctacgtcgaatttgacgccgactcagagatatgcggccggcgcattgtttgcgatcgctttgaaccaagcgcaaatcaaccagactcagccgctgggaaccccggcggcggaagacgacgacggaggcgatgaagagcgaagaagcaattgcagtagcggagattctgtctccgatgaccccagcctttgggtacacgagacgtctggccttcttcgccccgttttcaggtgctttcccaaaatctcttgtcgatctcatcgattttgaaattcctttcgagtcttggttgtctatgaccgttgaaatcatctggttgattagtagttcgctttagctctgtttgtaattcgtttctatccacagatgtcttgagattgattcaccggcttggcttggtctcgagcaaacagcttgctcttctccggctaagcaccacatcggggcggtatggctatttccggagttcaaattttgctgttatggatccgatactcactgttgagttattgttcattaacttctattttgtttttattgtagttcacgaggttactctcagaagaagcgaatgatgcttctgccgagatg

SEQ ID NO: 19340 - DNA, 3003 bp, Unknown; identical to SEQ ID NO: 19339
  misc_feature (1)..( 3003): 2750-1469P.txt file - cDNA_ID_1821472; gDNA_ID_2926211; Annot_ID_141967

SEQ ID NO: 19341 - DNA, 3000 bp, Unknown; identical to SEQ ID NO: 3677
  misc_feature (1)..( 3000): 2750-1469P.txt file - cDNA_ID_1821490; gDNA_ID_1620656; Annot_ID_47854

SEQ ID NO: 19342 - DNA, 3000 bp, Unknown; identical to SEQ ID NO: 3677
  misc_feature (1)..( 3000): 2750-1469P.txt file - cDNA_ID_1821490; gDNA_ID_1620656; Annot_ID_163660

SEQ ID NO: 19343 - DNA, 3000 bp, Unknown; identical to SEQ ID NO: 3677
  misc_feature (1)..( 3000): 2750-1469P.txt file - cDNA_ID_1821490; gDNA_ID_2926210; Annot_ID_141962

SEQ ID NO: 19344 - DNA, 3000 bp, Unknown; identical to SEQ ID NO: 3677
  misc_feature (1)..( 3000): 2750-1469P.txt file - cDNA_ID_1821490; gDNA_ID_2926210; Annot_ID_202579

SEQ ID NO: 19345 - DNA, 3003 bp, Unknown
  misc_feature (1)..( 3003): 2750-1469P.txt file - cDNA_ID_1821494; gDNA_ID_1620656; Annot_ID_47853
cactgagagaacagctgcagagcctcattctcattaaagctctgaacctcatacacatgattgatctgacaaaggcggaacacttgtttatctctggacgttatgatgattaggcttcccgggccgaaccaatgaaacccttcgagaaaagactcggcaaccaaaggattgtgcacatcatcaagaacaacaagagttctcttcttgcttaatttgtccctggggaggctaggtctcgtaatgctactgcatacacgaggcaattccttcaaaattttcccaaaatgttcctccagcaaacggtgaagccccttcccactaaaagccttgtcaaagtgtttgatgaaacaagaagcttcatagccaccagagatttggtcaaaaaatgctttagcaagtgtagttttgcctatgccgggcataccccaaattcctatgcgacggacaccccatggttgcttgcaaagcaaatgttccatctccagcagcctcgagttgattccgatttgttccgtgggaaagagtttctcatgcacatctttgacaatctcttccacaagttcgctctcactgcattcctccctgtttgcattgatttaaaaatcacagagtgaattgttgcggaaaacactaatgaatattgaagaacaaaaaatgttttggataaactgcctcacattttgtcaatctatcataataacattattagttccatataaaacctttgatttgtataatatttctttgtggtgttagatttgtataatatttctttgtggtgttagatttgataggtggaaaacattttgaagtagagacttttaatcttctcaaagtgcaaacgacatattaatcaatccacagttacctattgtggtggcctggtaattctctcagttcttggagtgcgctactccattctcttatccggtccactgacttgtgctcctgcaccaccacatctgatgaactaatgccataatacacaggaaccaccagctggccggttttcctccgacactgaaagaccctcacgagcatgtccaggcatgaggtggaggagacgcagctctttgagaaaaccagcacggaagcgctaactctctcaatcacatccagagtctcactgtaatttacaaatgcagaaattcctttccggcgaaaatccatggagaggtggctggcgaaggagtattgtagtgtatcttcgcagtatatgtagacagtgggaagtaatccattaggtggcggaaaatccacgttgtatatatattggatcccttgttcctctaaaagtctttgatcttgtgttgtgatgataatccgacttccaggaccaaaccaccgagcttcgtttgccaaggcatctaattgtcctatgctgtccacatcatcaagaacaagtaccactttcttgtctttcaacatttcatgtgcagcttccaattgaagaatctcaccagtaaacttgtgatttaatagttgagacagtaaatggctttgtaactgcagtttcctgtcgtcctcattgtagcaagttcttggatagcatcctttgatatcaataatgatagtactcaattcgaattgaggaaggagttgttggtataaacgtttagcgatggtggttttaccactcccaggaagaccacatatacctatcaatctgactttatttgagtccagacctagcagctctttcatcttttccatatgagcttccatcccaactaagccttgggaagcacttgattgagtggaattattcattatactagaaatatcattagctatttttttgaccatagccttttcatcatccctaaacatatagtaaataaatagtcatgaataacttaaaaacaaaaaattgtttgatgcattaagaagaggcaagtggtaatgaaaaactgaccagtcgcgtgaacggtaaccatcgattgtggccacttgctccaaagctttaatccatctatcaatgtcctctttgttttttctctcacattcttctctgtgcttgttcatagccgtatcatcaatctttatggacctaaacatagtcatcaaacacatattaaaaaactgtgaattactttcatgtgttaagaaagattaagaagactaacaagcggctggtaagtttatagactctaggcaattccgccaaagctctagtgcatttccaaatgtcttcatctgttttaccctttcgtgtttttctgaaattatccccaaaatctccagtctgcttcaatacatcaattggatccaaattatagaaaatagtcaccactctttgacccaactcttctttgcacttcattatctccaccaactcgtcgagacaccacggagagagagcgtagttccttgagagcacgacaatcacgattctcgagacactaatcgcgtttctgagctcaggtccgatcgacacgcacctctcggtttcattatcgattagtggctcgaaaccctttcttcttaactctttcctaatcctactgagaaaggatttgggtacatctacagagctgaagctcgagaacacattgtgttcccaattgcgagacgaagccgttatcttcttcttcttctgcggattggatctgatgaatttttcataaatcagaaatgaaaccgtacccaaaatcgtgattgcagccgcacagatcctaaggagggaagcagaggaataatccatttagagtacgattgcaaaagagaaaaaagaccttcgtctgcacaaagaagaagaccaccattattgactccattagcaccattggttacaaataaaatatatgtatttttcgtattgggaatttaatatatttttttattaggtaacggtcacgagaagtcattaaactatcaatccaagtcgctgtttgctttagtgttttagtcaatggtcttcttctctcttccacacttgcctcttgaaaaaccagagtcctagttccatgctttcgatttcaacgcgagacatcatcgatcatg

SEQ ID NO: 19346 - DNA, 3003 bp, Unknown; identical to SEQ ID NO: 19345
  misc_feature (1)..( 3003): 2750-1469P.txt file - cDNA_ID_1821494; gDNA_ID_1620656; Annot_ID_163659

SEQ ID NO: 19347 - DNA, 3003 bp, Unknown; identical to SEQ ID NO: 19345
  misc_feature (1)..( 3003): 2750-1469P.txt file - cDNA_ID_1821494; gDNA_ID_2926210; Annot_ID_141961

SEQ ID NO: 19348 - DNA, 3003 bp, Unknown; identical to SEQ ID NO: 19345
  misc_feature (1)..( 3003): 2750-1469P.txt file - cDNA_ID_1821494; gDNA_ID_2926210; Annot_ID_202578

SEQ ID NO: 19349 - DNA, 3003 bp, Unknown
  misc_feature (1)..( 3003): 2750-1469P.txt file - cDNA_ID_1821502; gDNA_ID_1971813; Annot_ID_58172
ttttttgtgtcaggccaaccaaaagatatagatctatggaatctaatagatacataatacatgtaccggattcggctcagaaaaccaacagttgaagtatgtataattcatctacaatgtgtttgagtcttgtcgtgtacgtttatgtttggatttgatcaaaaccagtatcgcttaacccaaatcgaaccgcattataattatagtaaacacatcaatctcattattttgatggcaaataaataaactgaaactgaaatcatcgtaacaacttaataaatgaaaatccatcaataagatcttttgctagaattaaaacaatattgagattaataaaagattgatttaaataagatcttgtctttcaaacgttagaaacaacaggtgactctctcgttaagatttttctctcgaagatagccttaaaacgcatcttcttcgtttgaccgtctctaagagtcttaccagacgagaacatggactattcttcaaaaagaatagataacgcatgcaaattaaaagagttggggacgactttttcttcgttagagaaaccttattgtatgactataaatacaccttctctccaaaagaaatcaaaaatcattttctaagacaaatacaaattgacatagaccaaaatatttggcttatgaacgatttatgcattgtaaaactcattatttaattaaaatcaaaatgtatcaccgcctggtttggttaattgctttgattgttctattgttcgttggatcatcaaacatagaacaagtaagtttctagttattgataaactttattcatttctcaaaccaaattaaagttatttattttattaatatattcattgtatatattcatgaaaatttcatttcaaaaagggtgcatgcatgttaactgtgaaaatgaattttatttttttctcattcatgaattcacatcttttctgcacggacgatcattagaaagcatccgtatgactctcaacatggtaattttaaatattcaaaaatattgatggttttcaatgtttactaattgtatgtgaagaaaaggaagaaagggtttgggataaaattgtgatcaaagaaatcaagattgatgttggtggaagtaattcaagacgtgcaggtcaaggaaatgcatcagatccaggcaccaagatctagcgacagtttaccaatgattattattactaactcggacaatttagaagagttccgtagattcaaattcattccattttttaaactaaaagatatatgtctataagttttgtcaattaaacctcctcctatccaatgtcatcacatacatttcctttcaggacgaagaagtgtgtatatacacacacttacaattcaatctttttataaagatcgagagattaacaacgaaagaacaacaaaaaattcttacaattatcctaaacaatagtatataacgtcgacgaccaccgccgtttccggtcatttacatacacgttacattaatttgaaccataacaaaataagtcaaactctcacaaagaaaaagctaagttcgggtccattattcccttcaggactcaacatataaaaagtctctgaatctttagacccaataactctctcaaaataagctctcatatacgccatttcgccgtcgggtccttccgactccgagtttcccggcaaaactccggcgcccatagacaccggacgtaacaactccatcacgttaagatcttcttcggtcgcttctcgtttcacaccgtaacccgttttctctcctttacaatacattgtccataacggttcttccaaaatatctgtcttcttctcggttttagaattgttattatcagctcgaggctgtttctcagtctcgagagctattctcaccattcccgtgcttagctctttttgaagcgttgtggtttgcatggcgagctccacgactaaagaaggtaaacatttagggttttcttgaatggaaagacttactcggcctttacggtatccgaataacgttccggtgattcttgacgtgttgtgatgtggatccggtaagcctaaaccgggatgtataaccgggattttgcatgctacggatggtgttgtaaagattgggaaagatcgaaacacggtgcgtaagactctgaaaacgtttgttctgtttttcttcttttttgaagatggtggctggaggagaggatgttgacgtggcggagtggttgtggacgtcggagagggtgttggagacgaaggaggaattgaggaggaggaggaagaagaacttgtagccattggatttgatgattctcccattagacgacgatcgtacggcgaagaaagaaggagaagatctttcttcgacgaccgacgacgactaaaagaaccaacgtccttgtagaaatgtagtcttttttctttttctttagctctctattcctcctccttattgaattgataattttctcctagtaccaatccttatccttgaatttgatttttttgtttttcttttctaaatttcgtttttgttaatttcttttttaagagaagttaattagggatttcaatggtggttaaaaccgaagctatatttgcaagcaacaaatcgcatttttatgttagtttttctaagcttggtcatattttataaatgtgtagtggttgctattgtttgcataatcacttgttatgaaacttttatccggttaagtatatataatgaagccaacagtacaacaggatccgtggcgcaatggtagcgcgtctgactccagatcagaaggttgcgtgttcgattcacgtcgggttcaaataccccgaaaattagatccttaacttttttattcctgtatttatagaaacggcccaattgttttgctgtatttacaaaacggcccaacttgtttgctgcttcactgaatgtaccctcaaaacttttttggttgcaactgtaaaaaccttatccgccattaaaggattaggaaaagaaaaaaacttttcgtcaatg

SEQ ID NO: 19350 - DNA, 3003 bp, Unknown; identical to SEQ ID NO: 19349
  misc_feature (1)..( 3003): 2750-1469P.txt file - cDNA_ID_1821502; gDNA_ID_2926218; Annot_ID_142332

SEQ ID NO: 19351 - DNA, 3003 bp, Unknown; identical to SEQ ID NO: 19349
  misc_feature (1)..( 3003): 2750-1469P.txt file - cDNA_ID_1821502; gDNA_ID_2926218; Annot_ID_203150

SEQ ID NO: 19352 - DNA, 3000 bp, Unknown; identical to SEQ ID NO: 8501
  misc_feature (1)..( 3000): 2750-1469P.txt file - cDNA_ID_1821517; gDNA_ID_1971813; Annot_ID_58166

SEQ ID NO: 19353 - DNA, 3000 bp, Unknown; identical to SEQ ID NO: 8501
  misc_feature (1)..( 3000): 2750-1469P.txt file - cDNA_ID_1821517; gDNA_ID_2926218; Annot_ID_142326

SEQ ID NO: 19354 - DNA, 3003 bp, Unknown
  misc_feature (1)..( 3003): 2750-1469P.txt file - cDNA_ID_1821525; gDNA_ID_1971813; Annot_ID_58164
gttggcaaacgtgaattcgtcaggtctttctcttgataactgtaattccagaaacaggttgagagcttcttcgttctctgattgttgaacataacctgcaaacatagaattccagataacaagatctttcactttcatttcatcaaacacaagcctggaatccttgaggcagtagcaatttgagtaaacatcaatcaaagcgcttccagcaaatatatctaagtttaacccatatttgaacatcaatccatggatttgtttactcagtcccaagcttgttaaagaagcagatgcacgtagaaggctaacaaaagtcaataggctaggtcgaatcaatctgaacctcatgtcacgaaagatgttcaatgcttcatgtagttcccattgtgtcccaagtctcgagtaaccttcaatcattgcattgaataaaaccacatcagcagcagcgaaaatatcaaaaacttttctggcatcggtcaaacagtcacatttcgcatacatgtcaatcaagctgttagtcacatagctatcattgccaagattggctttgatagtgtaagcatgaacttgtgttccaaatcccaaagcatgaagtgaggcacaagatgtgagtatgctagagcaagcatacatatccggctttaaaccaaactttgacatactggtaaacaattccatggcttctttatgaagagcgttctgcttataaccagagagcaaagtggtccacgaaatgatgtttttattcggcattccattgaatagcttatgagccgctataactctgccacacttcacataagaatctataagcacattcatcagtgaggcatccatctcaagtccatatcttaagatgtgcgcatgaatctgcttcccaccttcaagaaacggaagtattgaacatgcacttagaaccgtcgaaaggatgtagccatctggaacaacattgtcttccattagttggtagaacagctgtaatgaaacgtagcttcttcccatttttacacacccactgatcatggtcgtccaagtcacagtagatttctctggtaaagcatcaaacacaagcctcgcataatcgatattaccatccttcaaataaaaatcaatcaacaaggtaccaacataaacatccctatcaaacccactcttgacaagaaaactttgtagttgaaacaccatccaacgcccacgaccatctaagcctgagcaagcttgaataaaactcgacaaaatatattcattcggactgtcttttctagttctccagaactctaagaaaaccaccaaagattcctcataaatcccatgatggttgcaagctgaaaccatggtagaccaagaaactaagtttctctcaggcattttctcgaacaccttacgtgcataaaccataccaccagctctcgaatacaaattgatcaaaatgttgctaagatacgtatctaactcgaggccccaaacaataatctgaccatgaactacattttgataatgcaacagatcatctgacgcacgcagctgcaagagacgagcaaattcgcgccttcctcggattcctatcgtagaaggaaaatctgcgtttacaaattccaaaagacttgaagcagaagaagatgaagaggagtataaacgtatggtttcttggactttacgccaacagcgatagcttctcatcctcctgagtgagaagaacagagcgtgctgtgacgaataaacatgctgccgttttttgtcataagcgaagaaagggtgatggaactaataaataaaacggcaaccagttatactaccaaacatcaaaacgacaggtggctgatgatattggatgatttaagttttttggttaggtttggtcgaaaaacaagaacggtagattttgatggcccggcatgttacattgcgtgggccatcctttagcaacatatgttgaattttaattccacgtttcacctaccaatattcctatttggacgacattaaatattcctattttatacatcattctgctaataaatcttgaaatttgtaaaatatttacattcatttatggttagtaaatactccctccgttccactaagatgaattttttagaaatttcacattctttaagaaatattgtataaaaataattttaacctcttaatatactttaaaaataataataaatatttatctaattatttagtaaggataaaacgggaaaacagttttaaaatttgcattggaaatataaaacttctatttttgtaagacaaatatttttcctagaaaatttctctttatgggacagagggagtaattatgttttatatatatctagattttatgattaagtttaataagaagacagattttagaaatttcatccttagtttacagagaaattctatccattcaaatctgtaaacattggaaagaatacgaatcaagatcatttgagatactcacaatatgaacagttgtcacatatcataaggaagatttcttaattttaaaacacgttacactttttccactaacattttatttggacttttaattgtcttattatcttcaattaaatacttaattattgacttggcataaatttagtaattaacagatagttttggaaattttcaccaacccctacgttataaattcgttttattcagattataattctaaaactaattttggccaataagaaaagcgtaagttaagagagagagagaaagagtctctgcctctcaagctccgccgtcggggaaaaaaggtgaaacctttatacattctccgatttcatttgtctttgcattgattgtttatgcagaatttggatttgtttattccttaaaactctttcttttactattattactcacgaagtttcttcaaaagtgtcatctgcaattagtttaattctcagaaaggaaatggttccattgatgatatttggcgttgaagatgagtaatagattttgctgaattcatgtactgtgcatttgcagaatatg

SEQ ID NO: 19355 - DNA, 3003 bp, Unknown; identical to SEQ ID NO: 19354
  misc_feature (1)..( 3003): 2750-1469P.txt file - cDNA_ID_1821525; gDNA_ID_1971813; Annot_ID_175838

SEQ ID NO: 19356 - DNA, 3003 bp, Unknown; identical to SEQ ID NO: 19354
  misc_feature (1)..( 3003): 2750-1469P.txt file - cDNA_ID_1821525; gDNA_ID_2926218; Annot_ID_142324

SEQ ID NO: 19357 - DNA, 3003 bp, Unknown; identical to SEQ ID NO: 19354
  misc_feature (1)..( 3003): 2750-1469P.txt file - cDNA_ID_1821525; gDNA_ID_2926218; Annot_ID_203142

SEQ ID NO: 19358 - DNA, 3000 bp, Unknown
  misc_feature (1)..( 3000): 2750-1469P.txt file - cDNA_ID_1821545; gDNA_ID_1971813; Annot_ID_58156
ttaacattacagaaaaatgtaatatttgcatagttcgatgtgtcgatcgtcgtatcttacgtacttcattactctcatgtctaacgtatacgtatatatgattagttaaatagtttgacaagaaaattaggaaaacaatataatttattgcacatcaaaggcatttgttgttagggttaattatctgatttggttggtctcccagagaagaacaaacaaacaaaccctaatatcgatcgactagtcaaaactcaaaagctctttcgattttattcactgtgagtgtgagtgagctatccaagcatgaggcctctctacctacttttgaggctaatgggctattatacaggccctttttggcccaattacaaaaatgtcattttccgggaatattataaggccctcgctaaaggggtttaagacgcaagatgtgttcaatcggagtaactgctctctgttctccggctaaatttcatcatcgccgggaacaatcactgatttttactccgacccatttgcgtaatccaaatgggttccaatttcggtggagaaagtcccgacctttcgctcccagactcgcccaacccgacaatttcgctccgccgctccctctcatacgctcttcgacgtctcttctttcttccaaggatttcgttcagatgctggcgagaaaagccgccattttacttgttgggtcgtttgtctttctagggttctgctcttcgaaacctgctttagcgctacccactgcaactgtagtctcccaggcagagttagaggacgagaaaatgttcgagaagcttctggaaaatgagccagagaacatggaggctatgaaggctgttgtgtataagaagatgaggagagggaaaaatgaagatgctgtgaaatatgttgagaagctgatgaaattagagcctcatgaagttgagtggaagcttttagaagcgctttgctatgaaacaatgggggaattgagcaaagccaagagattgtataaggatattctcaaagaacaacctcttttgatcagagctttgcacgtatgtgtttctcaccttttggtgcttctttaggattagagtctttttatgaaactgtgaataagtggatgtttaggagaaatggtgtaggtaatagaatggtatcttgatttcaatattgcagtattcaattttaggtcttgtcttgtttcttgcagggtcttgctatggtaatgcataagactcatgacacctctgtctttgatatgctcattgaagctatggaagttgctcgacaaggaaaccgagtaaccgaggagagaaacatacaagtcttgattggtcaaatgcatattgtggaggtaaaactcatccttagtttccttcttgtgtgttttggtccttctgagctatctttaagtatatgcataggaataatggattgtagtatatacttatggccattggtttaaaacctcagggtcaatttgaagaaggtctaaagatatttcaacagatggtgaatgataatcctcgagattttcgaccttacctttgccaggtagagtttaattatgaaaagaatgatctttgattccctatagtcatatgtctcagttatcaagtaaaaggagtttagctttgtctttggctattccgcttgaaagaaattgctagtatttgtttcagggcatagtgtatagcttaatggataaaaaagaggaagcagcacaacagtttgagatctattggagtcttgtacctggagaattcccacaaaagggatttctcgacgatgttgccttggctgctcaagcaaaatcccgagaacggcttcaaaacacattcaaagctaaatttactcaggggagataattgaaagcttcatcagcagttcaaagttttcttcttgaggtttgcagtgcccactcatgtaatcacattttggtcatgttacagttacatgacatatgtttataaagaatatcaggtatgaaatgttaacatgtgtcggggttaaagaaaaaaaacgctttcgagcaggcagagtttgtggctgcatgtagaaccgagaagaagatggtgcttttttgttgttttgttttgtttttgcagtcatgctagtgatttctctcaggtgcataataatcagacgtgaaagattacgacttccttgtcattcgtagagatattatacaactgttttttctgctgtctatcggtcatacgattgttgatacatctcttccaccaacagtagcaattttttttgtcagaaaaaaaacctatcataatcattcttgaaaagaagcaggtaatttgacgatctcttcaagttagatattgacttatttcaatgattctgaatttctgatgctatttaattattctgatcacgtgtaatgtaaagtatattgtcttattactaaaagtatttaatagataattatcttccaaattaaaatatctaaattcttaccacgttttttatgcaaactaccaactaacattgacaactgtatgtatacacgagactccacaagtaaaaaatttaaataaaatttgtgacttcattaacaagaacaaatttcccatttttatacaaaacctttgtcttttaggttaactaacgtatagtacattacaagaaactgatacgggcttttaataggctagtgtgtcggtataggcccattagtaaacagaagaagcttttaatcaatcctcttgcggagaaactttgggaagagccgaagagaagtcgaggtctctctatctctctctttcgtacacttcgcgcttctcttcctgtaatctctaattccacactcactacatttatgtacttttttctgtatctatacgctttgtgtatgatgttttgtatattgttgcttctcttgctttacttgtttggtttgggatttcttctctgttttttcttggtgaattttgcgtttcgcttaaaaatgagtgaaattgatttggtgaaattaggtcagaggcgtttctcatg

SEQ ID NO: 19359 - DNA, 3000 bp, Unknown; identical to SEQ ID NO: 19358
  misc_feature (1)..( 3000): 2750-1469P.txt file - cDNA_ID_1821545; gDNA_ID_2926218; Annot_ID_142316

SEQ ID NO: 19360 - DNA, 3003 bp, Unknown
  misc_feature (1)..( 3003): 2750-1469P.txt file - cDNA_ID_1821549; gDNA_ID_1971813; Annot_ID_58155
ggagaggatatctcttatcgaggtataacatttcctaatcattacttgtcgtaagggtatcatggttctgtatgatgctaactttatttaacttcttcgttgcttgaccctgtgacaaaaaagaggctttatcctagcagccacttttgggaaacatatcttgctcgtcgaaaggaactccttaaagctgcactaccttttgactccagtgaaattagcttgcaccttggggggtcgtctttgtttcagcatctcaagattgagtgtggtgaggttgatggtgttgttctaggttcttggactaaaatcaatgagagtgcatctgagcatgcacctgatgaaaccgatgcagttgctggctactgggctgcagcagctgtgtggtcaaatgcttgggatcagagaacatttgatcatgtaagaagttttctatagtcattctttctcgttaccctctaaatgcctgaatatttatctaattgcaccatcccattatactaatacatccgtaccttggggacgttcgaattgatttcaacgtactctgcatgtattggaattggaccagttggattatctcttgatctgtatagcttaacagtgtttgtagtcttacactggttagaggattttgttcagttgttttcttgttttataaagaacgagacaaatacatacgataaggcatctgtgcttatttctcgagtagctaccctctgcttatcttttcctcttaatgaaagtgtagatgaaatgtagatctgtatttaatgattgtgctcttaactagattctatttaatgatggtccttaatcttgggttgcattttatatctttttacttgaattagcacattgtagagcattagagggctgctactgccatctgttagtcctataaacacccttaatttggaagtcgacattattagatttcagtggtgagagtaacagtgatacatttgattgaaggttaaagactatacatatcaacattttttttgttttgttttgtattattccatgaacttactcaggcgaaggttgttttgttcgtttcagataacgtctgcatttgttggtttttgagtaatgtttcttgttgaatattttgtgcagatagtcttggatcagcccttagtcatgggtgttcatgttccatgggattctcagctggagtattatatgtgtcacaatgactgggatgaagttcttaagctgttggatctcattcctgaggatgttttatatgatggaagtttgcaaattgctttggatggtccgaaacagtcttctggcgtaaattattcagtttcttcccgtagcgagtatatatgctccatcgaagaagtggatgctgtacttatggatgttccttatatcaagatatttagattgcctggagatatccggtgctccttgtggctaacaacactcatggagcaggaactagcaagaaaacttatatttttaaaagaatattgggaaaacgctctagatgtagtatatcttctggcccgggcaggtgtcatccttggtaattgtgaagtttcatttaaggaggaaacttgtacgccatcgttagatctttgtttgtccataaagaagggaggagcaaatgttgataccctgaatgctgtacacaagctattcatacattactgcacacagtataatctgccaaaccttctggatctgtaccttgatcatcacgaattggtcctagataatgattcactcagttcattgcaggaagctgtggtaagtgctttccacgtccgtaatatatttgtgtccataagtctgttctttgtacgcctatggtttgtcttttgaagacttaatttttactgagaatgccaagaatctgtccatgtattcagggtgattctcactgggcaaaatggttgctactctccaggatcaagggccgggagtatgatgcttcattttcaaacgcacgctcaattatgtcacgtaacggggcaccaaatagtgaacccagtgttccagagattgatgaaatggtttgtactgttgatgacattgccgatggggcaggagaaatggcagctttagcaactatgatgtgtgctccagtgccaattcaaaaatccttgagtactggcagtgtgaacaggcacactaactcttctgcgcagtgcactttggagaatttgagatcatttcttcagagattccctaccttatggagtaagcttgttagtgcttgtcttggggaagatatatccgggaaccttttgcggaccaagactaagaatggttaagcctggtccaccacactttttcttttattctgtgtatagtgaggacatactcgctctgactctatggtttatcagtcttgtcagagtatttgaattggcgtgacggtgtattcttctcaacggcacgtgatacctcactcctccagatgttgccttgttggtttcctaaggcggttcgtagattagttcagctttatattcaggtatctatttctgttttatctgttgtatgtgctcttctgagttgtacaacactccttcaactttctggaattgaggatctagttgaactcaatacttgcactgtaatcggcgatataacaagtttaagaatttctatgaaataatttgatggttgtgaagaggcagacataggcaaaccatttggggaatgactactaagatttagggagaaaggaaaaacacatcaaatttgttctacatcaatctttaccattttacaaaagaaatttgaggcactataccaaaagtggtagaatggaactgtaactctggtctactcaattattagtgttttttttaggtgctggcttctgtttcgtctatacaattagtaggtattctcctcatgcatcttcttccagattttccgagaatgcatagcttgcttgttgttggttctctttgacttggagaccttgaattaaccctctgatatggcctccttgtgttggttcatcatagcagaaaaatg

SEQ ID NO: 19361 - DNA, 3003 bp, Unknown; identical to SEQ ID NO: 19360
  misc_feature (1)..( 3003): 2750-1469P.txt file - cDNA_ID_1821549; gDNA_ID_2926218; Annot_ID_142315

SEQ ID NO: 19362 - DNA, 3003 bp, Unknown
  misc_feature (1)..( 3003): 2750-1469P.txt file - cDNA_ID_1821572; gDNA_ID_1971813; Annot_ID_58149
gtcattttcaaaaatcgtatccatagtcatggtttttgttttcatacgatctatatcattacatttacaacgatgatctctatcaaaaatgtaattttttttctttcccgtcgttaacttactattataaagtttgacaacattttagatcccaaaaattagctttatgtaatggtattgaaaaaatatcatcgtataaagtctgtcgaaaaaagcggttttgtatctggtttaatggtgttggtagatttgacaatgaattcggcattgatggatttgacgtttgaagtcgtatgaaatatgtcactgaaatagcgatgcacttggttgaagaatttggctttaatggatttggcgatgaatttggtgttggtggatttgccgtttgaagtcgtctgaagtatgaacaatgaacactttctttttcccaaatgattatcagatttttttattaaatttcaatttaaggttctttgtcgttacacttaaattgatgatttctatcaaaaatgcaaattcttttttaatttcaattttgttctgttttttgtttttatacgattaattcaataggggaatcaaatacacttggttgcaaaacatttcaagttttcaaagaacaatcatagtatttttttgcccaccaatcatagttatatatatatatatctcaaatttagttggaacataagtaagtaataagtaagtagataagcaagtagataactacaaaacctcaaaagcgtctgatcaatgataatcattttgacaatatttggtggaatcaattagcacttctaaacttttgatccaactattttcgttagtttcatcatctagtgatcatacggaatccaccactataatttttttctttcttataactgaaaaattaatgtgtcaaaactgtaaaattagatacaaaacatgtatcctggaacagtggtactatacgagtcagtagatgtgcaccacttaactagtatcatgaatctaagataatatcggctgatatctaagtgaaaacttaccctaaaaagagaaacagttcacatgaaaagcatcgaataacgacaataagaaatagatacttaacagagctagaaaacacaatacttatatataatttaaaataaaaagaattatatatacgtaaaaacagtataaagaaagaaagacacaagaaaagtagtctgttttggatctttaaccaaacggaacctctgtctgtgtccccgcattgtccttttgtcgattataaaaatcggtcacgccttttcacttccatactcctcattttccatctctatactctaccactttttctagattctctttttcttttcaaaaacaaacaatttaatttccgataaaatagtaaaacatatttttactgatctatattgttcagaatgcattttttgcgatctatccgatatatttaatttgtagaaaaaataattagtgaaaacgtcgaattggtgagtaggaacaagtggcttcttgacaactaacttagtggtatcgaggattgcgaccaggagacaataaacaggggtaaaacaaactttgaaagacgaatagagtttgtgctcgttgtatgattttagacaaccggttgcatactattttggtggctatgtgatatgacgttgatagtcttataggaatcagacaattcatgtgactttaatttgctctatctaccgagaaagcacgactaaaatgaaaaaaaaaaaaaatgtagtatgttgtaagataaaaatatatgtaaataagttggtttttcaacaaaaacgcatacattaaccaaaaaccatgcatttgtcttctcttttattgcgagaaagaaattgttaatatatgcttagatcttgtttgctattgcataaattgaaacttaacaacaagtcaacaacactgtatctcttaaatatttgcatttcatcgacgaaaggagcaaacctgttgagagtacgggtaagtatgagaacatcaccatgaaagtaaataagtaattaagtaaagttgagaaattcatacaaacaatgaagcaactcaagcaagtcaggtcatacataagttatcaaactcttttaaattcgtagaaatttgttttaagcattaaaaaaaaaaagatattaaaaaatcaaatatcctatatctatagtgtaacaaaagaaacactgtatattaacacaaattagatttaattgttttgcttgaagaagaaagtgagggaaaatgaataaataaaaaaggttttaaaaaaaagagaaaagattcttctccctgtcctcgcttcttaaatggcaagaaaggagactctgatgggaagttcataactgaaaaataaaaataagacagaaaacaaagttaaaaataaaataaaaacggaagagagaaaataaataaataaaatcactcaaaggatttccacagtttttctttccatgttgatttagcccattcgtagacttcctccgcgccgccgttagacgccgcctcggaagtatcagcaaccgccgtggtgttcgtcgccttcaaaggctcgtttctctcctctctctggtatttttttttttatttctgggtttacttgtgaagattcggttatacttcggagatcattgttataattcacttgttctgatttagtcctacttgtcaaatttctggattgtcgaaattggcaattcattgtctcagatcgtatgattattggatctgattttgaattttagagttagagagttcatgttggagttttgggattaaaatcgtttctatattcttctggatctaaagcatttttagatcgtggaattgtgaaacagctaatagttttttttttttttttttgcgttttgatgattttcaattgcgattgcataggtttgatcataagatctacacttgattctactcactttatttgttgtttcctctaatttgaaaaattgaaatctgcagagatctgaatttgagatgtttaaaaaaatg

SEQ ID NO: 19363 - DNA, 3003 bp, Unknown; identical to SEQ ID NO: 19362
  misc_feature (1)..( 3003): 2750-1469P.txt file - cDNA_ID_1821572; gDNA_ID_2926218; Annot_ID_142309

SEQ ID NO: 19364 - DNA, 3003 bp, Unknown
  misc_feature (1)..( 3003): 2750-1469P.txt file - cDNA_ID_1821583; gDNA_ID_1620658; Annot_ID_47912
gagattgaggtataacttaagtttgctcaaaatgttcatggtaagcgatgacaaaaagctttctctatccggcagaataatctgcagatctctagcagacctcgagtttcttggaagtaaaaatctccgtcaagaatgcagcagagaatccaaagcgtgaaactgtaccttctaagaatttggatcttccaaatgcccaaaagtctcattccaatggcttacagcttcttcctgtgttcgcataatccagatatgtttttccgcagcagctttctcttgctcttccagaattctctgcaattgtcaaagcttaaattttcttggacaaaacagacacattcatacacaaacagtagaaactgcaccaatgttatgtgcataaaggacatggtgcagaaggacattgtcccatgttcagaaacaaaatgtatgctaaacataaaagctgcaccaggtaacaccgaattcgaattataattggaaaaagtgtgattcacataactccaaatcatggttatatgagattaagctagtctatgtgatatccaatagatgatgctaaaagacaaaagtaatgaagaatgaatcatttgtaagaacaaagaagctacaaacctcggcttcagaagctctttttgtcttcaaggaaagacaatcaaagaggtcagagaacttcttagtacaatcatcaagttttccaacccggtaatactgctgcatttgataaaatggtgctgcaaaaagagattgtctgagttaaatctatgaaaatcatgtcaaaggaatcaaaaaggtcaatgaagccaagagaacattatagatgaagtgaatgcacataaatcttaaaaattcatttacaaagtgatacaacttgctaaatagtgtctaagaactatgtcattttatacccaaatcgtttcctgtgtcatcgccattgctggttatgttggaccatctagacatcccttcatcaaaacatacattgaggaaatggtttcagagatcctttaattggtgtaaagctaatccatttctaaactctcaccaaggctttttattagtctataacaagctcgttaacaattccaaaaggcaaatgacaaagcaaagattggtatatgactgattgatcaaatctcaatcaagttcaaattttgtgagctcaggatatataattttgcagtttagagatggtgagaggagatggaatagaagatgtagaatcagagaatgcgatcagatgaggagaaacgaagacttacaatagcagaaccagagagcgtcgaagcatttagtgcaggacacgcgccgtcgcacagatgaagagtcttcgttctccgagctcatcgtgtctgcttagtgccggaagaagaaacgggtcaggtgttgttgtattcgggtttagatttagggtttttgccaccaatcatgtttattttttcctttctctctttttttttttttcctttaacaccaaaataaaataaaataaatacatcaactataaaatcaaaataactcaaacaaagaaatatattcaaaggataatttttaacaaaaatataatttaaaagactttaattggtaagattgcataatagcataataacataatgatataagttgcataataaaaattcgtaaaatgaaaacttgcagaatgaaaaatcgtagaataaaattatttttaaaatatgttggttgattttatttggaagagaatattatacgagtttcatttcattttgcatatcaatttatttatttttacgattgtacaatttttatatgttaggacttttgacatctcatatatgtatgtaacatacatataaaatacaaaagtacttgtctactacagaaaatcaaagaataattttttggcagatacatgcgaatacaatttagatttcaagaacaaaactcttactagcaaaggattcttgacaaaatgtgatagctagtcccatggaacaacaatggaggatagaccggtttatatcatcaaaatcttatcataagtcaaacgtgtgagatgatgattcatggacaagtgaaaatgaactctgacacgtaaaagaaccagagtttgtgaaagtttgggaggaatatttcttcaaagggtacttcatctttagtcgtcaaccagattaccacactaaagtgatatattatgtctctatttttaataatgttaatattgtagacaacgaaaaaaaagaagcaaattggcatggctcaaacgttacgttagctccttctttacagcttttttttttcctattttaatatccccaaaaagatttacttactaatacagaaaaacattagttgaccaacaaaataagtacatatttatcccaattgtttggttcgtaaccaaattacaaaaactaatttcacctaacgctataatatcaaccaaaccggaacaaattttctcccttaaccaagtaattaattattcgaattaagtcaaaatttttcattttattttattcaaacctacagttacattttttcctttatttctctctctttctttttctacataacaaaaattataatatcccatctgttttattccatagttttatttttgttttctctttccatttcttgccaaaaccctaatttcaccttcacttaagaaatttctcccccaacttaaaccacccccttagaaaaaataaacaaaaaaaattagatctttcttgtttgcttataatatgtatgttttaggtcgaattttctgaaattaagattcattcctccatggaagaagctctgtttttattctctttagcttagcttagcttctactgatctgtttttgctacaaaatcccatctttttctttaaaactctttatctctgaatcttgagtttcttgtagaagaagaagcaattttgaatctttcgtaatcataaagattcgtggaggatctctactgatttgtcggaatctctcactacagaatcacttgatcttatgtccggatg

SEQ ID NO: 19365 - DNA, 3003 bp, Unknown; identical to SEQ ID NO: 19364
  misc_feature (1)..( 3003): 2750-1469P.txt file - cDNA_ID_1821583; gDNA_ID_1620723; Annot_ID_165855

SEQ ID NO: 19366 - DNA, 3003 bp, Unknown; identical to SEQ ID NO: 19364
  misc_feature (1)..( 3003): 2750-1469P.txt file - cDNA_ID_1821583; gDNA_ID_1620658; Annot_ID_163719

SEQ ID NO: 19367 - DNA, 3003 bp, Unknown; identical to SEQ ID NO: 19364
  misc_feature (1)..( 3003): 2750-1469P.txt file - cDNA_ID_1821583; gDNA_ID_2926187; Annot_ID_140838

SEQ ID NO: 19368 - DNA, 3003 bp, Unknown; identical to SEQ ID NO: 19364
  misc_feature (1)..( 3003): 2750-1469P.txt file - cDNA_ID_1821583; gDNA_ID_2926187; Annot_ID_200706

SEQ ID NO: 19369 - DNA, 3003 bp, Unknown
  misc_feature (1)..( 3003): 2750-1469P.txt file - cDNA_ID_1821587; gDNA_ID_1620658; Annot_ID_47911
gcaaatagccaacatctctctctctctctctttcactttttctcatctgtttttttgatagatcaagaaacctgactataatatgagtgataacagaaacctgaagaagagtgcccttccatctccaaatccctatagagggccttttattcataagtcctctctctatttagagccacgagagagattaccactgccaaaacaaatcaaacagcttcacatattttgagatatcatgtcaacggattagtagcttccatgaactggaagcagtgagactagagaagactcgttcaagtgttgtggtccgcagagaaacaccaacgacgtcgtacttcacttattgctccagtctttgagcaaaacgctaaaaccttttggtacaaaaggacttaccaattattatttttcatttcttagatccgactagtaaaagagaggaattcaaagcaaaagttgagaagaaaagaaaacaactcttagaggagaaattgtcaaacaaaattttttagtgagaaagttctcctatatatgtcgacagaggaattgggcaaatacattttagtgagaaagtttctccaatgagtcgacagaggaattgggcaaatacattctaatggctgtgggtattagagtaacttttttctggaaagtttaatattatttccagtcatcgaatcattgatgtaagcaactaagcattagagatgaatagtatacgagttgttctcattttcacgttttcagaacgtgattccgccaggagcggacccatatgggggagttgccactgtcaaatattttgaaactagtgttattttataaaagatttttattgtgcccctattaaatacactatttattgtccccattattttttatttttttacagccaccttttaatacaaaattggcgcaagttttgacttttgtattatattgtattaaaatttaaaaatttattttattatataaagtttcgttgaaaaagttactatgataccgacatatatcaagtcaactgatcagattttgatacgtataaaacaaatagtacaataaattataaatcctaaagtaaaaggattgcaatttttaaaggtatataaaaataaaataatattttataattgctaattctgaaaagaaaaaactacaattattattctttgaaaatatatattgaatagaaattatatatacaaaaaaataaaatcatataatcttattatataacaattgatgtttcaaagttattaaatgatttctatatgtgttgcttaattgatgagattttgatttgtaagaacatttctcccaattatattttgacacatgctattatgctaatataaaaataaaactcacatatctttaacataaaataaaataatataaatatatattaaagtatataacttaaaaggatatatttcaattaaaataatatttataaaaataaaaaaacttacgaaaaagggaaagtgtaaaaaagcttacaattacaaaaaaatatattaaaatgaaattatacggaacaaaaaaataagtaatatatcttataatataatgtttgatgtttcaagcttagtaattaatgattgtgtcatttttatttataactatgtgataggagtatgtaaactttttcttttttaggtaggagtatgtaagatcaatataagtttatttttatttttatctcagctttgaattatctaagcatcatatatcattgtgcttaaaaaaaaaaaaattaatgatgtcaaattatttttcttttaatttcgcaacatttattggtatgtaaacattcatcgtaattgagtagcttttctttattttagttttcttaaaaacatcattaattattgttgtgtgatatatttttcaattgattttttatgtcggaaattttaatgatttaaaaaactatacaagattgaaagtaagagatatattgttggacgtaaaaatagaagacgtgttgttggtttaatgtgtatataaacattttataagtagtggcaaagaacatatttcaacagtaaaatatgattgagatgtaaaagcactagtggtaaatgatataagaggacagttggatctgtggtttgcatgtaatacattttctaaaagaatttgtagaataatatacagtaaaacctctataaattaataatgttgggaccgcaaaattctattaatttatcgataaattaataaatattaatttatagagagatttttctaatttggtaagttttttaaaatttttttatgaaaatataaacttccattcattatttgaaatatctttctagaactaattacaaataaaaataattatcatgttttgaaaacaacacgaacagtttttaatatagtaaaaattattaaaattaaattaaaaataactaatgtgagtttaagcaaaaagaaacaactaaaattatatttcattaaagttgttatatataattataatatatatatatatatagttgatatttttatataattattaatttatgatattaataagaccatatgtttctataggattttcaaaaaaattattaatcttattaatttatcgagttgtgtcactttttacactggtcccaactcgagaccggaagaatttattaatttatagaggttattaatttatcgaatattaatttatagaggtttaactgtataaggggaggccggaaaattacgttttttgagatacggtaataatagtaaacaaaattttggcaaaagttgtggtgatcgataattttaaccttactatatattattataataaaatgttccaactagatataaaatatagaaacgtaaattagtatagtaaaacaaaaacgaattaataaaatactaactcttgtttctagactttgtcatccatcaaaagctctataaaaccaataatcttcattggatgtaaaattatctatttacatttttctctttcaagaagaagcagccatg

SEQ ID NO: 19370 - DNA, 3003 bp, Unknown; identical to SEQ ID NO: 19369
  misc_feature (1)..( 3003): 2750-1469P.txt file - cDNA_ID_1821587; gDNA_ID_1620658; Annot_ID_163717

SEQ ID NO: 19371 - DNA, 3003 bp, Unknown; identical to SEQ ID NO: 19369
  misc_feature (1)..( 3003): 2750-1469P.txt file - cDNA_ID_1821587; gDNA_ID_2926187; Annot_ID_140837

SEQ ID NO: 19372 - DNA, 3003 bp, Unknown; identical to SEQ ID NO: 19369
  misc_feature (1)..( 3003): 2750-1469P.txt file - cDNA_ID_1821587; gDNA_ID_2926187; Annot_ID_200704

SEQ ID NO: 19373 - DNA, 3000 bp, Unknown; identical to SEQ ID NO: 3707
  misc_feature (1)..( 3000): 2750-1469P.txt file - cDNA_ID_1821591; gDNA_ID_1620658; Annot_ID_47909

SEQ ID NO: 19374 - DNA, 3000 bp, Unknown; identical to SEQ ID NO: 3707
  misc_feature (1)..( 3000): 2750-1469P.txt file - cDNA_ID_1821591; gDNA_ID_2926187; Annot_ID_140835

SEQ ID NO: 19375 - DNA, 3000 bp, Unknown; identical to SEQ ID NO: 3704
  misc_feature (1)..( 3000): 2750-1469P.txt file - cDNA_ID_1821595; gDNA_ID_1620658; Annot_ID_47908

SEQ ID NO: 19376 - DNA, 3000 bp, Unknown; identical to SEQ ID NO: 3704
  misc_feature (1)..( 3000): 2750-1469P.txt file - cDNA_ID_1821595; gDNA_ID_2926187; Annot_ID_140834

SEQ ID NO: 19377 - DNA, 3003 bp, Unknown
  misc_feature (1)..( 3003): 2750-1469P.txt file - cDNA_ID_1821607; gDNA_ID_1620658; Annot_ID_47904
cgttggtagaactgaaaatgaggtgaaccctcgcacagtggaagtctcaagtgatgagcagttagcccgtcagcttgaaagacaaaacaatcctgtacatgcactagccactggattatttcctgctgaggtgccagattctgtcgaaaatgatacttcgaggttcagttcattcttcgttcttgattttcttattaactacaccaaagtaacaatttatttagaacttcatgattcttttcctgcgactcccttgatcttggtactgagatactaaatttgcactgccttaaagtaacgttattttaaaatgttttgaatagcaagttatatttggtttctgacgaccactatttgtgcatatttcttggatttattttactggattgtataagttctcatccctttctttcacaaaataggaatttaggattggatccaagttggctgcagacatggtcaagtcagggttctgatgtcgctggtccttctaccacttccaggacagttggacttgggcgggttcagatgatgatgaggcatcttgcatctgttggcgaaagctatgctcaaactgcacttgacgatgctgcttggagtctatggccgatgaacccttcacaagcatccacttcttctacaactgtacctcctggtaatggtggaaggacaggtggtctgcatctgagaactgtatcaaacacgacaaatgaaagcttaacaaatatactagctatggccgagacagtgagggaagtcatgccacacgtgcccgatgaaattattttccaggtaaattttaagtgcatattggattatctgtaagctttgatgggatgtgcatacatggttgagttgagttggtggctcatttagattgtcttctgcattgactggaaggaactattttttgcatatattcatacctgaagccgaattttatcagtttatgtatgtggtcaatttgcctgaactggtctctatattcactagactggtccttaagctatggatagttcagttttaagattcacgtgacttgatacttgaacctgttatgtttcaatttcttgcaggacctgcagagaacaaactctgttgctgttaccgtgaacaatcttctccagatgtgatgatagtttgtgtaaaatatactaagcacttccatttcaaccttaggtatagattaatgattggggacatatccttatccgtaagttttacacaccacccaacattccaagcttcacccgctgtagatataaggcactgtgtatcactttttgctatagagaagaagaggctctagtgtatagcttctgttcattgctctcttgcgaaaataagttcggatatttacataaggtgatgatgccctggtggtctggagatatcttgttgcagtctgaccttggctccaatctcgagggagagtaaccactctttgcagctgctcttttggctgctgccacctctcctgtataagaatgtgtaatttacaataaagaaaaaagaagtaaatgaaagagtctactgttattgatccaatagcctgtaatgtagtatcatcaaatgtgtgaactcaatttttttttcttctgaagaattatcttcctacattaactctatacccgttttgacgaacggataaacagtgaagagacaaattaacatataaaatataatttgtcataaccatttcgagtagatataatcaatagaaaagtatcatgttggtacttttaacgcaacttcaagccgaaaaagattgtgaagagattgtttctttcgaaggaagcaactttgattttgtccatgccgtgtgtaaattagcaatagcagaagagaaccacttaaacttattttaatacgcttctagatagctctacttggttcgataaatttttatgcacgttaagtaagtttaatctgtttctaataactaaaatatatgatgtagttggcataaaaaaaaccataaaatctattcccaacaaatgaggaatattcacatctaagatattctttttaaaaccaaaggaacaagattaacatgagaccttagacaaagggaatggccatgaaccattccataattccatttagagatagcaagtggcagatatatatgtgtaattcgaaaatatataagtatatttgatccattctagtcttcattaaaagatacacaatattatcatttatcaattaagtggagggactgactctacatcaaagatagaaatagggtaatttagttaagcaagactcaagtatcaggaagtgagatcactactttgcaacaatctcttgatagccatctgaaatcttcttcagatgctaatctcaactcatggaaacatccatggcacggtgtattgacataatgtagcaagttacaaacttacaatgcaacatatggggaaaatctgaggaaaaacataagaaacgatgaacaacataaacttaactaataagaataatgtggtattatatattatgaaaaaattcaataatctgtttttaatgtaagttaaatcccgaccaagaaatgataaaaaagatatttgttcccacattcttctggtacatgtttccaggtcttctcctcaatctttgcattttaacgctcttcctttaatacatttttttttacactgtattaattatgagataaaccccaaaaaaagtacattggtacacaagcataaatacaaaaatatgcatgcttttttcagaactgtttaaaggtaaagcctttttctgcaaattttcttttcgtgtatgaccaaaaaaaaaaaaaaaaaaaactttattctaaaaaataatagaaaagtagtgtgtcttcatattgcagtgtcttgtaagaagaaattcaaaaacccacactgacactttaacacattgcttcgtcttctctaccgtttcgatttcactcttaattatgtcaaatccgtaagcttttgtgatcatcaacaccaaaaaaaaaaacctaactttatg

SEQ ID NO: 19378 - DNA, 3003 bp, Unknown; identical to SEQ ID NO: 19377
  misc_feature (1)..( 3003): 2750-1469P.txt file - cDNA_ID_1821607; gDNA_ID_2926187; Annot_ID_140830

SEQ ID NO: 19379 - DNA, 3003 bp, Unknown
  misc_feature (1)..( 3003): 2750-1469P.txt file - cDNA_ID_1821611; gDNA_ID_1620658; Annot_ID_47903
gtctatgcggttgggatgtttgtggcaggtcacttgggcgatcgtttggatctcaggacgtttctgaccatcggtatgatcgggaccggccttttcacagctctcttcggggtcgcattctgggcgaatttccacagcttctactatttcttggcggttcaggttatggcggggttgtttcagtcgataggttggccttgtatcgtggctgtgctcgggaattggttcgacaagaagagaagaggaatgattatgggtgtttggagcgctcacacttccctcggtaacattgcagggtctctgatcgcgtctgggctgcttagatatgggtggggttggtcatttcttggcccggcttttctcatgacttttcttgggatcgttgtttaccttttcttgccggtgaatcctccaaccgttgaggcagagagagatggaactgaaattgactctaccatgaggctcggtgacaccattacagagagcttattggaatctagaatgagtactggattcgatagaaaggcagtcgggttcatggccgcttggaaaatccccggtgttgctcctttcgccttctgcctcttcttcacaaagttggtctcatacactttcctctactggcttcctttctacgtcagccacaacagtaatgtttctcatcatctctccttccttttacctctagtgttgtagcctgactatatatgcattgtctgaattatatgtgatgcagtgatcggaggagagtacctgtcagaggagacatcaggaaacttgtcgacaatcttcgatgttggaggcgttgttggtggagtcttagccggatacatatctgatcaactcaacggcagagccatcacagcagcaggattcatgtacttggccatcccagctcttttcctctacagagtctttggacacatctcattgaccatcaatgtcatcctcatgttcacatcaggagtcttcatcattggaccatttgctctcatcacaacagctgtctcagctgatctcggaacccacaaatctctcaaaggcaatgcaagggctttggctacagtctcagctatcatagacggcacaggatccgtcggtgctgcgattggaccagtcctcactggttacatctctgccataagctgggacgcagtgttttacatgttgatgactgcagcattgatctctggattgttgctcactaaactaatcatagcagaagtcaaagcgttattgtttggatcagaagatgaagtagctgcatcatcatcatcaccaccagcatccagacctcccattgatgtcctcgtttgagttttttccttcattatttatcagtttctttgacaatttcacactttttttatccttttaaagttcgttcctttttccccagttgtcttcatttcttaagtttgaatgagaataagattacctaatttggttgtcgaatgatatttaaaccaatcaaaacagctgaaaattgcagcaatcggaataaagaatcatcatttggttctatatgatcatcaaatttcactgaatttacacataaaccttaagaagtagcaaaattcatttttaaaaaaggtacaagagacggtgaattcaccggagaagctgctaagtggaatctgtcaaacgtcgtctctgcttttgggcttgcgatatttctcctcaacttgcttggccattgaaacggcgcagtgaccgagctttttgatgttagggacgttgtaggtctgagcgatgtagatcccgcacactgttcccatgatgaaagagaagctgctccttattatccccatcttcttctccgtagatcggatttttttttttgggtttattgaattggagatattttgatcggagagattgacggaattaaaagcgaaatccgccaagatcatgagaattctggaaattaaaagtcgaagaattgaagatccattactgggcctgtaaggcccaaatatattaaaaatttacatgggctttttgcgttaaatccatatgaatttagcttttgtttgtttttatatgggaaaattcaaactagtcaccaacttaagaaatctttaatgagttaaaggtgtttttggttaaaggggtcatattcaaatttgttggtgtgtcaaaatcaaactattgctcttaaagaaaaaaaatgtttactgagatgtatataacattttgttgttgttaaaaatggttagaaaatattataactagagtttttggtttcaccaaaaccatatataacaaatgaattaaataaattttttgatgttatatagattttttcagtaggcatacatatgttgaaaataaactcaacaaaaaaaacatgtgttgaccgtatcagtttattttctaattaataagaaaagtattctattgttttccaggaaggaagaagatatcgaattttgctctttctacttttcgattctctctcgatcgagaggagaaaaagacagagaggcacggtgacacgctgctttcacagaatttccccaaccgacagacaagcttcgcggattcaggtttttctatgattcgatccatttcttaagaactctgcattttattccttgtaaaatcttcctcctagctcctttcttcaattttcgatttttgatttatattgtttcaattttggatcatatctttttatttcttgtgaatcgggtctttgtacttggtacctctatgtagcatttttggcttctgtacaaatctgatttcacctgtatgcatacgactcaatctaaaagaacccaagttttggattttcctctgctttggagctcaattttctttacattctgaaaaaaaaatcatctttttatggaaatgttcaatttttgtagttgtttgtatcgtccgagtcttaatacttatgagagatcatgtctttgcagatggcgtcatgctaatatgactaaatgagattctggggattaagtttaagtgggaaggctgtaatagttcctaatg

SEQ ID NO: 19380 - DNA, 3003 bp, Unknown; identical to SEQ ID NO: 19379
  misc_feature (1)..( 3003): 2750-1469P.txt file - cDNA_ID_1821611; gDNA_ID_2926187; Annot_ID_140829

SEQ ID NO: 19381 - DNA, 3000 bp, Unknown; identical to SEQ ID NO: 3700
  misc_feature (1)..( 3000): 2750-1469P.txt file - cDNA_ID_1821626; gDNA_ID_1620658; Annot_ID_47898

SEQ ID NO: 19382 - DNA, 3000 bp, Unknown; identical to SEQ ID NO: 3700
  misc_feature (1)..( 3000): 2750-1469P.txt file - cDNA_ID_1821626; gDNA_ID_2926186; Annot_ID_140824

SEQ ID NO: 19383 - DNA, 3000 bp, Unknown
  misc_feature (1)..( 3000): 2750-1469P.txt file - cDNA_ID_1821629; gDNA_ID_2926149; Annot_ID_139223
tctttttactaggcttggctgttgtttctctatgctgggttggctatgcgtgagaatatattaagagctaacggaagcgatattcgtccatggtacttttatgcgttccctcctcgttcggttatgactgttatgatcacttaagtttctcattgctattactgttggttgctttgaatttgggagtgttcttgtgttgtggtagttttgatttaaggacctgttaactgagggcaggtgttgctagtgaaggccatatgacataaaatttaagtccggagtgatgtgtcattctggtcctatgctcaccaagcacatgtgaactttaatgagagtcatagggcataatttagtgtggaaactattgtgtttctaagagtgttgtgtcacgctacaacctacagtatgtggatcttaggttctatattcaactttgcccaaaaataaaagggttcttatgtggatatcatccatggtacttttcctcagtcgattataactgttatggtctcttaagtttctctttgctcttggtaaattgggaatgttctcagtgcatctgttacactatatatataaagttatagggcataattttccgagatagatatagatgcgccatgataatgttgttgttcctatatttaccaagcatgtgttgcttggtgaaagtcaggggacataacttagttttgacagtaatgttgttggtacctcttcagagtacacttagtatattggttaatcatttggtcaagtagaaattagatatctgaatatttcatgggtaaatatagggagctttagcatctgcggaatcctctttctgtgggggtttgaattcggagagaatctctttatctggattgacttaggtgttttgtttggctttttttgttcgaaatattctcataagttggggtgactttaacctctgaacctgatgtgggtcttcaggtggctatatcatcattattgtgccatggctatggcccttgtcagcctcacatgggaaatcaaaggtcaaccaaactgtgtccagaaacaggtaatgcttagacttatatctgtttatgaagactaaaaagttcacaaagtaaatattatatatgacttcaattctgcagagaggagtccatcttttcctacaatgggctatgatgcaaggtgtcgccatgcttttacaaaacagatatcaacgccaaagattatacactcgcattgcactaggaaaggtgccttcttatgtcatgtgcactttttctcttcagttcaaaattctatttgtttttgtaaagtttgcgttgtggtttatgttttaggctaagagaatggatgttgtttggggagaaacggctggagttgatggacaactatggctgttatgtcctatactgttcattttacaggtgagcttttttctgtacatagatgaatcaagtttatgctaaaacattttaacgcgtttcatttgctctaccgtggcaccatgctagagtggtttactgatattttaatcacttcgttctttttaactactgtgtttccatggctttggagaggcaaagaaactcattcaaaactatagattatgtattgtcgcaagtataaattcggaagtcaatatttcccattcaaaattctctagatggcctgtacagtagaacctctttgctctttccacaacaatcaaaaagaaactttgcacgtgttcatgctggtaatgttgaggttttctgtttgtaactttgctaaaactcaggtgtttgaagcatacgttggactgctgttgctaagaaaaacagtaactggagttgttaatgaatggcaggtatatttttctcactctcgtggcattgttttcaacgggtctattcccggtataggccgacaaatcctgattcaatagagaataaagactaaaaaaataggaagtagagtaagaggaatgttgtcgctttcaggtgatggtttgtgggattcttctggtagtgatggcagttgggaacttcataaatacagtagagacactgatggcaaagtcaagagttaaggcaaagatgaagagaagtaaaagcagagcagagcttaattagacttcacaggtctctcatctgttcaaaatcttgctttttttgcagttcataaatttttgtcctttttgtttttaggccacggataaaataaaactgtgaccatcctttttctgtgtaaatggaagtggcagttgatatttgataattgatgttgtatttgtacacttgactgggttttgtaggaattttttaagtgtcagatcttgaagatgatagtgttaaaataagtatccttaaacaagaagagctaggcccaatcccaggcccacttgggtatcaaacacttccaaaacccagtcaagtgttgtgtcactgtgtcagtgtgtcacaacgaagctctgatacctttcttcttcttcttcttctttctccctttctcgattcagaattgtagagtttttagaaatgcttccgcagttcttcgggcgcttttgatttatcttctgattccggttcagaggcggaaaaattgagactttactggatttcactggaaataacagtccagagctttgtagggttcctctgtgcggttgtgtttggttcgcttgagacaattcgtctttattgcgtgttttcttgtgtttcctttttcaggatcggtgacattttcttgattgttttaaagatatggatagaatcagtgggttacctgacgaagtactggttaagatactgtcgtttgctccgactaaagttgctgtctcaactagcattttgtcgaaacgatgggagtttctttggatgtggttgactaaacttgagtttggtggtaaactttattcagagtctgaattcaagtgttttctggataggaatctgtcattacatagagctccggttatagaaagcttctgtcataagctaagtaattcggttttgaaacctgaagatatcagaaatg

SEQ ID NO: 19384 - DNA, 85 bp, Unknown; identical to SEQ ID NO: 3724
  misc_feature (1)..( 85): 2750-1469P.txt file - cDNA_ID_1821629; gDNA_ID_1620659; Annot_ID_47935

SEQ ID NO: 19385 - DNA, 3003 bp, Unknown
  misc_feature (1)..( 3003): 2750-1469P.txt file - cDNA_ID_1821648; gDNA_ID_2926149; Annot_ID_139217
tagttatattataagaagagtacatttggaacattgtcaatcatttatttacttcaattacgtgtagaaagtgtttaattgcatttagaaatggtagttttggaattaaagtaattgaaatcaaaatcaattataatttaatttagaatttttttaaaattttgctttaattattttagaggtacttcgaagattttttttttttttttctaaactccccactcctcttatcaatgaaattgggtttagatttttttttttttttttatgtactatgtattaattcagatgtcttaaaaatatgatcaaacctttacatcattatcatggagccttttgaatcttcttagaacttcagctttaacactttccatgcatcttttgaagtcttggaatcggaaatgtgcgctagtactgaaaatttctccagaaacaaaacactgaacaacagttgaagagcaatttcatctttcatttctagttttccccactccaacaatattttctttgcatcatgtgcatgtatgactaacttgtgactcggtgatacctccttcaatcactactttgtgcaactccttacacttaagcagccttcatctttatgatccacatactataattttcccatcacacaccacatttctacttagcttcatgtatgatcttatgtttacctgtttgatttctttgtgtttgttattattgctcgatcactcgactcactttctgcctttgatttcttttcagtattgtaggtcaccgagaacaattagctttgataccaatgaaggattttgttcaccctcttagcttaaccttttttttcttaattttaccttgattcgttacattcatatttatactacttttacctttaaacctacttattcctcgattattgtacttaggattacatattaaactaaacaaaagattcccaattagacaattgggccttcaataacacaacatgactggccttttttttcctcttccttatctaattaatattggaaattttcaaatttttaatagtaatttttttttctaaaccggaaaccgtggttaaaattatataaattgtgctatcatcattttttcttagtatgagaaaaataaaataaaataaaatttgtatctattttgaacaaaacttgggttcaagggtgaacccttttattcacctccttttgcattaaccaataaaaacatgttatgtcaaatcctacttaaattacataataaattaaagctataattataaatccaaaccgatatataatctcgtttaattacaaaatctaaaccctaattcttctttgtaaacccaaacctcatttaaactcatttaatcgtaaaaaactaaaccctaatcgtattttctaaatccaagccgatatttaacctcgtttaattgtaaaatctaaatctgtttataaatctaaaccaatatttaatccgtttaattataaaatctaaaccgtaattgtactttataaacctaaaccgatatttaacctcatttaatcataaaatctaaaccctaaccttttataataaactcaaaccgatacctaatttcgttttagtggcaaattagattttataattaaattacatattattatttttattattatgtatcagattttaattgactaaaataaaggaggtgaatataagggttcacccctaaaaatgaacccaagtattttttatttatttttagtgaataccattcttactaataatcgtgatattgagcacatattgtcatatactaacttagtatatgcaagcatgcaatatatttcgtttatatagtttaactattcatttttaaacttagaatatatgatcatcatatattggatattatgttatatgtcatgtagttggctatcttcttcccttatgattatgcatccaaagataattttgaggtaaatgtcgtaaaccttttttttattttattagaaagtacttttttctaaaattcagtaggaaactaatgttatacttaagttaagaaaaatatttaaatatgattttatagagtttgagatattaatatatcggcgagcatataaatttaatatgtataaattctttttaattaaaggtagaatttgttcatatataattattttctcataaatgagaataacaaccaaaacgaacaatattaaaaccatcaacaaccaaaacgtgacactaaatcaacaaacttcagcttagttgtataaattgtttgtttaacttcaatttcattggttgacgaattttatacacaaatgtaacaagttgatttcatcaaacaaacatctacatctactcactctacctcacataattcataaacctacctacacacgcaaaacttcttcaaaggcaacaataaaaatttagagaatcttttgaatcagttggtcagtcaacatcaaacactatttccatttgtacattttcttacttttagaatggtcaatttttttttctcttaataaatagcacttatacatttatgtcccaaaaaaaaaaaaaaatctactttttatttatgtccaattcaaccaaaccaagtccttttagccacgtctgtatttaaccaaaacaatctacagtacttatttttggtacacaataaatgcttcttttcaaaaatcaacctttttttttaatttccatataagaaaacagagagagataataaaaaaaagcttgaaactttgacaaattaacaatctgagattgtaattgagcgggaccagtagtatcgaacgacccagaaaagagatttgattcctttcctcatctttgttcctcaggtttactcctttgaccccaattctaggttttcgaatttgggtaacgaaaaagttttcatctttccgattctttgtgactcatatataagtttctgattctgggttttgttctctgtttccaattagctctgtttgacccatttatcatatcaaaggaagaaactttaaaatg

SEQ ID NO: 19386 - DNA, 3003 bp, Unknown; identical to SEQ ID NO: 19385
  misc_feature (1)..( 3003): 2750-1469P.txt file - cDNA_ID_1821648; gDNA_ID_1620659; Annot_ID_47929

SEQ ID NO: 19387 - DNA, 3000 bp, Unknown; identical to SEQ ID NO: 3723
  misc_feature (1)..( 3000): 2750-1469P.txt file - cDNA_ID_1821656; gDNA_ID_2926149; Annot_ID_139213

SEQ ID NO: 19388 - DNA, 3000 bp, Unknown; identical to SEQ ID NO: 3723
  misc_feature (1)..( 3000): 2750-1469P.txt file - cDNA_ID_1821656; gDNA_ID_1620659; Annot_ID_47925

SEQ ID NO: 19389 - DNA, 3003 bp, Unknown
  misc_feature (1)..( 3003): 2750-1469P.txt file - cDNA_ID_1821667; gDNA_ID_1621195; Annot_ID_57550
tctctgcttctttgctttaatggcgcagatacagaactagggcttagggttttcctcaatggctttacttgttagtgttgatccaacctgaggatttgtatcatcaattttacagaatctcaccactgttagctcaggacatttcctgctgcaagaatctgtttacatatacttgtgtctgagactctgaaacagacaagttcacttgtgtctgaatcatgtaatttttgtgttagtctctctacaaatgattgattcttaaattagacgaataaaccagagaaaaatgttatacattgcatttatggactgagttgtgatgtacattgagtaggtgggaaggtgctccaagcaagtttccatgggagtttaagaagacagagacaatatatttcatggaagggaaagtgaaagtgaatgtagacggatacgacgaagaagaagaaacctttgagatagggaaaggagatgttgttgttttccctaaagatatgaaagttgtttgggagataactgaagctgtgaagaagcaatatagcttagaggagtagtgactttgtagagagaatttgagtcacattgatgtttgtttgttgtacttggttactactttgaactaataatatctatggaattgcaatgttgattaggattctgattatagaagtaagaaaactatatattatatacaatttaattaggaccccaacagctcaagtacatgactgttctaagagattcttcagccttcttagccttctcgctctcaccagaggaggtaacggctgcggagacagaagacgaagagaaccttttcccttgagaaacagatctaacgttgttccggagatgttgattaaccgaccggagtatgtagttccaccgacaaagacctagttggtcttttaatgcctctacggctccgatgctcactgccactgtccatgctttgcttgtagaactcatctttcttcagagaattaaacttctttgtgttttgtgttttgtgtattgagaattgtttttgttgatgatgtttagaaagtgaagtgaattggtgtgtttatgtaagagagaagaagccaacaatattgccgtgtagttggagttaaaactagaagctgtggccgttggttttggttgtttactactgtctggatagtaaaatgacgttgttagccttttaagaacgaattggataaggggtaatattgggattctggtagttcctggattaacgagtgccgctatcatgtgcacctggttttgagattgttcacttgtttgggtttcgtgttgtgtccaagttttgaaatatagtaaatgttttctttatctccttgtagaataatgcatgttggagatgaataataatataatatcaaaaatcatttgccgaccaaaaaagtaaaaaatatattaaacacaaaatgtaaataaataaataaaaattcaatcaaaagaaaaatggttttgcgatgacttactttttttttttttctttctttcatacagaagatgaataccatttaacatgagtattcaaaaaatcaaaagtaaaactagtatcatcaaatatttccgctaaattagtaaacatatttccgctcataacaattagaatgagaattttagaatgttggttctgtgacaaccacacaaatttccgagtttagtagatttggaattggtgtttttctttgcgatttactggtatgcgctcttgagcaatcgtatacaattagagtagtaatattattttacttttctgtaaattgctttaatccgttctcagttctctttataacttctgtcaaaaatttaaaatgatataaaatttaacattttactaaaaaaaagagattgtaaaaaagaatatagagatttgttttattttatcctttaatcagtcattttataaataataaatttcgtttcaagtagtacattaatttttaaaatttttatagatttaatatacagatcattctagtatacacaaaaattaggatctatattattatttaaaaaaaaaaaaagcagctcaagtcgatgaactaaacatgggcaaaatcgtcattgaactaaacattcatagtttcagcagaaaccaagaaaaccagcagctacaaaacccactttttgtctgcactttcaaactccaaaggcacggcactttttgtctgctttctcttcttttataaacaaaacccactttgattcacttctcattcatcatcaacaaacacaaaatcgaaaccaaatcacttaaacaagaaagaaacaaagagaaatgagctctgcaagcaaaacgtggatggttgctgcaagcatcggagccgttgaggcattgaaagaccaactaggcgtgtgtcgttggaactacgtgatccgatctgcgaatcagtatctacgcaacaacttaagatccgtgtcgcaagctaagaagctctcttcctcatcaatcgattataccaacaagaccaagcaagctgaagaatcgctgaggacagtcatgtacttgagctgttggggtcctagttaatggacaatggagggatttgaaaaccctaatcatagagttttgataatgtctcttttagggtttaaaacccttaaaaaggttaaaaatgtatagaatttgctctgtaaagtgactcttgagtcttgaactaatgattaatctcttttcataagatttgttcaaatcggatttttcagttactgcaactaagtaagaaagacttaaactttgaatataaatacagagaatttggtacgttgtgtgtgacaaagatttatttctgttgatataattaggaccctaaattggaggtttgttacagtcaaaagtttgtactgagtttttactacaagttagggattttgttaaatgcttatcccatttttcatgcagttctgttgctaattctccagcttaataaagagaggttaattttgtttggtttatgtgtgtgaacatttcttgtctgagtaaagatg

SEQ ID NO: 19390 - skipped

SEQ ID NO: 19391 - DNA, 3000 bp, Unknown; identical to SEQ ID NO: 3722
  misc_feature (1)..( 3000): 2750-1469P.txt file - cDNA_ID_1821667; gDNA_ID_1620659; Annot_ID_47919

SEQ ID NO: 19392 - DNA, 3003 bp, Unknown; identical to SEQ ID NO: 19389
  misc_feature (1)..( 3003): 2750-1469P.txt file - cDNA_ID_1821667; gDNA_ID_1621195; Annot_ID_174707

SEQ ID NO: 19393 - DNA, 3000 bp, Unknown; identical to SEQ ID NO: 3722
  misc_feature (1)..( 3000): 2750-1469P.txt file - cDNA_ID_1821667; gDNA_ID_1620659; Annot_ID_163740

SEQ ID NO: 19394 - DNA, 3003 bp, Unknown
  misc_feature (1)..( 3003): 2750-1469P.txt file - cDNA_ID_1821671; gDNA_ID_2926148; Annot_ID_139203
tagactcatatgtccgtttgatcacgacttgggacgaaaattatggtttggacatggttgtgaaaaacacagagagattttcaaacagttgttataaagtgaaagatgcacagagtcgttttggccagatgtaggtcatcttatcgtttatggaggccccaggtgtacataaactttgttagtgcgtagcattattccaaaattgtagtatctgaaaatgttcaaaataaatcaagagaattacgttcttactatgaataaaaatatataagaaaaacgtaaagaaatttaaagaacatctttatattctttttttgttatcttgtttgacttggttagaaaggagaagacaaaagaactatttatatgttccaaattttaaaaacatcttacttattacatcatatatcattagaaaattccactacattaccttaaagatatataatattttctatagagatatagttctagacaaactttacttggtgtgttaacactcttaagtttttctagaacttagacttagttaattttgagtttggtccaataattaaactcttgatcatgatcccgtgattaaacttaacccaaagtcaagtttgatctcactaccggattatttgaggtgaatcaaaatataacaatataccatgtaattggtaggcaaaataaccaaaatttgaaaaatcaatccgaaccgaaataaatggttttatttggttatggttttttcttaaaactcatttggttatcatttttcttaagtttttggtttaggtttggtttggttaaaaaccaaatgatttttttttgtttttgattaaaattaagaataaccatatatactaatatattgtccaatttatattatgattagagtatcattggattttttctttactagacttatatacagtgatctcttagtaatatctgattattcttatattatttttattctacgtttcattttatttatgcatcaaacttatactttttttttgtaaaatacatggaataaccttaaaacccgtacccaaaccaaaaccaaaccaaaccaagatacatatagttttttatatgatttcaatttttacaaaactgaaaacccgtcataaattgtaaaaccgaaccataaccaaacttaattacatacggtttctttatggtttcaagttttttgtaaaaccaaaaaaaacaaactgaaactaaactgaaaaactgcacgcccaccctaatactatatttaaaaataaatctcaattaaaatcaaaaattaaagaaattaaagaaacaaaatacttatgattttaaggaaaatctaagaataattatttttatttattattttcatttgtcattctgaataatcacacaattagttttatacaaacattgattatgtcacatcattttatttatagtacatttttcttattttaatttatttataaatataatttatacaataggattataaatgcaagagaaaaaaatactatcttcaatttacacatagaaatgtattacaaatacttaaaataaatttcttattttcagattttttttagaggaaaagttacaaatattatgccaagcttgtgttaagaagttagcattaaagatatgaataaatgtcatcaatatatcgatgtaaatttaagaagaaattatgtttgacttgtatggtccacaaataattatgtcatctttgacttgtgcatggtcaaaaataacaataaatctcttaaaagcattcatggaaattagtaattacttagtttaagaagaaattttgtttgacttctgtatggttcaaagatatatatactatatttaggtttgaaggaatttaaggaaacgtatatgtattaattattttttctaacccttagctaggtgtatattctactctagtgaatcattcagaaatattacatttcttgtgagaaggtgattatcccaaatgacttcttcaaatctttctcctattactatatctcaataataactgtatatatagaagaaaaactaattatcaaatttctctagttcacaggttaatgaaaatgaaattggggtgtgcacttccaatgacgtgcatgattttggcatgctatattatttgtgggagccttctaatgagtcattgccatggtgttataaaagaagcaaagacattaaaaagtaatgaagatcttgaaatagagcacaaacttaagcttatcaacaaacctgcatttaaaatcgtaaaggtttatcctctcaccatgttatagaataattgaatgtgtttatatatatataacattaaattacctatcctaagtattctaggatttgtataatagaaagacgatgaaatttatgaaatcatgcaaaaaataatatattttcttatatatgaattcacagactattaatggtgaacgatatgggtgtgtggatttctacaaacaaccaggacttgaccactcatccatgaagaaccacacatttcaccataaggtattgcattggtaatatattttttcttgatatttagaagatttcaactctatttagaatagatggtaattaagtattggcaatattgtgacaattaagataggattattttcttgttttattaattattaatagaaaagtaatttttttttgtgtccactggattggagattagaatttaagtttaggatttaattagtttggtttcccataattgttaaaaataaagataaaatccaaatgtatatatatatatatatatatatatatatattggataaacatataatgaccaaattttctttttatatttaatatgaagtatagataatcatatacactattttgattagaaagagccatattttttaaaaaaatcacttttgagttttaatttacctttttatagtttaatttaagaagagtactttaataaaatttaattttggaatggctaattaataatttatattggattttgatgtggagatg

SEQ ID NO: 19395 - DNA, 3003 bp, Unknown; identical to SEQ ID NO: 19394
  misc_feature (1)..( 3003): 2750-1469P.txt file - cDNA_ID_1821671; gDNA_ID_1620659; Annot_ID_47915

SEQ ID NO: 19396 - DNA, 3003 bp, Unknown
  misc_feature (1)..( 3003): 2750-1469P.txt file - cDNA_ID_1821688; gDNA_ID_1620660; Annot_ID_47951
atgttgcttggttaagaagtgggtctccatcaaaaactgggcttttacacttattggtaagatgattttgctttgcacaagaatcccaaaagtttcttccttctatgggttttgtgtagtgtcggaatcttcaaatctattttgtaattcgtacgattactttgttgctttatatacagtaacttgagaaatctagggcttgttcttttgacttggtgatttgcatgtatggttttgcctataattaagatgttacttactagtttacacgagattcttctttttatgaattgtttttatccattcttcgattgttgtttgtgaaattgtgattgattatgtgtaattatgtagtggctttggatagagtaacttcagattcagagatctgtggctaaggacttgtttttctaacttagtgattttcatttacggttttgcttctgtttttcatccttcttaatcctttttcttttggctcctccaattggttttccatagagacaaggtgcaaaatcgtttgaaggattctttgttcaacaaagatatggaatgcaacaaggaggaagctataagagcaatggatattgctaagaggaaagttgcagagaatgattacaacggggctaagctttttgctaacaaggctcaggatttgtatccgaaacttgatggtttaagacaagtgatgatgttgatcgatgtgtatatctcagcaggaaatacaattagtggaggagaatctgattggtatggaattcttggtgttgatcctttggctgatgaggaagtagtgaagaaacagtataagaggctagctcttttgcttcatcctgacaagaacaattgtgaaggcgcagagggtgcgtttaagcttgtgttagctgcttggtgtttgttatctgataaggttaagagaattgcttatgatcagaagaggaagttgaacgaagttaaaccgaaaaggagtcgaaagcagaaacaacctccaaagaaaccaccaaatcagccgaaacaacaaccaaatcagcagaaacaaccaccagatcagcagaagcagccaccaaatcagcctagacagccaccaaaccagcagaagcaaccacaaaacgagccgaaacaaccaccaaaccagcctaaacaaccaccaaatcaagcaagtactaatggtagagctagaagcaaaaagcccacttccaaagtttctatcttttggacaatgtgcaacaaatgcgagacacaatatgagtatgtgagggtttattatcttaacaagaccgtactttgccgaaattgccgtgggaattttaaggcaactgagatagagaaaacaccaactgagaaggaaaaaacaccaactgagaaagaggaaacaccacaagcaacaaacaagaacacaaatggtgcttcgtcttcttgtgatagagattcttcactaaatgttaattttgattctagttttcgacgggattcttctttatcaagaatgagttactttaacagtggaaatgtggcaaatcaagcagaagaaagagggaaaagagaggtaagggagtcagaagaagaagctggtagaggaattgcaaactctgatttgaaagtagaagagagagtttttaagaagctgaggacagataactatgcagagtcaagtagtgaaatcaaggtgtgaagtaagctgaggacagataattagaagtttaacagtgaagtaggaactatgacatttagaagtttaacaatcaatgattttatgattatgatatttgaatattttgcatctagactaggatcttgtacagtggaaccaggttagttcttcttcctgtcatcttcaatgttgaatctgaaatgtcaaagctttattttatttttgttaacaatgtgtgctttaacaacgtgagtcaaattaatcaaagtgggttcacttaaattgttggaagaaattttacttccactaactaaatatttccttcttcggtcccttcattctcaaaagtttttacttttgtccccaaatattttaacggagaagatttagtctcctacttcgggtcatcatatatcacttgaaaatcgggatattcgttaaaaatcccccttttttttttttcttttcttgcttcctccctttttttttttttttgttctttcctttctcgcgtttcttctcctagggttagggttcgacgaacgcagctgttccacgcgtttagtttcaattctccatcgaagaagccataatccggtgcgtaatcatcgtttttgttatatgtttccgattaggtgtattattttccgtttgttttctcgggtttggtagtttcacgaacttttgcatctctcagatctattgtacgttttttccttcgtttgtgacggatttttctgtgaaaagagtttaaatttccatggagaattactcgattatctctaatttaactctttggcaatcaaatttttcgattttattgtttttttctggatgcgtgagcttagttatgaacaaggagggtcaactcgtttacatgattctctattcacagtattttcgtgggaaaggagcaattatgtttttgttttcatgattcatgtctttatgttgcatattttggccccttttactctcatttagactatgtggtgtttgttttgatgccattgttttgattttccatcaattagtaattttttcagtccgaatttcaattcttcgtcattgaccttgttgatgattcctgtgctttcagattcctaaagagcttacatttgttactcaactttaaagttttgacgctagagattactatcctcttgctgggaactcaacgtgaccaggtataaatctcagctcatagataagcaaagtagtttttttctacatctcttagatttgtaccctttttagctcacagtatcagttcaataaccaagctgatccctcttatgaacttacattcattggttctgtttttgctagactgtgtttgaaagatagcaatg

SEQ ID NO: 19397 - DNA, 3003 bp, Unknown; identical to SEQ ID NO: 19396
  misc_feature (1)..( 3003): 2750-1469P.txt file - cDNA_ID_1821688; gDNA_ID_2926174; Annot_ID_140243

SEQ ID NO: 19398 - DNA, 3003 bp, Unknown
  misc_feature (1)..( 3003): 2750-1469P.txt file - cDNA_ID_1821712; gDNA_ID_1620660; Annot_ID_47944
aagttcaaaaaatttcacaacaagtgggggacaaaaacccaaaaaatgcagaaggacaaaaagcctagaattttgggtacaaaacgattatatcaaattagatgaggactaataagtaattatgatgaataaaactaagggacaaaatcgattgaaagttatatgtagagaatctgtacagattgtcagagaaactgagagagagacgaaaccgtttcgttttgttttcaagaaaataatgatgtgtggttaaagcgcacgaatgtcgagaaagaagagataaaatataaaagtgaaatggtacgaatattataaacaattcaaatagactatagtacgtatgagttgaaagaagttttcgattgttgtagattttttctttaaaaaactattaagaaattgcagggttttatttgcaataaattaatctacacttattttaactcccgaaccattttatgcccttcctcgtcttggtctcatctaataaatggaaaggccaaaaaaatatatatgcatatagataacgaaaacatattgctgtataaaacatggccacataaaaagtggtcctaatttgggaagatttttaaaacatttttcaatcaatttagtttaatttgtttttcgtcggcaactgaatttcactggaaacaaacacttgaatggccattgaatggctattgattacccataaatactagacaacgatccgcatgcacgcgggatgaaactattcagataaagccattataggtaacattattagatgggatccaagatctgtttgtataaaacaaataatttaataattgtttctattatatccaaatttaatttgcaaatattttatataattttttttctcacctataaaatatttcaacgtggtgaaaaacttccacgtagacaagaagatagagcaagtaactcctgaatttagggtggtacatatatttttgtttttttaataattagagataaagcaagtaatatgcttcaccagcctctgcttagggccggctctggttcagctaattcctatattatcaatattcgttcagatatttgtatgttgataactaaatttgatatttgtgatttttctaaaaaaataatactaaaactaagtgcctgcattggcaggggccataatgctagttatcttctatattagagcgtaagtcaacgatcctattctgtaaggtctaccatctagaattgtaacaatttcgcaatcatccagcttttgctgacccgcccgccactcatctactagtcgtttgtatcacaattccaggtcagctacaatttggccaagttacttctagataagaatcctctggtctaaagtcctctcatattgtacgtaacttacaaaattttattgcaaaaaagaaaaccctctcataattaaataacgacacatggatcattttcaactagcaatggcccattgctagttgtttttggtagtatggcccattaacagtttgatttaagacctgtttttaggaaatttttccaagaaaactcttcaattatctttttataaggaagtttaatacctaatatttctgggttggaagaataatacatatatttataaaaatatgtaatttaacactcaaacaattaaatgttttatacttacaatctcataacaaaaaataaaattctaattaccgttaccatctcaattaattattaatttttagatgatttgacattaatttataattttgaatataattttattttatgttatctcaaaaatataaaatttcatttttatcataattaatttattttaaaattcaacataaaaaattatgagaaaatctaaatactttaaaatagtcatttttacaatcttatttcatcgtctcaatatcaaaaagatgttttttcttgagattcaatcttcgattctagatttcctcaattaatcgctacgagaatcgctgataaacaatttttgtcgccctcttttgccaacatcaaattcgataaccgttcacaatctccttttaatcgccactaaaattaatttgatttcattcgtcgtaatgaatatgatatcaacgaccattgatatgaacttcttcttcgtcgtgagaaactctctattcgaatttaaatccttgacaaataaacaattttcgacaaaatctcaatttgaatctcattgtatttctcatgatttttcaattcataaaaatggctaattttatttttacctttttcaaagttttttttgcttttttcttgaatttaaaaaagataatatttttttataaaaacttttgggataatatagaaactaaatgttaataaaataacttttaaaaattaaataaaattaatgcttcatcacctaaacattagtagttaattgagctagaaatggtaaaattggaattgtatttttgttctgagattaaattgtttgagtattaaactttacagttttattagtactgtatgtgtatttttcttcgaaccggaaagtaatgggtagtaaacatccaaataaaaaaataattgagttttttttgagaattttcctttcttttattaacatattttactttttttgattaaatttttttaaaatatatttaaaatctttgtagaagcacactaatccatttgctaactaatttaaatatgtttctaacatgttcacatatattaaaaggcacgttttgagcatacatatattttggttctcagttcttgatcatctagtgcattatctctcaaaaaccctaatcatttggcctcttcttttccccctaggctaatttacatataatatccttagaacgaccaaaacaatgtgccacagggactaattaaattaaacagcttgtaaaaattgtaattatcttggaattgttggagttggttaaaacactttttagaggcctttttattcccatctccgaccattccaccaaaacccaaaccatttttgtttcgcaaaatcattctaccatg

SEQ ID NO: 19399 - DNA, 3003 bp, Unknown; identical to SEQ ID NO: 19398
  misc_feature (1)..( 3003): 2750-1469P.txt file - cDNA_ID_1821712; gDNA_ID_2926174; Annot_ID_140236

SEQ ID NO: 19400 - DNA, 3003 bp, Unknown
  misc_feature (1)..( 3003): 2750-1469P.txt file - cDNA_ID_1821724; gDNA_ID_1620660; Annot_ID_47941
gctgaagcttcatgtcgagctaatcctcaaatgcatccggtcgttaccatccgacaatgccaatcaatcagacatcccaaactggggacaactagatgaattctttgcagagcactttagagaagaagaagcaggcgaagctgagtgatgaagtcgtcattgtacagcaatttgtttcttctcacatcctttataaagtcaaaaattcagagtttgggtttgaggatggactattcgcctgtagatttaacttacaggtaacaaattcattccctctgcctccattaccaaaaaaccactctgctaccaaaagtgtttaacaaatcaaatagaaaatgtgatctgtaatatctcatcggtttacatcaagatttgtggaagtgaaccaaattagtatcctgaaaatcaggcctttcttttgttgagatactgcatagaaacttaaagagaactctgatgggttggacccttaaaatgcaggcatactacagttcttggctcggatgaatattataaagccaacagtatctctataaagtaacaatctctcttcttgtttgaattttctcatttgcctcaattgttgcttttttattatcctttttgtttttgagttgtatgagatacgactgattgaactgaagtttttgaaagaggtaagcagtagattcttagacgtatataatgtattttcagagcgaggaaatatttagtcatttggtgtgtccactgcataagcatttcaagtctttattatgaacttgcacctccagaaaactaatggaaagattggctaacaaatggttccaaaacctccgtatcaaaaaatcctggagtaattaactaaggaatttgtaatgctaatgagtagacacaatttttcaatttcttaaacatttataaatataaaaaaatattttcaacaaaacaaaataataaaaagatgtaacattttaaagataatgcggtcctcatattttttaaataacaaataacaaaaaaagtgatagttttagcaaaataataatataaataacaaaatatatacatgaatagtagatagcgaaagaatgaaactttatatacaaagtgcaaacaataagtaattattaatatatacatttttacaataattcaattaaatgattataatttcatttacatacattttagtaatttaaaatttaaaataaatatatgaaagttacactaagagacgctcttgtaaataattaaatgttataaagatttataaaataaagtaaaagttgtaattgttcgtgaaataaactaaatattgcaatagttcaactcatcgattaaaactatttatgaagagtgactacaaaaggatgcaacggtagaatactacatttattcgggttgcaattttctaaaaaacataaccataaaatatttatttttaacttttaaaataaataacaaaaagttgtgataaaattacacactgtttccaactgcaaaacacatttatgggtgttatctttcaaatagattatgttagttgaaggtgatacatgtaagtgagtgaatggtgattagtcgagttatgtgtttttggagacaactatcttcttcctttcatcaatatacatatgttgtaagtagttgaatatcataatatggctagatttataattattaattttgttgatgaattagtatttaagaaattaacaaaatttgatggttccgacattattaattcgtagagattttgctgtacaaactattcaactagtgggacatatccactttggatattcattaagagacaaagctagagttatttatttcatttctaacattatagtgctacaattctaaataaatgatcgaaactatatactctctcttccttttcaatttattttatagaaaaaacgcacatattaaaaaatatatattaaaactgattataaatgtattaataatgtgatttcaaattttctatagttctaaaccattgatatttaattatttgtcttgaagtttaaaattcatcaataataactactcattctgttcttttttaattaattttctagaaaaacacacatattaataaaacatataaaactgattataaatgtattaatttttgtgatttacaattttttataattttaaaccaatgatattcaattatttgtcttgaaatttaaaattcatcaataataactaataaatagtgcataaaaaacttaaaaaattaaacaatattgttttctaaaagatcaagtaataaggaaccgaaggagtactaaatagtgcatagaaacctaaaaaatcaacttttttgaaacaaatttttttcctaaaaaatcaaataataaggagcaaaaggagtataatctaatctctaaccgatatataatctcatttaactataaaatttaaatcttaatcttctttgattaacccaaaccgatatataatctcatttaattacaaaatctaaaccttaatcttctaattagaaactcaatccgatattaaacccgtttaattgtaaaatttaaattttaacaatactttttaaatttaaactgatatttagttttgtttaattgtaaaatttaaatccgtttataattcagatcgatatttaattataaatctaaaccgatatttaactttgtttaatcatataatctaatcctaaaaaattcttatataaactcaaccaatatatcatttcgttttgatagtggagtatattttataattaaatgaattttagttttattagctagctgattatgattggctaaaatagaaagagtaaagagtgaataagaaggttcatttttggttttcaaattatccatctttattttttgtcctggatactggataggcctttatctttcattcttggggtttcgcatctcttccactaatttatttgagatggaattccattgagaatattcgtctcttctttctttcgttctcaattcccatcccatattccccatg

SEQ ID NO: 19401 - DNA, 3003 bp, Unknown; identical to SEQ ID NO: 19400
  misc_feature (1)..( 3003): 2750-1469P.txt file - cDNA_ID_1821724; gDNA_ID_2926174; Annot_ID_140233

SEQ ID NO: 19402 - DNA, 3003 bp, Unknown
  misc_feature (1)..( 3003): 2750-1469P.txt file - cDNA_ID_1821724; gDNA_ID_2926174; Annot_ID_199704
tttaattaattttctagaaaaacacacatattaataaaacatataaaactgattataaatgtattaatttttgtgatttacaattttttataattttaaaccaatgatattcaattatttgtcttgaaatttaaaattcatcaataataactaataaatagtgcataaaaaacttaaaaaattaaacaatattgttttctaaaagatcaagtaataaggaaccgaaggagtactaaatagtgcatagaaacctaaaaaatcaacttttttgaaacaaatttttttcctaaaaaatcaaataataaggagcaaaaggagtataatctaatctctaaccgatatataatctcatttaactataaaatttaaatcttaatcttctttgattaacccaaaccgatatataatctcatttaattacaaaatctaaaccttaatcttctaattagaaactcaatccgatattaaacccgtttaattgtaaaatttaaattttaacaatactttttaaatttaaactgatatttagttttgtttaattgtaaaatttaaatccgtttataattcagatcgatatttaattataaatctaaaccgatatttaactttgtttaatcatataatctaatcctaaaaaattcttatataaactcaaccaatatatcatttcgttttgatagtggagtatattttataattaaatgaattttagttttattagctagctgattatgattggctaaaatagaaagagtaaagagtgaataagaaggttcatttttggttttcaaattatccatctttattttttgtcctggatactggataggcctttatctttcattcttggggtttcgcatctcttccactaatttatttgagatggaattccattgagaatattcgtctcttctttctttcgttctcaattcccatcccatattccccatggcagcttctttttgcggcagccggagatacgatgttttcccgagcttcagtaaggtagatgtccgcaggtcattcctcgcgcatcttctcaaggagctcgaccgcagattaatcaatacgttcacagatcatggtatggagagaaacctcccaatcgacgctgaacttttatcggcgatagcagaatcgaggatctcaatagtcatcttctctaaaaactatgcttcttccacgtggtgcttagatgaattggttgagatccacacgtgttataaggaattggctcaaatagtggttccggttttctttaacgtacatccttcgcaagttaaaaaacagaccggagaatttggtaaggtttttggaaagacatgcaaaggtaaaccagagaatcggaaactaagatggatgcaagctctagcagcggtagcaaatattgctggatatgatcttcagaactggtattttcttttccattccaaccctaatatatatatgtgcctgtgttcaattttggggtgcctctttaatgacaaaattgactattgttattaggcctgatgaagctgtcatgattgagatggtagctgacgatgtttcgaaaaaactttttaaatcatcgaatgatttcagtgatatcgtcgggattgaagctcatttagaggcaatgagttcaatattgcgcttgaaatctgagaaagctagaatggtcgggatttcggggccttcagggattggtaagactaccatcgcaaaagctcttttcagtaaactctctccccaattccaccttcgtgctttcgttacttataaaagaaccaaccaggacgactatgacatgaagttgtgttggatagaaaaatttctgtcagaaattcttggtcaaaaggacttgaaggttttggatttaggtgcggtggaacaaagtctaatgcacaagaaagttcttatcattcttgacgatgtagatgatcttgagctattaaagaccttggtgggacaaactggatggttcgggtttggaagcagaattgttgtgatcactcaggataggcagcttctcaaggctcatgatattaacctcatatatgaggtggccttcccatctgcccatcttgctcttgagattttctgccaatctgcttttgggaaaatatatccaccatctgattttagagaactctctgttgaatttgcatatcttgccggcaatcttcctttggatcttagggtcttggtttggccatgaaaggaaagcacagggaggagtggatagagatgctgcctaggctccgaaatgatttggacgggaaatttaagaaaacattgagaaattacctgcctgtgatacggaagcgcgtttccaatgaagaagggggccgtgagaaattgaaaaagggaaataaaaagttggatttggatgaggagtttcctggtggagaaatttacagtgatgagataccttcgccaacatctaactggaaagatacagatgactttgattcaggggacatcattccaatcattgcagacaaatctactactataattcccaacaggaggcactcgaacgatgactggtgttctttctgtgagttcctcagaaaccgtatacccccgttgaatccctttaaatgtagtgccaatgatgtcattgattttcttcgcacacggcaggttttaggcagcactgaggctctcgttgaccgcctcattttcagtagtgaggcatttggcataaaacctgaggaaaacccttttcgcagccaagctgtaacatcgtacttgaaggcggccagggatatgacacgagaaaaagaatgcatacttgtgttttcgtgccacgacaaccttgatgtagatgaaacatctttcattgaagccatctcaaaagaattgcacaagcaggggttcatccctttgacatataatcttttgggcagagagaacctcgatgaggagatgttatacggatctagagtcggtatcatgatactttcaagtagttatgtttcttctagacagtccctggatcacctggttgcagttatg

SEQ ID NO: 19403 - DNA, 3003 bp, Unknown
  misc_feature (1)..( 3003): 2750-1469P.txt file - cDNA_ID_1821744; gDNA_ID_1971822; Annot_ID_58356
tttttttttgtttcactgagaaaatagtcagtgagagtaaaacagatctacttgaatatatataaggaacatcggataccttacctttcgccgacaacttcccttctatttgcactagaatccgcaattctatagcagcagagcagatctgtaatcaaataaatattttaatcaatctctcagaaactttactttatacgaaatttgcagtttatatatactgtacaacaatcatttcgtttctcagtttattgaataaaacgattaagaattttgtgggtcaaaaaggaataaaaacaaaaagtaaaagatgatcactttcttttagatattggttttgctcttttattcacttttttttttctgtgactagtgaatctctcttttgaaagagtgggagaggaaagagttttagaacgtatatgagagaacctaatttttgatgttacgtatttacccttttattttaaacattgttaatcattcaagttgggaggtaggggtatattcggtaatcaacattattttttccgtctttatgaatctttggacaagtctttttcctcttacaaagggtatttcaaatgtactttgagtttatttactctgtaataacgtactttgaattttgtttagttatatgtacacttttgtcttatttatcgtatagttttttgtattatccagttccaactttggaatataaaatgttttaagaatatgaatgttcatagttaattaggtacatagtggttagagacgttaaaaaagcaaaatcaggggttaggtcgctgatcaaacctgaatatgaaatggttggagagcatttttaagctaattcactcatcattttttttttaaaaaacagattgatcttgaggtgttccaattttgaaaattgtacaataattcagttgaggattttaaattttatattcaaagtgtttgatgacctaacacattaatgaccataacaatactggtccacaaactttgtttgttgttatctccataatgataatgtgatgtaagagaaacggtcaagtttgttatgagttttttcatttctacttttccaaacggatttggttcaatataagaagattacacaaaaatttggaacaacaacacatcactaaaccagcaccatagaaaatcaaggctgatccagattatttttaaagcagataactcggaaacaaaagaaagaaagatcaacaacacattccattggaaataagacgtataacaaaatgttcataagccaacatcatatgccaagataagaatcacacttgaagacttaacacaactcttgaaaacttctcaccatgatatagaatttgacccacggaggatcaaccaattaataacatttacctacaatatctcaaaaacccctattgcatgatatcgtcttatttcttgattttacctccaacgcgaagggcatggtcatggttccctcctcccattgattgtcctgcctatctagctgccttctcttgcaatgccctcgcgtctctacaccacaagaaaaatgatacgagactatggttagattgattaggccacggttaggacgttttaattaattagttttggtgttatgggtttcttttaatcatgggttttggaagttttacttttagaattaggtttgaggtttctttttacacaatgtattgtggcctatataaggtctcttcttcttaatgaaagaaccaaactccaacagttagcctaattctctaagagagagttgggttaaaaggaaacttttgcttaaaaactttggtccataacaagaaaccaacaatcgtccaatctatctaccaacattaccaatttcacatccttaatcaacaatacgaaacaaaatataattagctcatctaaaactaacaaacacaaataaacctaaattatcaacaaaaatcaacaaatttaaagagcttccaaggcttatgtcgtggtttatccattcagtctaccaatacaaatatcgaaatgaatctaagatgaacgtgttttacaaaatatcgtgataagccgttttttgtattgataataataaactataatactcaacttcttttatatacaacatcaaaccaaggaaacgtatgtcaatctagatttaacatcacaaatcagcttaaaccaaggagatatccctccgaaaccatgttacaatgcttacgattcaaagatgaaggagaaactcagtggacaaaaggatcattgaaaaacatgttcccaaccaaccatgacacaatcttggtcacaaaggtttaagtatcaaacattttcaaagaaaatgttgattggcattcgatacggaaacatgagtggacacaaatttaatatcttgttgagcaaggaaaggagattattaagatatgcgaataaatatcgtgataggcaagtaaaaagtaaacaggaaacaaataaaaaaatatgggtagcggtgcaggaaagaaataccaaataacttactcgattaaaacctaataaactcagaaaatcataaaatttgtctcaaattaaaatctaagatctctgtaaatctaattcattcattcgaattagaagcttctttattcatctattcatcatactctcatcaaaatatgcgaatttgattttaatttctatgtgtttatcaatcgattttgagaaaaaatcacatagacttcttagtttgagagaaattttgaggattttatgagcttattaggttttaatcgagttgtttaacgtttttctatgaattagtaaacattgactaaattttgggtcaaatttgttgagtcaacggcaatttaaagattaaaattgtgcacgcgatagtgcttattttaccgcctttgtggccctgttaattcacgaggcccatatcttgaacagcccataacaatgacattatcacattaagatgaaataagctcaattaagggagttgaaccagcacactctttcgtagacatgtagaaaacgatg

SEQ ID NO: 19404 - DNA, 3003 bp, Unknown; identical to SEQ ID NO: 19403
  misc_feature (1)..( 3003): 2750-1469P.txt file - cDNA_ID_1821744; gDNA_ID_2926156; Annot_ID_139537

SEQ ID NO: 19405 - DNA, 3000 bp, Unknown; identical to SEQ ID NO: 8639
  misc_feature (1)..( 3000): 2750-1469P.txt file - cDNA_ID_1821748; gDNA_ID_1971822; Annot_ID_58355

SEQ ID NO: 19406 - DNA, 3000 bp, Unknown; identical to SEQ ID NO: 8639
  misc_feature (1)..( 3000): 2750-1469P.txt file - cDNA_ID_1821748; gDNA_ID_2926156; Annot_ID_139536

SEQ ID NO: 19407 - DNA, 3000 bp, Unknown; identical to SEQ ID NO: 8632
  misc_feature (1)..( 3000): 2750-1469P.txt file - cDNA_ID_1821756; gDNA_ID_1971822; Annot_ID_58353

SEQ ID NO: 19408 - DNA, 3000 bp, Unknown; identical to SEQ ID NO: 8632
  misc_feature (1)..( 3000): 2750-1469P.txt file - cDNA_ID_1821756; gDNA_ID_1971822; Annot_ID_176229

SEQ ID NO: 19409 - DNA, 3000 bp, Unknown; identical to SEQ ID NO: 8632
  misc_feature (1)..( 3000): 2750-1469P.txt file - cDNA_ID_1821756; gDNA_ID_2926156; Annot_ID_139534

SEQ ID NO: 19410 - DNA, 3000 bp, Unknown; identical to SEQ ID NO: 8632
  misc_feature (1)..( 3000): 2750-1469P.txt file - cDNA_ID_1821756; gDNA_ID_2926156; Annot_ID_198432

SEQ ID NO: 19411 - DNA, 3003 bp, Unknown
  misc_feature (1)..( 3003): 2750-1469P.txt file - cDNA_ID_1821770; gDNA_ID_1971822; Annot_ID_58348
cagttggtatgtttgcgaaatccttttgtgcctcatcacatttcattagtatcatgtgatcatgtcaaaagtctagctaaaccatggctaatacttcgtggctttgaatagtttaagacattttttctttctgttttgtcatctattggatcgctttgcaaatctttatagactaacatttaaaagaactgcagacatgtgggcagttggagcgatactagctgagctttacgctttaactccgttatttcctggtgaaaggtgaattcatttccctttcaaacgatactagctgagcttaatctgtgtgcacacttaagatagaccatttagtgaaaactgatataatgatttctttatgagtagtgagatagatcaattatacaaaatctgctgtgttcttggcaagccggactggaccacgttccctgaagcgaaaagcatatctcgaattatgagtattagtcacacagaggtaagagttcttaatgaaaagataagaggcttattatattaactgcacttcaatattgactttgttctttgaatatcttgtgacagtttccgcagacacgaattgctgatttacttcccaatgctgctcctgaagctattgatttgatcaatgtgagttcttgtgttcactctttttgcggatatttcttaccattcttaagaatgttgtgatctttcaatatctttatttcgtatatcatctgtttctttttttgaatcaacagcgactttgctcatgggatccattgaaacgaccaactgctgatgaggcactaaatcatccatttttcagtgtaatttgaatattcccttgcttcttttgattttatcacacactcctctctttgtaataatcgaaaatgtaatgatatattcggaacagatggctacgcaggcttcatatcctatccatgaccttgagctgaggcttgataatatgggtgaggctttatttttctttgttaatctgcttcgtatagtatgctttcatgaccataagattaagttcaattatatttgtggtattctgcagcggcgttgcctaatcttgagctaaatctctgggactttaacagagaacctgaagaatgttttcttggcttgacactagctgtgaaaccaagtgctcccaaactaggtaagtatcattccctcgtgtagagttggtcactagatctgacacaaattgacattgacattgagcatggtttcaaatattgtttgcagaaatgctccgcaatgtatctcaggacatgagcgaggtaagctcatacgcaatgaacgtcacttatatagcattgttaaacttttcatgagttgtaataaatctgttgtttacaaaagcagaattttctcttttgccccggggtcaacaatgatcgagaaccatcaggtgatgaaaacttgagcatatgttgataaaactgcagatttctgttatatttctctgtgaaaggttgttgaatatctctctttgaacatttacagttttctggtctctgctctctcctgatgaaaacggcctccacgcgccagttgaatcatctcctttatctttgtctttcaggtgagattacaagttgtctctatggatccattaatgtgtaaacagatttgcctaatgagaaacatttactgtgagcagtccaatgcagcaacacacagttggacctccacagtcgagtggcttcacaatgacatcatcaatgcaaccgaatatgttggaccgcccgtggatggccgtgtctgcgccgtttcaacaaagtcattacctctgatctaataaacccataccctagtaaaaaaagtaaataacacagaggtttgtcagaaagatttgagtttaaagaacaagatagcaaaacaaaacagaggaaaggtgttagaattttcattttttttgtcaccaatttgttcttaatttgtaaaaatttggtttggctgatgcattttcctctcagagcttgagctctatcaatatcgaacaaataatttccttattcttgtctctgtataatatatgataaaaaaagacattgaaatcttgatgtggcattaccataaagaattacgtttcattaatgttggttctgtcgtcttttaatataaaagtctttaacttgtgaatctgtcttatctacaagaaaatttaagactatatttattatgttaattacgatacttattttaatctatatttagtaaagcgaacaagtcctacaaacaaaccaaagatattgaaaaaaagtcactttggagatagaacagaatataaaaaagattctttaaatgatcttttatcaaaacaagattctaacaagtcttagaaatctcaaaacgaagaacaagtaagaagcttgtagccatgggtggtgatactttcaaagatggtaaattttttgatctttttctttgaactgtgtttgcatgtttgatttaacgaaaaataaattatttttaagatgttgtagatgaagaatcttcaagatcatcatcatcatctccttgttcttgttgtttcaggtatattattatttaatctttatcactaatttttgttgagtatgatcataatcataatcaagaaagtgatggtggttttttttttttttttttggtgtagcagtgatgatttagggtttaaggatgatgtttctgaagagaatttcaccaatttctctaatcatgttactgatttgagaaggagagaaaaagcttaccaagagattcttcaaagtcatgatcttttgcttagaaccagcaaacggaaacttagacaagccagaaatgagattttgaggtattttttatatatatttaaattcaattcatttagggaaaagttgtgtttgttctacttggtgatcatacaaactcaattatgtttttgactattattatggttgatatatgcatagctatactcctggatcatggtctgatgtcaagttgagtgattacaatattccaaaaacgacatcgatcatg

SEQ ID NO: 19412 - DNA, 3003 bp, Unknown; identical to SEQ ID NO: 19411
  misc_feature (1)..( 3003): 2750-1469P.txt file - cDNA_ID_1821770; gDNA_ID_2926156; Annot_ID_139529

SEQ ID NO: 19413 - DNA, 3003 bp, Unknown
  misc_feature (1)..( 3003): 2750-1469P.txt file - cDNA_ID_1821774; gDNA_ID_1971822; Annot_ID_58347
gtagtcactagcggtttctatatggatctcgttgctctgggaatctatggaaaatttgagtacagagaacacgccttttaagctagataatgtgattgagattatgtacgaaatgagagaatgaagaaaagagacgatggtggtgagagtagctcacaaaagaggaattattagtgatagttttaaattatttctctgtttttgtcgattggattggattgcagagtccactagattgcatgatgcatctcatatgtgaagtgtctctgattaagtgattattttgtgaagttagtgttctcatgtgtgtattttttttctgattaaaaggtaacattatctgtttttgtagtgtttttttcttttttttttcttttgtgatgcattcctgtatgtgtattctgtactcttttgatgataaatacgtggttatctgaatatgttctcagcatgttcaagttccggttccaacaccaaagagtaatgaggtttgcctgaaattagaagctactagtctaaaccctgttgattggaaaattcagaaaggaatgatccgcccatttctgccccgcaagttcccctgcattccaggtattctaatagctttgaagattttagtttctgtatagaagaaagaggttactttgcttagaggtcgttgagtttggaacctttgatatttgttttgaacagctactgatgttgctggagaggtcgttgaggttggatcaggagtaaaaaattttaaggctggtgacaaagttgtagcggttcttagccatctagtaagttttttcagacagacaagtagaaactttaattaccttgaaacatgttaagggaaactgattttgttctttcagggtggaggtggacttgctgagttcgctgttgcaaccgagaagctgactgtcaaaagacctcaagaagtgggagcagctgaagcagcagctttacctgtggcgggtctaaccgctctccaagctcttactaatcctgcggggttgaagctggatggtacaggcaagaaggcgaacatcctggtcacagcagcatctggtggggttggtcactatgcagtccagctggcaaaacttgcaaatgctcacgtaaccgctacatgtggtgcccggaacatagagtttgtcaaatcgttgggagcggatgaggttctcgactacaagactcccgagggagccgccctcaagagtccgtcgggtaaaaaatatgacgctgtggtccattgtgcaaacgggattccattttcggtattcgaaccaaatttgtcggaaaacgggaaggtgatagacatcacaccggggcctaatgcaatgtggacttatgcggttaagaaaataaccatgtcaaagaagcagttagtgccactcttgttgatcccaaaagctgagaatttggagtttatggtgaatctagtgaaagaagggaaagtgaagacagtgattgactcaaagcatcctttgagcaaagcggaggatgcttgggccaaaagtatcgatggtcatgctactgggaagatcattgtcgagccataagagcgttgtagccatctttgactgtctgtgaatgtgataatagatgttaaaagtttgcgtaccgtttacagaatgttttatgttgttttgtttaatatacccgagtatgtcgaaagttacatgaaaagaaaatttggatgaaataaataatacttgttaggtattttagttttaccataccgctgaagttgaaccgaaactgagcatggaatcgaataaaacagacccaacaacatcataaagcccaatagcccattaacgacttcgtcaattcccctatcttaaaaagactttctccagtagaatcttccggtaaataaaacaatagtcgaaggagatttccgtcatttcaaatggtaagaaaaccagaattatttaatatcactctcttaagggaccaccgttgccttccccaccacaaccaaccattttcctccatttttttctttttccttattaatattttaataataatacaaaaatcaataattatcttcttaaatatttaatttaattaattaattatgtatttcgttcttcttcttcttcttcaatttcttctttcttctcccatggcttcctaaacaatctgctattcctctctctcttcttcacctatagtttatctctttttttttgttttggcttctcttaaattcactttctctaaaacataaacgacattgatgtttcttcatcagatcctttaattcttctccaattctcattctccttacatcaatggtgagaatttttttttatagattatgtttttaattcttgtgttcatgtaagatttttttttttttttttttttgtgttttattgttttcttaattccgattggatttgttttttgtttatttttctcaattttatctcaatttcttggacaaattgatctttttttactctacaaataaataaagtttgagactttatagcagaatcttcatatgtagcaattgaagatttttttttcttttctaaaccgatctaaatagattaaatcatcattattgaaaacaaaagattttgtttttattttgattaaatcctttttttttttttttttttttgcagataaactttgtagttggagatttgttgtggatgaagattattgattgcagcttataggaagctgctctttttgttttgaacaatgttgctaacttttcagattcttataattaatcagtcttatgatgagaagttggttcttgattacatactacaatcaagaagtaaacagtttatgcaatcttgtgacggttcttgtgttcaaagagtagatacttgttcttcaaggtggaggttaacagaggacaattgacggggtttttaatcgttgttgtattgctcgaataaacggaatcatggaaaggtttgttcttgttctgttcttgttgttgtttgtatatatattggacatggtgagaaagtgatg

SEQ ID NO: 19414 - DNA, 3003 bp, Unknown; identical to SEQ ID NO: 19413
  misc_feature (1)..( 3003): 2750-1469P.txt file - cDNA_ID_1821774; gDNA_ID_2926156; Annot_ID_139528

SEQ ID NO: 19415 - DNA, 3003 bp, Unknown
  misc_feature (1)..( 3003): 2750-1469P.txt file - cDNA_ID_1821810; gDNA_ID_1620662; Annot_ID_47996
aacttatgagaagcaaggagatacaaaagagataaagcaaaccctagtttttgaagattgatctgattcaagaatcgatcaaacaaaaccctcaattaaattgactcgtgtgaagaatggaggagaagctttaagagatgaaatcgtttaccgattttagaaagtcgattgtctcactgagacaaaaaaagagaggctttttatttttaatccgataacgagttaaaccaaagtgaactgagtcaaaacgtttccgatcatgtatacgtggcacattttcattggaagagatgattggttgttttgcatttttttttttcttgttctctcccttgaagttgaagagtttaacttcgctaagaggaacagagatggacttgagtttaatatgttctctgtttctaacaaatgtttttttttttgagttttcacatacaataaaaaatattaaaagttaattataatttataaatgcattattatttgtaatttacgatttaccattttctataaccttaattaatatagtatacaattatttttcttgaaatttataattcatcaataataactaataactattgcattggaaccaatttttttcctaaatatattatttaggaatagaggagtagttgtttttggcaaaatggtagattattataaatctaaagtggtagcagttaaatttgaaaaagatggatggcatagtaactaaaaattatttaccacaataccttaaaaaactatgaagaattgattaattaactaacagactaattaaaacccatatttgtcctttgaaattataattttaaataattttacgaaacctatttaagattacataatattttttttataaacaataacaccttttaaaattattaaaacttattcactatccagtttcctagtttttatatattttgaagcaataatgttgtgcttaaaatatatgacatcatagtgacaaaagagtttatttgtgaaatctcaatcactcattttgaaatgccattaatccgtttagtttccatattattaccaaagcctttcatgtaattggaaacttttgtgtttaagacttaatcttgtgttgcaggagccaaaagaaaaagaaaaaaacaaaaacaaagaaattgtaaagaagtgtaactagaaaaatcgatcactcatcttcaaatgtcattatccatcaagttgtcatattattgctagacagaagtggtcgtctagacttagttgacctgaaaaaagaatagtcaaagtcttttatatgtggacctgaaattagactttgtagtttgtacgtaagtttgtgttgctagagcctatatgagaaaaaaaaaacagtggatattggtgattggtttaatctggttaactccggttatctagatactggtttaatatcatttatcttgtgtatatataaactaaactttagtttattttgttgatgaacgttgtaacaaacacttaattctgttaataaagattcagtttaatctccgatcttttctcttcttttccgttttaccggaacttcgccggtgttaatatggtatcagagcatatcatttgagcttccgcatatcatcggagatgagtctttcattgaatcatctttctcttatgagagtttttcgattcctacaatcgtttgttgcaatttgcaatttcttcgtcagctatctaattttggttctgattcttcttctttccttcgattgaccttttgtggtgacgaatctcactttcttttcatttcgtctcactttctttgatttttctttaacaatttgttaagaatgggttctatgaacaatccgttgaattcttcaagtcttcgtccacctccagctagtgttcctgaacaatcgcgatatcaagctgatcaatatgagaatccgcatcatttgcatacgagtgaccacgcaggtttggttctagtctcagaacgccttaatacagcttcagatttccattcttggcgaagatctatttggatggcattgaatgttaggaataagcttggattcatagatggaacgattgtgaaaccaccattagatcatcgtgattatggtgcttggtctcgttgtaatgatactgtgtctacttggttgatgaactctgtgtcaaagaaaataggccagagtctccttttcattccaactgctgaaggaatttggaagaatatgttgtctaggtttaagcaggatgatgctcctagagtgtatgatatagaacagagacttagcaagattgagcaaggttctatggatattagtgcttactatactgaattgcagacactttgggaagaacataagaattatgtggatcttccagtgtgcacttgtggtcgttgtgagtgtgatgctgcagttaaatgggaaagattacagcagcgaagtcatgttactaagttcttgatgggtttgaatgagagttatgaacaaactcgtaggcatattttgatgctaaaaccgatacgtacaattgaagaagctttcaatattgttactcaagatgagagacagaaagccatacgtcctactcctaaagttgataatgtggcgtttcagactgtttcttataacagtggtgatccttatatggagaatatggaaaatggattcattgcggcttataatacagcaagaccagctcaaattacctctgtgtactaactgtggaaaggttggtcatactgtgcagaagtgttacaaaatcattggctatcctcctggctataaggcagctacatcatacaggcaacctcaaatacaaactcagcctagaatgcagatgccacaacaatctcaaccaaggatgcaacaacctgtagcagcacaaatgcagacaaacatgccaaatacaggaccaatgcagatgatcccttatgcaaatcaaatgcagatggttccatactcgaattcaatgcagatggcgaatgctgcttatgctgaataaggttcttttgttccaatgatg

SEQ ID NO: 19416 - DNA, 3003 bp, Unknown; identical to SEQ ID NO: 19415
  misc_feature (1)..( 3003): 2750-1469P.txt file - cDNA_ID_1821810; gDNA_ID_2926151; Annot_ID_139330

SEQ ID NO: 19417 - DNA, 3003 bp, Unknown
  misc_feature (1)..( 3003): 2750-1469P.txt file - cDNA_ID_1821821; gDNA_ID_1621151; Annot_ID_56883
ggaactcaaacatagtcttctgagagtgatatatagagttttctgatcatcttcaagtgtgaaagtaacttgtcaagagtcttgttgaatcttagttgtgtgtgtattgtggtgtggacaggttttaatgagacgacagatgcgtgttgtgggctagggaggtacaaaggatggcttccatgcatctcgccggagatggcttgctctgacgcctccggtcacctctggtgggaccagtttcatcctacagacgccgttaacgccattctagccgacaatgtatggaatggtcgccacgtggacatgtgttaccctactaacctagaaactatgcttcattcttaaatcagctgagaggataaaaatgtacataaaaaacatagtaaattgtaaatgaactttgcaattttgatgtttggtccatggtacataaaggaaaactataggtcttttatgctaaagaaagaaagtacggggttagagaagaaaaaggataaatgttttacaaagttgggctcaatgtatttacgtaaatggcccacatgaaacagaaagttaagagattcgacccataaaaagcacgtgtggtttataaatggaaaatttcatcttcagggagacgaagacataatttcaattcttttctcatcaaagtttctaaaacaaaaatcttggcctaaagaggtgacgtcatctccaccctctcgtaatttttccaattttgcccttggaagctgcttcgccttttttttcaatttcatcaagggttctgagatttttttctctcagcttcttcgtaggtttttgatccgaggtaggtaggctttgggtttacaaaaatttcgcctcgattttttgttctcacgcgtcgttcttgttacaggaaatcgatttcatctctgatcatctttgtgacgaaggaaatggagctcgattttgacgctagtaacttggttgaagatgaagctgttgaagttgaacataatgttagtgtaaaattgtactttctgggctatttttcttttggttgaactaatcatgggtttacctttttcatttcgagcctggagctttaaaacttgtaatttccggtgaaaatggttgtttatgtagctttatagttagaatcatgaacataagttgctatgtcaaccatttcatttagtttgtgtcacgtttcctggaacatatgtggtttttaatctcaaggatgagattttaataaactgtgtttgtgcattattgcttctcagtgttgattttaatttctttgaacagggtatgactgaaattgaaggggaaagatgtggaatttgcatggatataattattgatagaggcgttcttgattgctgtcagcactggtaaaagcttgttttcgcttttcattgtctttaaatattgcaaagttgctatgggtgtttgttaaggagcagtctggtaatttgtgtctatgtctgttaaatttcaggttctgctttgaatgcattgataattggtctacgattatgaacctctgccctctatgtcagagagagtttcagttgattacatgtgtccctgtaagatgtctcatatttgttttttgttttgttttatctgaacatttgtcatgatttttgtaagtagaacttttgagtttaggaataatgagtttttgttttgattatgaaggtgtttgattcaggtgaaagcagcaaggtcgatgaggatttggtatcagggtactatttttttccttgtgtttgttgttgtgataaagtttgcttgcctgaactatctgagcggtctctttgtcctcaattatttgtggcctataatgataaatttatattaagtggcatagtataatcaagtgatttaaaatgtgatagatgtcatgtgtaccatatgtttctgtatttgctaaaaactgttgtgatctgctgacgttaaactaagcaatacatgcagagatgaagattgctgcattgaggaggagactgatgtcgtctcttctccgtcacactatattgacgatacacactatattgatgaaaatgtaagtatatcatatatgggttttcctagttactacaaagtacattaagctttcctaatcattttgtaggcagttgtctgtttagatggagatctttgcaagattcgtaacactttcagttacattgaaggggattcaaaccttgatacatcaattgcttgtgattcgtgtgatatgtggtaactattattacctgttgactttatctatggtttttttttttgtacattgtcgtgattgttgtttttacctcttttttctatcactaattcattgctggtgaacttctggagcttgccttgttgttacagtgccataatgtttgtgtctaccatgcttttagatggattttgtgtctaaagcttagttgtgctaccggtttctaaatgctatcactatcagtctatcacatgaaggaattttgtaatatgaaatgtaaatggcaaagatactagccttttcaatcttttatatgtacttgcttttgtgtacttcgtattgttttagattgttcatcattacagcattctttcaaattagcttctgactgttgctttcaactgtgctaacaggtatcatgctatttgtgtgggttttgacgtggaaaatgcatctgaggatacatgggtatgtccgaggtaggtttcgttggcgtattgactacctatgattgcttaatccatggtttgatcaacttcagcaccgttgtttcattatattgtttctttaattattagcctattaggcaaaaatatttttatattagagtttccataaaattattttaatctttatctagtaaagacactttgtaccaattctaagtgaaacctaatgcctatacatattattcttcctttctctatcttatttagccatcttgtcatagtttccctccttggttttgtgtccacagatgtctctctaatgaaaaaccacatgaacccgatacctcgccaatg

SEQ ID NO: 19418 - DNA, 3000 bp, Unknown; identical to SEQ ID NO: 3756
  misc_feature (1)..( 3000): 2750-1469P.txt file - cDNA_ID_1821821; gDNA_ID_1620662; Annot_ID_47990

SEQ ID NO: 19419 - DNA, 3000 bp, Unknown; identical to SEQ ID NO: 3756
  misc_feature (1)..( 3000): 2750-1469P.txt file - cDNA_ID_1821821; gDNA_ID_2926151; Annot_ID_139324

SEQ ID NO: 19420 - DNA, 3003 bp, Unknown
  misc_feature (1)..( 3003): 2750-1469P.txt file - cDNA_ID_1821837; gDNA_ID_1620662; Annot_ID_47982
tcagctactatgtgacttgtatgacaaatacagtcgaaacttaatatgatattcggtacccaaatgacaaaaacccacgtacatcaaaagcagagaggctttataagaaatctatgactatcaattttattttttcccataaattatatgcatggtagaaatattatgaaatgagtttccttaactatggttggcaactaaaaatgtctttagtgacaaaaatatgcaacttttctacaaactgcaaatattagtttagattaaatcaaacaaatcatgccttcaaaaatctgtaaaacaaatctttttatttttaacgccggtggcaccatagacgaaatcgacaattttgaaggttggagttggatttgtctgaattttttttttattggaatttggaaagcagctgaaagatgactaaatgcgcagcaaaactcttcattcaggcttggcgtaacttgaatttgttttctttcttctatttttttagtttcattctagtttccgatcaagtcttatggttaaaatactcaattatatactcatcatttaggcatcgaaaacggtcctaacaaaacaccaaacatatattcctaggctttcacgtgtttaattcttacccgcatgatacatttccctcaaatggattgacataatgctattgttgttaactttttgtttgacacaaaatctatctagcaaattttttatagttatagatttaatatacgcaatgttagcttgattttgtttctaacttaaggaaaagttgaaggatgttttaatttgcaaggttctctttcaaaaagatttcgtgtaaattcgacaacggcctcaaacctactctaatcctgactctaaataatattataggttgaaagctttgtaattattgtttactaaaataagagaagaaaacattattacttactctcctttagaaatatatgtttgcattatgctgtatatatagatgaataaatgccataaacgtttaaatgtgtgttggtagatgtcattttacttcattcttagaggtctcttctatcaaatttagttacgtatataaatatagatgtcttgtgctttcttgcaaggaaataaacagagataatatactatttcatacacatccacacacatatagatgtctttttgtttgttgcatggatgtagacatacatccattcacatttccaagtatatacactaacctaatgacctaatgttcttgagagagacttctttcacaacctcttctagaatgtgagtttcttatatttttgttggtataaagtatttgaacatctttatcaaaagttaaaatgtttgaccatattcttggtaattcaaccggtaagtaaatgttattcttctatgacagaacccttaattttgcctgttgtatactagaggtttggttgggtgaaaagtgggcatgataaaaagaacaacatttagttttcctccttgatttttctaaattagagtttcgtatcaaaatacctaaaaaagcttgttttgtggtgcttccaatttcgaaatcggctaaactttttccacatgatttcttcttttacgatagtaagatttagaagaaaataaaaactgaataacgtcagattttccttaataaaagaagaagaaaaatctcacaacattttaagttcctttatttttttgatatgtgccctaataaatgcagtgaaataagctcacaacaaaagatgcacaacgagataaagccaaatgaaatttagtactggtatacaaattttaatgacacgttaatactctttttcgttttggttttataatcgtacttaatattcataactagcttcgaatctggtatttgtatacttaaaaagcttacatcagccaatctactatcattgaaattgtagtgagaaaatctaatataattctttagtgactgtttgtcaaaaaaaaaaaaaactcatgtctaaagtacataacaaattcaaattttgatacaaaattagttatttgtatttgttgtgaccatttctattctacattttgtttgattattagttgaattattcttagttaaatagagcaaacaaattaaattaaatgatttcttaatctataattactgtaaatacttcaaacatcttttaaatagaaacaaataaaataattactaagacatttgtccttatataagtctaataaatgtgtgttttaattcaatacctccaaaaataatttcaaaaaactagagttactgaattggtgctttcacacggtgcatgcattgtattcacacctatatgcatgtcatatattcatggtctctatgatctcgctctatataaacaccacccaatcgaccaaccttcttctctgattattttctcaaattatttaattaatttcttcttcttcatcaccaccaattacactcaaaattatggtgtttgcacatttgaaccttcttcggaagattgtggggattataggttagtccagaattttgacatctacaagttattatatctatcatgatttttttgtcccttcttcttaactttggatgatcttgtttgcaggaaacttcatcgctctatgtctgttcttgtcaccaacgtaagtattttgctatatctatgatttaaataaaattccagaaacaatgaaagatacgtgaaaaagagattcataaaaacgaaaatcgtatttcttaaagaaaaccaaacttgtttcatgaatttaacacatgcatggttcatcctgactactgaaagatctgaaattttttgtttttcattctcactgcagctttcaaaattttctttgtgtagtataatcacaatgtgaaaattgatacttttttcctcataatataatgttttttcctattatactaattgataacaattaagaaagtttatttatgtaatagagtttcttccaaaacaagagaaaaactaaaagtatgtatcatcaataaatgactaatacttttaataaatg

SEQ ID NO: 19421 - DNA, 3003 bp, Unknown; identical to SEQ ID NO: 19420
  misc_feature (1)..( 3003): 2750-1469P.txt file - cDNA_ID_1821837; gDNA_ID_2926151; Annot_ID_139316

SEQ ID NO: 19422 - DNA, 3003 bp, Unknown
  misc_feature (1)..( 3003): 2750-1469P.txt file - cDNA_ID_1821868; gDNA_ID_1971821; Annot_ID_58327
aattcatatattataagtcaaagctttgtttatacataaatctatcttatttacacaaatcagcttcgtttgatccaactaacatgtattaagtattaacattagtagaattctctgaacataacttaaaatcaaaacttgtatctactaattatgggaaaatagtctcaaattgaatctgaaaaagaattgcaaatttttaagaaaaataaagaaactaaacatcaaagtgttggtgtgttgtgttaatttgacttcttttttctctgttagcaaaccattgagcagtttttctagcgatcggcagccacaaacgccgtcttctctcctccgtctcattcccaccgttttgtaacgcagacgcagtctctgcggctgaaccgctgcaatctccatgaatcgatatactgagtctaggaaccgcagtgatgtcagacaccgatcttcgtcctggttcgatcataacgcttcttgatttcgaaccagagtctccgttttccgaggaaaacatagttgtcatcgaagttaacttgttctccaacattctcttcgcttccatctcttccttgattcgcaagatacctatctgatcctcttcatctcctctcttcacatgatccaatgaagaaaatctctcgctagaaatcgaattaaccatctcggaattcaaaaacatcaaatctgatgaactcacgttgctccaacgattcttgaaaacaacatccgacacaacgatcctatgattgaacttgtgcataagcttcttctcatctttatcgttcacgtgttcatcaagtaacgttttttctttattacctaatttcagaatcttccggaaactctctccgatgctgaatctcgacgacccactaagttcttctctgtgtattctttcttcttcttcttctctctcgatgtaaagctccaagctcgaatcttctctaatctcagactgattcaagaacctgaaactgtttccgttagtgagaacagaggaatcttcttccattgagactctatctctgcaaagaggacaagttgcgtgttgctcaagccactgatcgatacatccgatgtggaaagcgtgtctacacttaggcaacaatctaagaatctcaacactttcgaatttagacaaacagacagaacaatcaagaccttgttttgatcctttcaaagcagagaatctaaacagaggaagagactcgattgctgttttgtctaaaccagagaatcgatccgatgatgccgttgaccggttaaagaatattccttgtctgagccggcgatcgtgccttcttctgtcgccggaacctgatcggagatcgatgtggcagcacttagcgtagacgaggaggacgaaagtgagtgcgaacatgatggcgagaactccggtgacgacggctaaactcggctcaaaatttgcgacgaggtcaccgtttctgaacggaggaggagtctgggcagaggcataactgtggaggagaggaagaaagaaaaagaagatttgatacatcggagcgttcgagagaaactttgtttcttgatattcttgggtttgaaatagttttattggagatgaaaatgagattatgttagagaaagtgatatttttcggtgtatgctataaactaatacaattacgtcatatacgtgacaacaatttgtatgctattgctttttatctatgctctatttgtcttctactattctctccatttaattaaatacaattttatctttcggtgggctgttattctccgacctcatttttgatgatacttaggactacaatatatatggaacttatttatcattttataaagttacaacttgcgtcacacatttggagtgatatttttgtttagtttttggtctgcgaactattaaaaaaaactacatatataaccaaatctcttttcaattcggttccatatattttttgtcatatggtttaggttatgctatttaacaaaattattttgacgttacttgacttatttatgtctgctcttccttttttatccatacacagtgaatcacatacaaattttgaatacacaatgaatcacaaatatacatatcttgatcgttctctcgagtcattttggtttgattgatgttaaaacaagtatttatataaccgcatgataagctaaagtcgaaattaattactttccaaaacatgtgaacgtccaaccataactaaatctcaataggaggattcgtaccatggttttctaacttcacggtaagtgttttcaagttttcaaccatgaacaaacttgattttttttttttttttttttgtatgaggttatgagaagtcgtttactctccaattatggtttcataatgaatattttcgtttaataaaaactaaaaaggaatgccatggttgtacctagaactactagtttattatttgtgacaaagctactaagtatacttgctagtaataaccatgacaatgttatattataaatgttaatgaatcgtgacagattaactaagaaaaagtcaacgaccagctgcacaaaattccggtgcggcaaaataaagtcaaagttgcattactcatgattggcttcgatgctttactatttgtgaatcagagagaacctcctctacaatcagaaactttgctttctgcgaatggacctgcaacactcaacaatactttgggcctcagtcaaagtgtcaagcccatcaacctcaagtcttctctaccttgcaacggtaacaagattcctcaatttccagcgcatcaacgtacgggattcacagctaatcatttgtcccttcataacaaatttgatcctctttgttcctctgtcgtgatgtgcagctaatgacgtgtgacctagtgtctcaccattttggggttcatatataaactcttctctgtcattgtaaaccttaagctgaaatattcaataaagagatttctcttcatcatcgttttatcaatactttcatggtatcagagctcagtcgaaaatg

SEQ ID NO: 19423 - DNA, 3003 bp, Unknown; identical to SEQ ID NO: 19422
  misc_feature (1)..( 3003): 2750-1469P.txt file - cDNA_ID_1821868; gDNA_ID_2926193; Annot_ID_141165

SEQ ID NO: 19424 - DNA, 3000 bp, Unknown; identical to SEQ ID NO: 3772
  misc_feature (1)..( 3000): 2750-1469P.txt file - cDNA_ID_1821876; gDNA_ID_1620664; Annot_ID_48028

SEQ ID NO: 19425 - DNA, 3000 bp, Unknown; identical to SEQ ID NO: 3772
  misc_feature (1)..( 3000): 2750-1469P.txt file - cDNA_ID_1821876; gDNA_ID_1620677; Annot_ID_164271

SEQ ID NO: 19426 - DNA, 3000 bp, Unknown; identical to SEQ ID NO: 3772
  misc_feature (1)..( 3000): 2750-1469P.txt file - cDNA_ID_1821876; gDNA_ID_1620664; Annot_ID_163883

SEQ ID NO: 19427 - DNA, 3000 bp, Unknown
  misc_feature (1)..( 3000): 2750-1469P.txt file - cDNA_ID_1821876; gDNA_ID_2926203; Annot_ID_141615
tttattagcaaagagccattgacgacaccagcggtgaagtatgaaacatcaattttaatagcaaggcatgccatccttttctatcacatattttatcataaaaaatcgtgggaattgaaccgttacatatagacatagatttgacagcccaatcacatatcacagacacgaatacatataactagctaggttccctcaactattcatttgacttctgaaaaatggtcatctctcgagttctagttaatacaagcctatgatcataattagggcatatggactataatccatcagttgtattctgtctatggtagtcaaattgtaaggcctgatctttgggttttgcaaactatttactagaattgtctagcattttttcctatgatgtaggataaatcacccttataaagggattaaaacgtttcagaaacgtttggaaactaaactacaaagggattcagtaatttattcaatgcttatttcgaacaatgatgatagcattaagatcttacagccgattaaatttgcccaaacaatgatgatagcattaagtttttaatcgatatgtcttcgatttacattgtctattgtatacttacaaacttttatgccatatgaactgttttcttatattaaagattgaaaatgttttatggggaagaagattacatgattggataggaatcttgaatatctctacaaaaacggccttgtttctaatcaatctatgccaaagtcaatccgttttttataacccaaattagctataaaacctactgctatataaactggatgcaacgggacaaccaaatgcattatgtagttttccacttatcgaagaaatgaaattgataatgtgagacttctgtagcagaaagctcatcatgatcaagccttataaaacatttcaaaatctaattcataatgaaaatttgcctagccatttaactagctagggccattaggcccaatgtccaaatagcctgaacgctgggaaaaagtggggctttcggaacagaacaaataaaatttgacgcactttattgtgttgcaagctacttcttgaagtatatattttgattctcgaaacgtcttcagttctgtacaaatttaaatattctattgaaaaagaaatcttggtcgtcgtcgtcgaatcggatacgttaacgttacgacatacgagtcaccattagggccgtagacgaaatactaggagacgcatgaaggtcacgtgtatcaccgttgcagcacataagttttcacctctcagtattgaacatgcgccgtatttcaatttcaagcttataagaatattattttctgttttgtctcgtcacgtagaagaacactcaacacaacgggtcatataaaaacaatcaattgaccaattgaaacacttaccattagctttactaaaacaaaaagtgctacagctcaattatttcgacgtactttttttttttttttttttggtcttttgtggcctatttcgacgttctttaaaaccacgatcatagtggtttgggatatagtaattaatttcatgtgtttaaccaaaaggtaggaaaagtaattaattattagttgttgagaaatcaagttgcaaaggagattaccggcgactccgttggtttatgaaacaaacaatgagacggtttagaatgacggtggccccaatattttaggtctgctcatattattttgaatgatttaattttttttatttaaataaggtacccttatatacataaatgatttaatttagtaaaagcttttgtttatattgcttttatacaagtttttgggtatgactattttaacctcaatcctcaaaactataaaatctattattgcacgcttggattttatatatatatattcaatctataagaactaaaaaataaaagtgatcatagtcaaataatttttgcataaatacttaatattgctacccaaaaaaaagaaaattgcataaatttatgtataattacattatgaaaaattattgatatgttgatatacagttttctaggaaatatcaatatgaaaagaaaaaaagaaaaaaaaacattgtaagctatttcccttgaattacactatatgtatgtgtgacagtatatatgtgtgagcttaatcatataattaccgtaacatcactattgatcttgaaagttacgacgacaaaaacaagattccatcatagatctacgtgtatcttttgtgtgattagtatataaccaaagcgattaagtgaatttaaaatttgtagatatttcttacttaactgattatactataagaagcaaaccccaaaaccatctgcatctcaacgacgataatcgtccgaatatgtttttctaatagagtttgctgaccaaatgcaaatggcatcacgtctcttgccgtttgacgctagcaattacacttcttcattgaaactttaaaagtgaacccaaagaattaactcaataataactgatgagtatacaaattattgtttccggctaaaaacctgaaattaactcaaatttggaatggggatattataactttgttcccacgtataacaaattagttcataattaagaggagaatcacaaaaataactgatgtattgatgttcaattttggaaaattaagatatttccaatggtaataatctgttacagccttactgggagtagtatgatactaaaacagtaaatgcattttagaccgacataaacaataattaagaagaagaatgtttgggtcaaatctcaaagttagatattatttttttgctttttgcacaagaaaacagaaaccaaaaaccactagtcaaaaaaccacccatgtattcctcctagtctctaatccaacaactatataaaaacctctcccattctcattttgttactcatcccaaaaataaaaagagtatatctctcacacacatacacaaacttgacagttttttaatttctctgttagtgaactcaaaccttcccatttccaatg

SEQ ID NO: 19428 - DNA, 3000 bp, Unknown; identical to SEQ ID NO: 19427
  misc_feature (1)..( 3000): 2750-1469P.txt file - cDNA_ID_1821876; gDNA_ID_2926203; Annot_ID_202007

SEQ ID NO: 19429 - DNA, 3000 bp, Unknown; identical to SEQ ID NO: 3774
  misc_feature (1)..( 3000): 2750-1469P.txt file - cDNA_ID_1821880; gDNA_ID_1620664; Annot_ID_48026

SEQ ID NO: 19430 - DNA, 3000 bp, Unknown; identical to SEQ ID NO: 3774
  misc_feature (1)..( 3000): 2750-1469P.txt file - cDNA_ID_1821880; gDNA_ID_1620677; Annot_ID_164269

SEQ ID NO: 19431 - DNA, 3000 bp, Unknown; identical to SEQ ID NO: 3774
  misc_feature (1)..( 3000): 2750-1469P.txt file - cDNA_ID_1821880; gDNA_ID_1620664; Annot_ID_163881

SEQ ID NO: 19432 - DNA, 3000 bp, Unknown; identical to SEQ ID NO: 3774
  misc_feature (1)..( 3000): 2750-1469P.txt file - cDNA_ID_1821880; gDNA_ID_2926203; Annot_ID_141613

SEQ ID NO: 19433 - DNA, 3000 bp, Unknown; identical to SEQ ID NO: 3774
  misc_feature (1)..( 3000): 2750-1469P.txt file - cDNA_ID_1821880; gDNA_ID_2926203; Annot_ID_202005

SEQ ID NO: 19434 - DNA, 3003 bp, Unknown
  misc_feature (1)..( 3003): 2750-1469P.txt file - cDNA_ID_1821883; gDNA_ID_1620664; Annot_ID_48024
tcaagtatctgaatacaaaaatataagggtatcatcaattgattttgtgcatcgacactatacaaggaaattatataaacggattggtttgactaagtcacataacgtcaaaatatattaacacacacacacacaccaaaaaaaaaaaatgtttccacaatgcgtttaagtcgtcatttgtatctttggaagaaaacttaaataatagtatgatattttagaattatcttattttttcgttttcatattaataatgttttggtagaatgaacatgaagtagtactatatataatagttacgaagataacattaaataattacttaaacaagcaataaaataaattttattatttttttcaataacaaaatctatatagtgattagcaactaactaaacttggcattgtaaaactttatagttgattactataacaactctaaaacagcttatgcaagtcatgtacagttattagaattcatccaattgacttggctacattgtatatgaatgaagtcaactgcatttgaaataaataaatcttattagcattaaagaactcaaaacttaaaagtcagagcttacgaaaaacaaagtcaaagtcaaaaaacatatgaagaaaagaaaaaggtcgtttacctgagaaacaacaacgtgcctcacaccactgtccaagcctacgtccccgtggccgtggctgtggccgtgtccatgaccggaaacaccacttctcttagagagagcctcaaaaccttcggcacccatggagaggctatgacggtgatgctccgcgtgagcccgcatccccacgatatgcaacgcccctccatcttcttgatctctcagaaaacccgattcaagacctgggtcagacataaccgaaacttgcgtaccaagcgactcgacggactggttcatcatcttctcctgtttcctctcgtagtatcccgtgatcatgaaatccgcgagcagagtaagaagcgccgcgaccatggcgaagaattctggaaaagggaacattttccatggaaactccggcagacatgggtcggacaaagctttggatccgcccgagagcatgtgaacgaaccctgttgcgaggataactcctgctgcgaacgctttggctcccctcattaagccaccgtttaacggaagtagggttccaactagaggaatcgagactccggcagctccggagataaggatcgacgccatagctgcgaacttgagggtaagagcagctgcgtcatctcggcacgggtctgagtcgcccgagtcacagctagttgtgaacgactctgttttgttacatgcaaaaataaattgagttaactttgctaagaaaatctcaaaatttgcatttaagtgtgtttaagagcgaaatgaagtaattgctttgagatttgaagtgacaatacctgtcaaaccagatgataatggtcgaagaaactgccaaaaatcctgaaaacattatgaggcaaaattatgtgaggaaacaggattgaagaagcaaaataacattaaatagatgaagtggaagaagtttcagacctgtaagagagacatttactaaatccgattaggcgattaaacttgtagaattatataaattattgccaaggaaaccagcaagctaagtatatatgggttattaatattatggagttgtctgtgtgttttataaagaaagattgggagaatgtcaatcagtgcgagggtttgtgtgtgcgtgcacgtacgttaacaaggtcacatgaggttcacgggaatcaaatgaccatagaatgtcgtcattttcatctagtaccctcattgacaagaatattaaagtttggaagataataactacgagaaaacaaatatagaattagagatgagatgtatgagaatgttttgttataattgaagtctttgttcgtatcttgcatcagaagtatgactcttgtttggtcaacttgcagaaaaatgactattacaatgcgaaatactagtaatgttttgcgtcttaataaaatttcattcaaaagattatgtaagttaggtttgcattttacagttgattttgtttttctcctatctcatgattctctgttttaataattaaaagttaaaatttagaaaatagccacaaacatattcaaaaagtatatatttgggccaaccggcccagtaagggaagaatgttccttaagttgcctaaatgagcgactgagaaactggcccacaaaggccggacctgtatcattcacaaccggaaaactttaaaactaataaaccaacgttcttaaaaaagcgacactttgggccataatttgttgggaagggaataagtaagaatatgctttgggcatatctgatgatttatatctgtctcatctcatctctcatcgttccgggagaagagaagagagacccatccctcacttcaaagttcaaagtctcgaaggatcttctccaactctctctaaacaagattccaaattttcaaaggtaagcaatcgtttcttctaatgaatttcatttctccggttttgtaagttgagtgatttcgttttgaagaaactctgaatatgataggaaatcaaaattcacagagttttcattcagttgggttttctctgaatttcatcaatgtacttctttcttacatttactttagttgatcaaataaatatccagtctttgacaatagctgattttcagattcgataaaagacttcaaatttcgtgtgttttgattcttctcttgttatggacgtagctgatttaggggggggggtgtgaagataaagtttcgatttctattcatgtctttttggattttgatttgaatttgaagttaaactagagaaaatcagctgaatccttacttgttatatggtatgaaacatctacttgatatgtcttgttctgctgaaccaaattatgtcttgaaatcttagctgcttttgtttttgcaggtgaatttgtttgatagaatcaagaacaaacctttaaaatg

SEQ ID NO: 19435 - DNA, 3003 bp, Unknown; identical to SEQ ID NO: 19434
  misc_feature (1)..( 3003): 2750-1469P.txt file - cDNA_ID_1821883; gDNA_ID_1620677; Annot_ID_164266

SEQ ID NO: 19436 - DNA, 3003 bp, Unknown; identical to SEQ ID NO: 19434
  misc_feature (1)..( 3003): 2750-1469P.txt file - cDNA_ID_1821883; gDNA_ID_1620664; Annot_ID_163878

SEQ ID NO: 19437 - DNA, 3003 bp, Unknown; identical to SEQ ID NO: 19434
  misc_feature (1)..( 3003): 2750-1469P.txt file - cDNA_ID_1821883; gDNA_ID_2926203; Annot_ID_141611

SEQ ID NO: 19438 - DNA, 3003 bp, Unknown; identical to SEQ ID NO: 19434
  misc_feature (1)..( 3003): 2750-1469P.txt file - cDNA_ID_1821883; gDNA_ID_2926203; Annot_ID_202002

SEQ ID NO: 19439 - DNA, 3000 bp, Unknown; identical to SEQ ID NO: 3779
  misc_feature (1)..( 3000): 2750-1469P.txt file - cDNA_ID_1821891; gDNA_ID_1620664; Annot_ID_48022

SEQ ID NO: 19440 - DNA, 3000 bp, Unknown; identical to SEQ ID NO: 3765
  misc_feature (1)..( 3000): 2750-1469P.txt file - cDNA_ID_1821891; gDNA_ID_1620664; Annot_ID_163875

SEQ ID NO: 19441 - DNA, 3000 bp, Unknown; identical to SEQ ID NO: 3779
  misc_feature (1)..( 3000): 2750-1469P.txt file - cDNA_ID_1821891; gDNA_ID_2926203; Annot_ID_141609

SEQ ID NO: 19442 - DNA, 3000 bp, Unknown; identical to SEQ ID NO: 3765
  misc_feature (1)..( 3000): 2750-1469P.txt file - cDNA_ID_1821891; gDNA_ID_2926203; Annot_ID_201999

SEQ ID NO: 19443 - DNA, 3000 bp, Unknown; identical to SEQ ID NO: 3768
  misc_feature (1)..( 3000): 2750-1469P.txt file - cDNA_ID_1821909; gDNA_ID_1620664; Annot_ID_48017

SEQ ID NO: 19444 - DNA, 3000 bp, Unknown; identical to SEQ ID NO: 3768
  misc_feature (1)..( 3000): 2750-1469P.txt file - cDNA_ID_1821909; gDNA_ID_1620664; Annot_ID_163871

SEQ ID NO: 19445 - DNA, 3000 bp, Unknown; identical to SEQ ID NO: 3768
  misc_feature (1)..( 3000): 2750-1469P.txt file - cDNA_ID_1821909; gDNA_ID_2926203; Annot_ID_141605

SEQ ID NO: 19446 - DNA, 3000 bp, Unknown; identical to SEQ ID NO: 3768
  misc_feature (1)..( 3000): 2750-1469P.txt file - cDNA_ID_1821909; gDNA_ID_2926203; Annot_ID_201995

SEQ ID NO: 19447 - DNA, 3000 bp, Unknown; identical to SEQ ID NO: 3762
  misc_feature (1)..( 3000): 2750-1469P.txt file - cDNA_ID_1821917; gDNA_ID_1620664; Annot_ID_48015

SEQ ID NO: 19448 - DNA, 3000 bp, Unknown; identical to SEQ ID NO: 3762
  misc_feature (1)..( 3000): 2750-1469P.txt file - cDNA_ID_1821917; gDNA_ID_1620664; Annot_ID_163869

SEQ ID NO: 19449 - DNA, 3000 bp, Unknown; identical to SEQ ID NO: 3762
  misc_feature (1)..( 3000): 2750-1469P.txt file - cDNA_ID_1821917; gDNA_ID_2926203; Annot_ID_141603

SEQ ID NO: 19450 - DNA, 3000 bp, Unknown; identical to SEQ ID NO: 3762
  misc_feature (1)..( 3000): 2750-1469P.txt file - cDNA_ID_1821917; gDNA_ID_2926203; Annot_ID_201993

SEQ ID NO: 19451 - DNA, 3003 bp, Unknown
  misc_feature (1)..( 3003): 2750-1469P.txt file - cDNA_ID_1821921; gDNA_ID_1620664; Annot_ID_48014
aggtgacagtggttcgaatctaatcgcagtctcatcccacgaattgattaatttcggatttgcagatacgaggatgacgaacgcgaaacagagacagaatctcaccattggaatcgaaatcgaaatcatctagagatgagaatccatggttacacaaaacaacgaagacattggattcgaagaacaaagaggctaaacaacaatataaccgttgcgtctgtacgagaattcaaaattagaagaaaaaaaacagattgaagaaacagagattacacgaagaaacagaacagagctttgaaaacagagctctgtgtgtaaaaagacagagagaagagaaaaaaaaagataagtttggtcttgtagagagagagagatgagcaaagaagaggttgaaggaaggaagcgagaggcgcgctttagtttggtaaatgctgaagaaatttttttagaaaggctttcgcgttacacgtgagactttttttttttgtctaccaattagtttttgacacgtgctagtttaataccaccaaactgatatttatttaggctttgtttttagtctttaaactttactttaattgttgtgattaagagatcttctctttaattttgttgaaaccttcacttgaacgaaaaacaaaaggggaaatgctaataaaatatcttctatccaatttttaccaaatgaatctctatttttgtaagaactgtcatcacaactctttctttaattaaaaattagctatattttaattaactcattttgacaaattaatttagggattcaaaaaggatatttagggttttggaactagaggaagagatcaggttttggaaatgtaggacttatcttatgaaattctattttattatgatttttttttttagttcaatcttggttaacatgtttcaattctaaattggtttttgtttatgagtttaagtttttggtaatttacagagacattaacttttgtttttatagttacttatcatctagattgtcttttatggattttttttttttgtcctttccttatcaattttgttttctttagaggtcctaagtggtctcttagagaaggatggtttgatcttgatgtatctggccattttccataaatccatattcacttaacggtttcgatatatttttatagcatctcctcaacttcattgtggtgaaactaatttgagattaatcttctcgacatgtgattttttgctaacgtgagcatctctccaatatgtgagacagatccaaaacagaagagtttttcattattatttttctgttaaagatgagtttatcaagaatacttatacgagcttcacgtccccaattaactcaatcgcgattttgaagatcctaaacctttgtcccacattcagtttccaatcatcacatctcccaaatgtaaacctctcacggactttaagagtttctccaatatttccaacgttcgagctcgttttcgtgttgcccacattatgattgcaaaacgacatgcaactttcagtagtttcgtttttaagttcacccaaaatcatgcaggattacattatcagttatcacagtaaaacaatgttaacgttggaatgtaattgtatgttttgtaacttcatatatgtatcaaaataaatcttgcaaaatttggaaatctgatatatataccactaaaaccttcacgagacaacgaaaattcttcactttaatttgttaaacaaaaatatttaaaagtatccacatgctgttgaccgtaaaaaatactgggcgacagtttcacttaaattcatattcacaactcacaagtcaaagattttgattggagtcacgtatcatatacttcgtaggagttatttatcttttaagttatatgcgaacataagacgaagaaaaaaaactattttagtacatataaatatcaaagtaatcacatgaagttttttgcgaaagtgatagtttaacggctaatcatacaggggccaaagagtactcaattttatgattatttattgagttctgactattttatgtgttggagaatgaagacagtacttgtcacgtttaatgataaaatactgattacaaaacaaaaaaggataatggcgacaataatgcagaagaaatgacggaattcaaaagaaataaattggggattgattggggatgaagctacgtagatgtacgtgtggctttctctcagtgtcgcgaaaccgacatgaagccaaatggcaagacactagattgacttttgtacaacgtgtttggctgttgatgaggattcctctaatccagaggttgcgtgttggtgcgttcccactacacccacacgagcttttacattttttctttatgttctttttttggttttgtgccattttgtgtcaacaatagcgaacaaagcgtagcattggagaaacctttttctataaataatagttttctttaacatgtgttttcttctatcgttaaagaagttgatctttttccgttggtttttgcatttttttgcctatcttggtagttggacttaagagcaaatattggttaatcatggtttgaattcttgattgtgacttactaggcttgtagtttgctaatggtgttttttttaaaaaaaaatgttgagtctagtgctatgattttgctttgagaaattaagtttaaatcctaaggtgttttattttaaccactcaaaatccttaagattattaaaaaacctaagaaatatcaaatgataccaaatagaaaacttacaggacataaaacaactagatgtaaataacttgggctcaattgctttcaaattgggctttttcatatgtgtgcttttggactaaaagactcataggtcaaaaaaattaaacgggctgagaccaaatatttggtttataacgaaatatgagttttttggggggccattctgataaataataagaagaagaagaatcgcgtctgcaaagctttagtgcttcatagagcaaaggagaaaaaaaatg

SEQ ID NO: 19452 - DNA, 3003 bp, Unknown; identical to SEQ ID NO: 19451
  misc_feature (1)..( 3003): 2750-1469P.txt file - cDNA_ID_1821921; gDNA_ID_2926203; Annot_ID_141602

SEQ ID NO: 19453 - DNA, 3000 bp, Unknown; identical to SEQ ID NO: 3760
  misc_feature (1)..( 3000): 2750-1469P.txt file - cDNA_ID_1821923; gDNA_ID_1620664; Annot_ID_48013

SEQ ID NO: 19454 - DNA, 3000 bp, Unknown; identical to SEQ ID NO: 3760
  misc_feature (1)..( 3000): 2750-1469P.txt file - cDNA_ID_1821923; gDNA_ID_2926203; Annot_ID_141601

SEQ ID NO: 19455 - DNA, 3003 bp, Unknown
  misc_feature (1)..( 3003): 2750-1469P.txt file - cDNA_ID_1821927; gDNA_ID_1620664; Annot_ID_48012
gaaagaaatttgcctattacaaatagagtagaaaataaatgatatgacgatttatttaagcttttttaaagattaatattaacgaccaaaataatatatataccacgattatgatttttattaaccttttattttgtaaaaaaaatacactgttaaaattttaacttattcaagtttttgtggaagtctactattgactgccgagggatcaatatagcccagtgctatcggttagaccgatcaatcttggcactcatgtatatgagaatgtttcctttattagttaaaatattgttattttaactatgaaattctggttgttactttggttttggaagccaataccctatactacagcggtaaaaacttgaaagtgtcagaatgtaatcgaaatttacatgaattcaactccaaaaaaccggtggaagaactactacaagcaaattaaccaacaacaaatctaacatgtaccttgaataatcattacacaacaacattgccttgcctgaattaaccttaatcctggagaaatcaaaatcccagaggaactacgccaagaaaaagctcctgaatcagagtaaagccagcctaccagttatggaatcaaccaactcctttggtcctgcacaagaaaagtaatgaacatgttgaggaacaacatcttagctaaaaccgaatttcaaaaaattattgtctctaccaggtccaactgcaagaactgttcttgatccagccgcaacctgttaaaggaagagttttagtttccagagaaacttgttagcgtactactaccacagaaaattcacaaataattttcattcaagagcagtcttttcgtgtttcaataggtcggatggtgtttatgtcttctatagttctaactatttgattagtagaaacttttagattttcttttgaataggaggagctctgattatactttcagcctcaataattgatcaagcacgacaaacctcagttcttccagcatcagctacaacaaaagtcgggaggccaacgctctcagcagcctctgtgatcttattcctgtgagcagaaaagataaatgtagctttcaaatttattgaagacaacttattaacatttgtagtaaagtaataatatgtcttgaagtgcgttttgtttgtatcccccaagattttcacctgcttacatttcttgctgtttttgcaagtgacgactatctttggctgcccattttcctcccatcgccgcagaaggtatcggtcactgaaagaattaagatgaaaacaaaaaaaaacataaaccccggactgatgcatcatacaaagcaaacaactcatttcagacgaaattacctctgcatcaactctgcatacatgccggtggcagcatctgcgaatattaaaaagaaagtcattttacttccagtgttcaaatttcaaacacatttcataagacacttacgtgcacactgtgacgcaattttgcccgttctcatcttcaagtcttgcctaactaccagtacctgtgatcagaacaagctcaaattagttacacaaatgttctgattttaacttgtaatctaaaaatctgacatcattgaaaactcatcaccatccttgtatagattatgcaagtctcttttatgaagctaaaatttcaatcatttgatgggtttggaacataaatcagcttgcattatcactaggttttgttataaggatttaagttataatattttactccaaaccaataaaatctaggggcagagacaagagactatcgttacactagatgatagacaaaccattttaagctcttggtccttgccattgcctggtacagaactctgcttctggaccttgctggataaaagtctgctccttttcactggggaggtcacttgctgtgataaatccaatatcatacctatgatgaatcctatcacaacccctggtatgagattctctgctctaaaactcacagatatcgacttcttttcttgtctctgatcatattcaccggaaaaaaaaaaacaatgatacatttttaactgtccaacaagaatgctggtttagtaagctacaagaaaatttcagaacatgaccgaaacaaccgagtaaataagctcgtttgttgcagtctcagtaagattttagagacaaaaacatgataaattctcgtttgggtggtgagaactgagaggcaaacattcaaatttacaccacaaatctctcaattttatttgccaaatcaaccatagacatacatataagaaacttgtgcactataaagccaaacacttacacttaaagcaaagtacactattaagaaagaatcagactttgactctttgagcttaactgatcttacatcaataaccaaaagaagaaagagctcagaatttgtaatttgtttagtttcaagttttccaattcactagccaactgatgccattcggaagttttgatcaaactagactcaattcctcagcccgagataaattttgacaaaaaagaagcaacaaaactaagaacaaattatcaacagaaaagacggaaaataagtcgaaatcaataccatagcttgaggctgcgaagagtttcgagacgaaggccacatgatacgcttctggagattctccaaggcgacagaggaacaaagctaagcctttaaaatcgaatgcccatgagtatgatgaagaagggagataagagcagccttagtaaccgtaaacgtcagggtgttcatatctctgattacaaaacgacgcgttgtttggggcttaatgtacattctggaaaaatacatggtccaattagaaaagttttaacagtatatagctactaatgtaattactatagaatatctctcgaacacacggtgcgttttactgtcgtcgctcctttttgttggtctgtttccacttcagttcttctccctccggaaaagctacaaccccaatctaaaaccctaacggccatttctaccatcggagctccgaaaatgccgggtatg

SEQ ID NO: 19456 - DNA, 3003 bp, Unknown; identical to SEQ ID NO: 19455
  misc_feature (1)..( 3003): 2750-1469P.txt file - cDNA_ID_1821927; gDNA_ID_2926203; Annot_ID_141600

SEQ ID NO: 19457 - DNA, 3000 bp, Unknown
  misc_feature (1)..( 3000): 2750-1469P.txt file - cDNA_ID_1821931; gDNA_ID_1620664; Annot_ID_48011
taataagcctaatccctgtttctcgcacgatgctagataaataggagctatctgcaaatttcaaacacaatatggaagagtttgatataacaagaagcgcaataagaaaggtgccgatttgattacagggaaggtacttgataagtcataaaagaaaggtacctgccaagtcaaagcatgagaagaaagaacttgagcataaacaagtctatggagctcttccatgttaattccacccaacttacgctgttcctcatgtacaagaacttctccttcttcgcttccagctgtcaataattccatggcatgtgcaaccatcctaacaaaaacatgaaaagtctcgtcctgattcatatagataagagtatagcgtactcaataaacttagtaaccagaaacaaacatcgcctgcctaccaggagccaaattctttggaacactctgccagaacaacctgcatcatttaattacaccatgctggattagaaagtggcgaagagctgaaacagttgcacctctgactaggtataagatgtactactgacctcagtattttctccaagaattccaataagcagtcttagaagcttatgggaagtgttaactggctttgactgaacacacttctgggctaggctatgcatgccatctaatccctgcaatgcaaaatggtattaatttgattttcaagtttaatattagaatgatagcaagactcgaatttaaatagacaaacagcaggtaaagcaatccaccttcgtaaatggcctgagataaagaagatgtgaaacaaaaagctccatccagttacatgtcgcagctctgaggcaatcagcatttcctatcatgatcttcaacatatttctcaagccctcacgggtctgatggtgagcacattgaacccagaaggcactgcactctagtttagttatctgagactgccatctttctcgtgtctggcaaaaacggcaagatgagtctagacacataatcagatacaataaaaagagttagaatgatacatgtttctaaaataccttcataaagtcaggctttgctgcagagcattcaccaaatttcccatcttctagttgtggccgcattcgtggcatttttgaaatgagaacagcaaccgcttctaccaaaccattttctgtctatttcattaaatttgtattacattatgaataatcagaaatctgtgcatatacaaaagtactagcacgtagctagtcacttcatatgacataaatcccaaaggacctaaacatgaacaacttcattctaacctcacgatgtcccagctggtctagttgataagaaccatgtaggtgtaacaacttcacctgaaaataaaaagtatgggcagaacatttctcaaattgtaacattcaagatcaaattacaaagaacccccaatcccaaaaaaaaagtactaaccactatttctagccaaccaactgataaagcagaagccatcacttcccagtatcttggatcatcctcgatggcctgcaatggcacataaccccgttaagaaagtcaggttcttcaatcacttattttctgagaactatcgacttcttagagatgagcaaacctgcaggccaacaagttccttttggaaatcctggagctttgagtagattgttggatgtgagctagaaaggagtatatcgtattcctgccatgttataaatggtaggtaagaaaacactagaagtttaaaaaaataagatagctcaagtgtcgaaggtaaaaactaattacagataaccaatcaacgagccgttctggcaaccaagacagacatgtcttatctgcataaaataattccatcaactcccacgcagcctttaaagaagttggttcctcagcattctgcatatgtatgttaacaggaacatccattaacaaagctccacactcaaacctatacctcactcgcggaggagttaaatttacaagtaaagttaaccaattgtagaaccagaaagaccaacgtacctttataactgatctcgggtcttcaatcaaaggagcgggcaaagatattgtattactaaggagagatttaatatctctgctgtattccattacgtactcccacctgattaaaattacgacaatccagaattgctcaaacacgctttagaagtctaatcataagataatccaaaacagtatttcagtattgaatgggcaaaatctgggaatttacaaagaagatactcaccacgcagtctgatacagagaggaactcatatccatcttagacaaactggaaattgagtttcttctgctctgcaaaagcgcgaacggagataccgatccataagcgatccttcgccactgtgggtcactgatttcgccatcctcgccgctaagcctaacgtttacgaccttaccaccaacttctccgtcgtcatcatcgcgtaactctggattccttaaaaccgtgacgcgtaggttgtttccgcaaccccaggagatggagagcctgtgaaccggagacttgaggccatagcttagaggatacaacaccggagttttttccttggtcgaaaacagaaccaattctccaccgccagattccgaagacatacccggcattttcggagctccgatggtagaaatggccgttagggttttagattggggttgtagcttttccggagggagaagaactgaagtggaaacagaccaacaaaaaggagcgacgacagtaaaacgcaccgtgtgttcgagagatattctatagtaattacattagtagctatatactgttaaaacttttctaattggaccatgtatttttccagaatgtacattaagccccaaacaacgcgtcgttttgtaatcagagatatgaacaccctgacgtttacggttactaaggctgctcttatctcccttcttcatcatactcatgggcattcgattttaaaggcttagctttgttcctctgtcgccttggagaatctccagaagcgtatcatg

SEQ ID NO: 19458 - DNA, 3000 bp, Unknown; identical to SEQ ID NO: 19457
  misc_feature (1)..( 3000): 2750-1469P.txt file - cDNA_ID_1821931; gDNA_ID_2926203; Annot_ID_141599

SEQ ID NO: 19459 - DNA, 3003 bp, Unknown
  misc_feature (1)..( 3003): 2750-1469P.txt file - cDNA_ID_1821947; gDNA_ID_1620665; Annot_ID_48046
cacttttatatttgtcttttgttgggtactgttgaacgaatgtttctttacttccatcacaagacaaataaataactcaatacgtcgcaagtgattctttatattcctaactgtcgactagaaagaaaataaatatcatagttctttgacaaaaaaaaaagaaaatatcatagttactttactccaaaattatagcctatgactagacttgattggccatagaaaatacttacatattatgttatgatggaatttcttcagtagctattcaattcttgttaggatacgacgctatattatgatggagtttcttcattatttacatgttatattatgatagatagaacaagaaacaaaaataaaaagcttctatgtaattaattatggaaactttctttggtaatttttgtttggacgttgtaaattactttgctgttttttattttatttttttttgtatatgttgcgttttcgtttattgttgatttatatattcatctaaacgtgcttccagttttaaataaatttattttgtatttgtaaacttaaaaggccacatggaaaattttcaaaactttacataaatgactgaaattacaatttacaccatttttcttcacacacttaagaagagtcaagactaaattttggaacattcaaacgggctaaaccattaagcatctttgtctgggccgaactcaaaatatatctctgttcaatccgtgccttcagcccaacatgtgttttttcagcccaataagtttcttgcatgttttgaaataaataatgaattttagtcgaattactttctctcatatcggcatattttgttcattttgtttgatgaatgggtttaagtcgtcgaagttggttaaccgatatcgtaacgtaagattgaaccggagtttcaatactcgttacattttttcgtattctagctaacgtgaacggatgttgtttatacagctttctactacaaaagtagatttcaaaattgaactgcgattttcttcttactcttctagaaacacttcctcatatttaataagaaacgaaagaattagactccgacaatattgggaatgtttagttgtcatttggacccaatataatcaattccatacatttgcaattgcaaggtgggtgagtcatcaaaatttatgaatcttccaaagattatagatagaacagcttttaattagcctaataaacaaaaggaaatacgattatgcatacaaaataaattaaatattaagacttttaatgaattcttaaccaaaaccatatcaagtcatatcatacactatcctccatacacgtggtagcatacataagtacgttaaataattttatttagcaaataattttattataatcatctttgatcaccaagatcatgttgggccatccaagccacgactttagtaatgtgaaaacaatatcataaggaacgaaacactgttcatttcatacaattaaaatacaactttttcctacacattttctcaagagtttagtaagtgagagacgaatgatttgagaaaacagtttttacttttttcgatttgtttctcaaactcagtattttcggatttctaatccagattaaaagttctgaataaaatcacggggtatggagcaaagccgatataagtaaaaacctttccatattgatagacactagatttttttttagttcataagatagatactagatttagtttgagtataatggattaatgtggaactagttgtattgtttagtatgtgtatgttgtatgatttagtgaccgtcttcagttttcttgatgtctttccacgttttacaaattcttgaaagaactgagaactcaaatgtatgatacataaccattgaaaaaaatatttccaccatcataaatagagttttacgaatcgtttcacaacttttaattcagttgacaccattaaataatcaatatttctttagttacaattcagtagaataaaattgcatatgctatattatctaattctatgaatattttctgtctatgatatttgatttttatatactttagattttggatcacccccacattatttcgcttttcagtcacattttgtgtttaatattgctagataagtccgtggttatagcttactttgttaaaatcatatatctcaacttatttcataacagtatctaaagaagatggaattttataaatatatagacactcaaaaatcagaagaaaatatatatccacaaataatagaagaaaacatagatttactgcattcaaatcaagggacatgaaagaatatcctggacccaagtgggttatattttcaataaaatttagcaaaaaaagttgacaatcaactaatcatcaccattattggccataatcattacgtacgcatacacatagccacgatgtctacctatgtttaaatctttgaattctgaaactacgtatcttttatttttgtttaaaaaaaacctagtacgtatcttctttccttacttagacatcatcttctaactttaaggatcgaaattagaagaaaaacaaatgattaatatctacaagaacagaattttgcatttatactcagatactcttctagtacctcacaaaaataaaatgaaattggaattgaacacgccctaaattcaagtactatacggtctatacccatttgagtatatgaataatgcatattgtgagtgaaagagatagatacgatacactcttttctttgtttttcaattggacaaaaggaaacagattttgatctctgaattgaacggtcaagatcgtatataattatttcaggagattaagatcccacgtgcttaaaaactctctgtcagactctttatgtataaaatcctcggcccactcttgttttgatagtacactcaatagaaagacacaaagaaagaaagaaaggacaaacagaaataacaaaaccttccatttcaagaaagcatcatctttgtgtgtccgaaaaatg

SEQ ID NO: 19460 - DNA, 3003 bp, Unknown; identical to SEQ ID NO: 19459
  misc_feature (1)..( 3003): 2750-1469P.txt file - cDNA_ID_1821947; gDNA_ID_2926196; Annot_ID_141307

SEQ ID NO: 19461 - DNA, 3000 bp, Unknown; identical to SEQ ID NO: 3790
  misc_feature (1)..( 3000): 2750-1469P.txt file - cDNA_ID_1821959; gDNA_ID_1620665; Annot_ID_48043

SEQ ID NO: 19462 - DNA, 3003 bp, Unknown
  misc_feature (1)..( 3003): 2750-1469P.txt file - cDNA_ID_1821963; gDNA_ID_1620665; Annot_ID_48042
taacttttttctaaaacggcacaatgtgcaaatgtattcatatagcggataacaatatccaagtttccaaacaaaccaactctgaaactgtttcactcacataataagagaacgaagagctaattgctgaagaatccgacgaaaatggctccgagatcagattcacaaaccctagccaccggctccgacgaaaatgaatcctcaatcgatccgatcttccacattctccgtatcatccctttctccttcctccgaccaccacgtcttcgtctcaagctcccttccttcactctcccatctccaatgactgtcttctcactgattctcctcacttacttcctcgtcgtctccggtttcgtctacgacgtgattgtcgagcctccaggtatcggatcgacacaggatccaatcaccgggtcagtaagacccgtcgtgtttatgtcgggtcgggtcaatggtcaatacatcattgaaggtctttcttccggattcatgttcgtactcggtgggattggaatcataatgttggatctggcattggataagaatcgagctaagagtgttaaagcatcttatgcaacagctggagtctcctccattgtgattgcttatgttatgagtatgctcttcattcgcattaagatccctggttatctccgttagagggttagatcacttttggcttcaattctgtaattggatctttagtataagatcgatcattagaaaaaatgtgactttttgttttgtttgtttgctaaagcttatgtgtttcttgtttgataatgagaatttagctttgaatgttagtatctgcacttgcattattgttgaattttgcgttgaagaagataatgggaaattttctgtaacagttatatgacaacacaaacaataaagtagagatttttgaagtttggtttgttggatcgctttgttgcttcaggtgttgttgactaaggcttggaagttgaggtctgcaataatattgcagatgcagatttctaatttcacaaagaagttccaacacagaaatgctatatgtaaaagaaatatcggtcaaaattgttatttatgattttaattacatgatttacaataagaagtaatgaaatctgaatgctgtgtatttacatactttatacatttagtgatgaatttaagtaaatgattgatagattcaaaattgtgtttgctgtgtgcattgttcttatctgctgaaataggttcttggggagaagagacgtcgaggtgagcacgtcacaggaaacttggtggaagttaggatatcaatgggacggtactcaggcatgatgagcccttctcgctcttccctggtccaaacccttgatctgccattgaatgtcccgtacttgactagtttacggaaaccccatgtcttcttctttgctgcggtgttcaccagtttaccattcatcttttggctcagatactctcgcaccgcatgcaagctctgttccacaacctcaatgggtggggagacgagtgggtttccttccgcgctcagttttcgtaggcgcctcatgcatccaatagactcaggcaacactgttatcttgttgtagctaatatccagttcgaggaggttcaggagaagaccgatagaagatggaagagcagaaagatactggaagttctgactgacattgaggatttcgaggttgatgaggttctcgaggtcctcagggaggatcataaggcaattgagacgagcatcgaggacacgcagggaagtgaggcaggtgatggtggctggtaggctaatgagcttgtttgagttgacacagagctttttcagattggttagttctaagcctatgttgtctggtaatctaatcagctcgttgaagttggcgtttagttcttcgagtgacctggaaaatccaaaacaaaagaaaacagaggaatttatcagcattatcatcatatatgattggtttggtccagatttggttgaggtgtgaaacctgcaattttgaatagtttgggggagggaaacgagaaagttgccggagacattaaggatcttgagcttagaaagacaaccaatggagtttggaagagctttgatctggtttgagtgaatatccaatgctatcaagttgagtaatcttgctgttagagattctggtattttctgttacaattcatagacaaacccccaaaaagaacattagaaacgtatattctgactgtgtatgagtgtatgcatagagatatgaaccttgatatgattgttggagagatcaagcttgcaaatatttgccaaattgagggaaggatttgggagagattgtaatgccatgccactcaaattcacaacctctagtctctcttcctcgttgttattgtatgatggtgactttggcgataaggatggtgaaagtggtgatgatggtggtgatgtactcaagtccatcatcatcattgtcatcatgtgatccttttgtccatgtaattgctgatactgatatgcatcttcgcatatcatcgttttatgtgtgtttgtatggaggaaaaagatgataatggtgaaatgatgtggaatgagtgattcttgatctgcttataatggcaacacagagagattaaggaggttatgtatggacgatcaaactttagtgggaaattgaaggaaatgaatactcttcggaaattaatgatttgtaattaaggaaattataaaaggtgattagctgatgaaggagagatactcatgcgtcgccaagtttttctaaacacctgatcgaaaaatgttagagctacccgcaaatcactcataagtaaaaaaataaaataaaaaagttcccataaatttcatttcaactttgagactaattttataatcagagtctgaaatgtaacaaatcaaaatttgtggggttaaaacagaaataattaaaaatatgccacttgtaataattccaaagcaagctctggtgacacgatcatcggaacaaaatagagtacccggtgacgatg

SEQ ID NO: 19463 - DNA, 3003 bp, Unknown; identical to SEQ ID NO: 19462
  misc_feature (1)..( 3003): 2750-1469P.txt file - cDNA_ID_1821963; gDNA_ID_1620665; Annot_ID_163903

SEQ ID NO: 19464 - DNA, 3003 bp, Unknown; identical to SEQ ID NO: 19462
  misc_feature (1)..( 3003): 2750-1469P.txt file - cDNA_ID_1821963; gDNA_ID_2926196; Annot_ID_141303

SEQ ID NO: 19465 - DNA, 3003 bp, Unknown; identical to SEQ ID NO: 19462
  misc_feature (1)..( 3003): 2750-1469P.txt file - cDNA_ID_1821963; gDNA_ID_2926196; Annot_ID_201488

SEQ ID NO: 19466 - DNA, 3000 bp, Unknown; identical to SEQ ID NO: 3799
  misc_feature (1)..( 3000): 2750-1469P.txt file - cDNA_ID_1821979; gDNA_ID_1620665; Annot_ID_48035

SEQ ID NO: 19467 - DNA, 3000 bp, Unknown; identical to SEQ ID NO: 3799
  misc_feature (1)..( 3000): 2750-1469P.txt file - cDNA_ID_1821979; gDNA_ID_2926196; Annot_ID_141296

SEQ ID NO: 19468 - DNA, 3003 bp, Unknown
  misc_feature (1)..( 3003): 2750-1469P.txt file - cDNA_ID_1821987; gDNA_ID_1620665; Annot_ID_48032
gacggtgggcttgtttgcagaaacggacggaggtgaagcttcaggatctgccgtacgtgcttggagcttgttgtgtgttgcataacatttgtgagatgaggaaggaggagatgttgccggagttgaagtttgaggtttttgatgatgtggcggtgccggagaataatatccgatctgctagtgcggttaatacgagggatcatatctctcacaatctcttgcatcgtggacttgccgggacaagaactctataggctctgtttttcaccttttcttattttgaaactgattttttattgcaaattctttttccaaattaggaataaaaacattttagggattggttggatacagaaagaatagttgaattgagagtagaagtggctgatgatattgtttgtgttacttattagcattgtgtaatctttagttcatgtattttctatacaaattgaatctgaaacctcttaagtataagcttcttctctttcgatttttcacaaaattggtcgactagaaaaagaagaagcaattccacttttattacaagctcaggctcagacagaagtacaagtgtacaaccatgaataaatggaagttgtacttaatctgtttcgtttgcaggatcttccttatctattgatgtgttgagctctttgagaaggaatgcaaatttggaagcatgttttcctttgtcattcattatttgtgggctaaatgatacaaagaggaaagccatatgaacatgttatttactgtcacatggcgcacacagaggaaaagccatatgaaatacaacatttgaatatgaaacttgttggaacttttttgacaaaacttttccggtgactttccggccaaattccggccaaacggctgaacggaattgtagggtcattagtgcattggaaagttagtaaagagtactacaaaatggtatacacatacgtcaaaaatgaagttgtattgaatgagaaataaaggtgtaaagtgggacacttgggccaaaccggaccgaaccgaaccaggctgcgggttgtcgggacgtcccgtcgtcggctcaagggctttcagacttgcgaaccgtcatacttgtgagttattgagtttgctgagttgaatcttatggaaatattctcaggatggtctcaaaatattctcaagatagtttcaaaatatgtcatgtttatcctgagaatgttctgcaaaatcttatctacttctactatataaagagattcaacctctcattatttctaaaactctcaaacacaaaacagtctaaattctaaaatctctcctctctcttgctttttaaaagtaatttcttagtttactttcacataaacatagtcatgattccattgatttaaaacttaaaagtttctaatcatgtttttttttacaaacgtgaatgtggattaaatgagatttcaatggaaagaaaacaaagaattggagatgcaaatttccttaaaagccattaagcttactttgtgattgtgattatccaagtatataatttaattcataaacagtaacaataatcttcattcatcaatcgtcgcagcttatttccttaaaaagccaatataagctacttttcaagccggcttgactcatacatattaccagattaccccaacagtcaccatgaggggacgaatctcctctggggttaaccaatgggtactatcgtaatttcacaatcaccaataccattgccgatcaaaaacagcaagcaacgaacgcgcggttcgtctcgatcccgtcctctcatggctgttgtcgttgcagagacgtcgttgattttcgatttcgatttcaagcttttcacgtactcattggaacgatccaatctcaaaagtctctgattttgggagagagcttcgttaaactcagcgcgaattgtaatttcccttttgccgcgattttggattacaaggtacgaggtttttgatttctcatcttcaatgattgaagtttgatctgggttctagaattctaattctgtgtgttgccctttgttttattcggcttattgaagatgcttgacttcgttttatgaagttcgtatcttttttgattcagttctcttctagggttttcttgtgttagagctctgaattttggtaatttttttggtaatgaagtttgattatggtggaaacacgaattttcaggagaagggttagttcaattttatacttttgcttggaaaagtaatatgtttgaagttggacatttagtttcataattagtcggcaatgcagataagctgtgaagaagacatttaaaggaattatctttcgttcttttcgaattgaatatggtgttggggttggtttaggtattttgtttggattggtgattcttcaacacatttcacctggatcttagttagagaaagaaaggacagttccatgttagacttgtttgtgtagttcagttgccacttgactagaacttctccttttttttgtacattagctaaatgggtagattcattttgtttccttatttgttgaagctcttttattgggttggttagttgcttcgttttagatgaaaattatatgcggtgttatatggctctgagcatgtttccggaagttgctggcttaatgaagcaaatacatgcgaagattatgtgaagaacctaaagtactctgaaaccaaatttatacttatattctagtgtttctatttatgtatagattttaaaatttttatgtttttttttggttttaagacttggttagtgcaaatggaatggttcattatcttggttgtttttatgtatactcttgtttctattgcaatgtcattctcgtggtcaatgtttgttgctaaggttttgattccatttgtcacttttgcaggtgaaataatttgacagctgaggatttaagcatttatgtgctgcaactctgcaagcttgtcatgtaccactgtttgtatattgtttataaataaaacagtggacttaaagttaagggaatg

SEQ ID NO: 19469 - DNA, 3003 bp, Unknown; identical to SEQ ID NO: 19468
  misc_feature (1)..( 3003): 2750-1469P.txt file - cDNA_ID_1821987; gDNA_ID_1620665; Annot_ID_163893

SEQ ID NO: 19470 - DNA, 3003 bp, Unknown; identical to SEQ ID NO: 19468
  misc_feature (1)..( 3003): 2750-1469P.txt file - cDNA_ID_1821987; gDNA_ID_2926196; Annot_ID_141293

SEQ ID NO: 19471 - DNA, 3003 bp, Unknown; identical to SEQ ID NO: 19468
  misc_feature (1)..( 3003): 2750-1469P.txt file - cDNA_ID_1821987; gDNA_ID_2926196; Annot_ID_201478

SEQ ID NO: 19472 - DNA, 774 bp, Unknown; identical to SEQ ID NO: 3784
  misc_feature (1)..( 774): 2750-1469P.txt file - cDNA_ID_1821991; gDNA_ID_1620665; Annot_ID_48030

SEQ ID NO: 19473 - DNA, 3003 bp, Unknown
  misc_feature (1)..( 3003): 2750-1469P.txt file - cDNA_ID_1821991; gDNA_ID_2926196; Annot_ID_141291
aagtattcaaatctcttgaaaaatatttctaatacaaaaataattcaagacccgccaaaccggttgatgaaggatcaattaatatataacgattgataaattataatagagaagatccatatgtctatttaccattcttcagtttctcttgcaacttcaatacgcatgtgtcctagtttcccatccatggttttccttactattgctctgtgatcaccctccaaacacctagctgaaggagcatcaccatcatacctgtaacttatgtagaatattagcttacaaaattttgtatcatgctagctctttttttaaattgagctttactcttattacttaatttcataggacgtgctcgtgctcgtgttaaggaattctgaaaacgacatctggtagtataaagggaaatagggttacacgcgagtgctttctcatttggcaactttctctgatttttctctacgcgagcggcgattgcgactatcatttccttgtgaattctcgtctgtctccggtaactttctctccattttgctagctctgttgttagcttgttacgcattatgctcgtagtttggcctgtctcagtgcgattagtgaaccagtaatgaactttaagtaacgttttagggttttaatttttccttggttgaatgatgtaaacccttctttaggttaaaggagctattcaacgtttgtttggtttatagtctatagcttctcgctcgacctctgcaacttaaaaatggttatgtttatgtcaaaacttgaaaccatgtttatgcttgatacttgggtctttttggctctgctttatatgtgtcttctttcctctatgtgtttttctgcttgattctgctggattatgaatatctttcttctgcttgcttctacttgaaaccagggataagtgattgcagatggctgagcgattattacaatctatgtcaagggtggctggccgatgtcatccagattgcgtaaaagcaagtgatgagcaagaagattaccgtaaattctcaaatccttttgaactgactcgttttcatatgaataggttcagtatatgaattgactacaacattttcatcttttgttgttgttgtttggcagatgcatctcaaaatgcagctttggtagctgtgaatctgattagctctgcaaggttaatactgaaactcgacgctgagtttactgagtactcagctcagtttttgatggacaatgctggaaaggaagacgacccgggagaagtggatcaacaacgcaatcaggtcacgaccgaaaactgccttcgctacttggccgaaaacgtttggaccaagaaggaaaatgggcagggaggaatggatcaacaacgccctgtgctcactgtcaaagactgcttggaacttgcttttaaaaaagggctgccgagaagagaacactgggcacatttgggatgtaccttcaaggctcccccatttgcttgtcagatacctcgcgttcctgtgaaaggagaagtggttgaggttaagacttttgatgaagcattcaagctgttggtgcatcaacccattggagcaaaactgcatttgttcagtccgcagattgataatgttggagaggttaagtgttgtaagttaaatttcaaaatcttaagagattagtgacaaagttttgttctaatcttgttcatctttttttatgtgtgatagggagtttacaaaggcctcacgacaggtaatgaaacacactatgttggacttagagatgtgctaatagcttcagtggaggagttcgagggagattctgttgctattgtgaagatctgctacaagaagaagctttcatttatcaaagtgtctttgagcgttaggtttctctcagtagcacatgatggtgataagtctaagttcatagcgccaacaggtctgcttgttgacttctgtgtcccgcgcttatctatcaactaaaccaaaagctgagatcttggtaagtatctggactatatgctagatgtggaacttgtttgtggtgctacaataagagttgttttatgagactattttctttaagttaagaagtcaagtatcttgaaaaccatatcctatttgtggaacttgtttgttgtccgacattatgattgtcttaggatgaacttttatctataagttgaagaagtatttgaacttgtttatcattccaaattactgttgcccaaatttgaagggatcttttcaagcttctgaattcataattggatttgctcatagtttagtgagttcttctatatagattacacaataatgattgtattatccgtgtttaccaatataattttagtgaaaaatgcaatgtaaagttttactgagaaatgagaagaattgagtcaccaagctgatggtacatactacataagatagactactaagaattttacattgaccagtagaaatcttcaaatctctataaagtggcccaaaataaaaacgatttaaaattgcataaacgatgttgttgtttaagccttcaacattggcaaatgatggcaatctcagaaaaaggagtcatggcaatctcagaaaaaggagtcatggcaacgaaaattgacaaaaacggcgtcgtattgagggttaaaagttgaagtccctaaaccgtcatcgtattggaactacgctgagggggaaataagctttcgcgaagcttcgagagttaaggcgacatttcactgagttttctctacgcgacgtagatctgtgtctccggtaactttctcttcattttttctttctctgttggattattttacttttttttttggctttgttacggaacctgctcatgatttgacctagtgaactcttagtaacgttttagggttttaactttttttcttggatgaatgatgctgggtccttctttatgttagagttgttctttgtttaaagaagttatcaacgtcagtttgctttagtttataaagcttctcgttcgacgatttttcctctgcaactagaaatg

SEQ ID NO: 19474 - DNA, 3003 bp, Unknown
  misc_feature (1)..( 3003): 2750-1469P.txt file - cDNA_ID_1822007; gDNA_ID_1620666; Annot_ID_48057
attgtcgtcatctgtttgctttgtgctcttgcatgcttacttgaatgagttataacaatagagaactttttagttttattttagcaacaacacttgaaagtataacttgttctactcgatttcataataagtgtgtgtgagatcttttgattactactagagactagagttgcttttaaaagtgtaatttttatttttattttgactcgatatacttttcaacaaaaaccaacttatatttttcttatcttttaataaaaaaagaggtatgatatgcattatcaaaggatctcctaaacttgtctataaaagatctcacgaggcggtctctgatcaaaacatcgtacaacccatctctttttttttttttaacttgtcttctctctttccttaactttgatggcactgtcccttctctcctacaacgtctccgacctctgtctcggcaaacctcctcttcgttgtctttcctcctcttcctcctccgtatccgacgccatcgctgccctcaaatcctctgaagacactttcctctccgtctggaattgcaatcacgacgatgacaataacacagagtgcgagtgcttggggaaaatatcaatggctgacgtcatctgccacttgtccaaagaccatgaccacagtctctgtgccttaaactcatccgtctctgttcttctccccaaaactcgttccattgtcctccatgttcaaccatcctgcaggttctttattcttccaaactctctctgttttgagggtctacataaaaattcaacctttagttgtgcttactctgtttctatgctctgtttttttgtaatgttctttaaattaatggtttttgtggggttactctggtttgactaatcagcttaatagaagccattgatctgataatcaaaggagcacagaatctgattgtcccgatacatacaaagccctacactaagaaaaagcagcacaacgacaacgtttcggtcaccaccaccacccactcgaacggacaacgattctgctggatcacacaagaagacatcattcagtttctcctcggattcatcgccgcattctctcctttgccagcgatgtccctctctgatctcggtgtcatcaacagcacacacacagttgttgcggtcgattaccactcctcagcgtccgcagttgtctctgccgtatccaacgctcttgccgtccaaacctctgtcgcagtggtcgacggtgagggagatgacccttttacgtctttgatcggcgaaatatccccgatgacattaacttgctgcgacgagacagcagctgcggcggtggcgacgctctccgctggagatctgatggcgtacatagacggagcaaatcctccggagagtcttgttcagatcgttaggaaccgtttggaggataaaggattgattggtttgatgtcgcttttcgattctctctcatcttattcgacgtcgtcgggttattcgtcggaggaagaagctccagtgagaacgacgtcgtatggacggtcgatgagtagctcagcaagaatggcaaggaagtcggaggcgatagtgtgtaatccaaagagctcgttaatggcagtgatgatccaagcggttgctcatcgagtgaactacgcgtgggtggttgagaaggatggttgtttcgttggcatggttacttttgttgatatcttaaaagtttttaggaaatttttggagaatgacatgtgaaaagttttttaaatatattttcttgtgttttgtcgattactaaaacccaacaaaaatgtgtatttaggggtgttttgtttgtttgttttgtgttttggtgatgagccggttggagtttgagattaactaaaactgaatcaaacgtttttggtttgtttagttggtactttaatagcaatcaattgatttgctcattttgtcaacaaatagtgtatatctttgaaacgtttttagaccatctccaatgtattttcattctaaaataaagtaagtggggttggagatgtctttagtcttgctatatttttttaatagcttcttatgtttattacatgtaccatgatgaagtgttgtaaacttgatgctagtgttcttgctaggctagggctatggaaaggtatgaaaaactttagaatgaacaagcttattttctcagctaaggacgaagattttattggtgaggttttgaggccacatgtttggaaaaatgaaatctaattttaatcggctaagataaatgtagtaatcctcatttggaaaatgaaatctaattttaatcggctaagattttaacataatccaccgagtagttttaacttttaatccgacattagtggatgggaagatatttagatagaggcattatccaattattaacaaaacaaaaaactgcccccaccgtcgttgtctaaaaatatattatattaaaataattggcaaagacgaagacgaagcaccctcatctccgtcgtttgtctttaaaaccttttgccattaccatcttcgcacgttgaatatacgtcgactttaaacatcttccaatctctgaaagcccctctcttttctccatttcgtgcttcatcatattcgtcgtcgcttcggtaggttcttcttcatctctcttcgattggattggattggattctatttgagtaaatttgttgttggttcgttgatcgcgtatgtcaacggattatttagggttccaccaatttttcgattcatctgtgctagtcttctggaatttgaaaaatgggaattggatgggtttgaaattggaattctagtttctcccgtattgatttttgctggcaattatgctgatctagattgttttcttatagctggattgttgttttgcatatgagattctcgcaatctctttgaattgcttaagatttgaccacaagtctagtatattggatatttgatttttgtaatgttctctgattaatttctcacatttccttttatgactgtgctctgatgacattttatg

SEQ ID NO: 19475 - DNA, 3003 bp, Unknown; identical to SEQ ID NO: 19474
  misc_feature (1)..( 3003): 2750-1469P.txt file - cDNA_ID_1822007; gDNA_ID_2926191; Annot_ID_141031

SEQ ID NO: 19476 - DNA, 3003 bp, Unknown
  misc_feature (1)..( 3003): 2750-1469P.txt file - cDNA_ID_1822011; gDNA_ID_1620666; Annot_ID_48056
ctaatctcggggtaatgagacctcctaatagtagtttcataaactttttttattttttcataaactttttattatacaaaatggtttatgttttcagcatttgacttactaacataacaacaacaaaaataagcctgcttcaaattgtttaatagatctcgtgaagtcaaagttaagagtttttcacatactgcagtcaaataaattttcgactatctaaacaatgtactaagtgtaatcagtggaaatcaatctttgacataaccaaatttcaaaagttacattgcatgacttcttttgtgtttctagtatgcatccaaaagttacattgcatataacttgttttacgttggacacatcaccgtagatgcatggacgaggattttgaatccaaattaccatataataattcaagataagtcacgtccaatatcatctaatgcaaatttacaactagtaaccaattaaatagttacgaaagataagcaaacacacgtctcactctcagccctatttgtgttttcatgtctcatctcttttaaagttcctgaactactagccttaattaaaatatacgttaaagactctatttgaaggttctttttcgccttttttgggttaattattgtatgcaatattatttttgtaaatgaaaatcaaggtctgcttatctgtactgcacgttccatataaggacaaccacagatcacgttgcttacgtcagcgactgtacaaaatgctggaggcccgtcacgttcgtatcgcctactttcgttgaatctaatattgttcacgccaacgccgattcatatatcatttcatttagatgccatgttcacttttatatcatatatactgttttcattttcaaattcaaattcataaataaaatctaagttaacaaagtggttagtattgtagactatgttatatatatgatgatgcttcatttgtttaattgtttgtttccaccatccttataaccaaactgatggtagattagtagttatatatatgcacatactacacatgcaaatgtaaagactaaaaatagtatccgttttcctaaaattaattatactgtttaactggtaaacgcaatgattagttggtccgaataacttaatgaaagcatcatagaaaaaaaaacaaaggcttggaaacataaagccaacatgcaaggtcactgaggttttataaataacattgatcgacaatttgttatttagtgaaaacgtacaattatcagtgaatattaattattatattcgtacggttctgatcagtgtcttagattattatcctttacttaaaatatactcgatctaccagtgacgtcactgtgcaaagtcacactggtcagatttgttgatgtaccaccttcatctatgttccttttgggctggacctgtcaatttgtagcttgtttactgaattacgtacttaatgggcatgtgaacataaatttttaactagattatccaacgtttcatagattaagctaattggtgtacttcccctatacttctgttaggttttattatagtgaccaattagtttcatttgcatatgatgactaatcgttttactttacttccttttcttaatgttaagtgatatgagttccaatttaaaaccacttaaaaatcagtggcttggttcatatcctctatatattattgtaaatcgcatatcttgtcctgttgtccactgtggaattttaaaagtttaaagataaaacaattatgtcagttcgtgacatatagagagctattcagataatcacattcagcatatatatactgaaattccgagtaaaaaatgctgtaggcaaatgaggttcacatgatcacttacgtacatagaatcgaataatttacagagaaaacacaacacattgcgaaaacaagaaggtcgagaaaacatattttgtattaaagtaagtacttggaaaacacttggccaggaaaaaaaaaaaacaacagtcaaacacttggccaagttgttacattgcgtgcaagtacgatttgtttatatgtaagaattggaaagcgtattttaatggggcgtttagttagggtcgaaatatgaaaacaccatctatgaccaaaacaaatcagggtcaagctagttttaaatctgcattttttttataagaaattgtttgtaagaaatcaatagtatataaggaaaatagacttggtgtaacagaaaaagttatttaatcaacagaggtgagaaaaagtgtttgatagaagatatgatgcagaccaggtgccattgccagcatgttgcattgttggacttgaagtaaccgagtaagtagataattgaaacgtgtcttataattgtcattaagggtcacaccacaaaaaggtttttgtgattattaaggtcataattcccctcacaaaagttggaaatataaaaattgaaaaactttggtcatatctaatctaatctttatctttggtttggttttatacgatcatcccgaagaaacatcatataaacctctcccatatcatacctacaaagaacatgcatgattttaacttattttcagttgtttcttctagtgggtttgagaactcatcatcaattgtcgtcatctgtttgctttgtgctcttgcatgcttacttgaatgagttataacaatagagaactttttagttttattttagcaacaacacttgaaagtataacttgttctactcgatttcataataagtgtgtgtgagatcttttgattactactagagactagagttgcttttaaaagtgtaatttttatttttattttgactcgatatacttttcaacaaaaaccaacttatatttttcttatcttttaataaaaaaagaggtatgatatgcattatcaaaggatctcctaaacttgtctataaaagatctcacgaggcggtctctgatcaaaacatcgtacaacccatctctttttttttttttaacttgtcttctctctttccttaactttgatg

SEQ ID NO: 19477 - DNA, 3003 bp, Unknown; identical to SEQ ID NO: 19476
  misc_feature (1)..( 3003): 2750-1469P.txt file - cDNA_ID_1822011; gDNA_ID_2926191; Annot_ID_141030

SEQ ID NO: 19478 - DNA, 3000 bp, Unknown; identical to SEQ ID NO: 3808
  misc_feature (1)..( 3000): 2750-1469P.txt file - cDNA_ID_1822015; gDNA_ID_1620666; Annot_ID_48055

SEQ ID NO: 19479 - DNA, 3000 bp, Unknown; identical to SEQ ID NO: 3808
  misc_feature (1)..( 3000): 2750-1469P.txt file - cDNA_ID_1822015; gDNA_ID_2926191; Annot_ID_141029

SEQ ID NO: 19480 - DNA, 3003 bp, Unknown
  misc_feature (1)..( 3003): 2750-1469P.txt file - cDNA_ID_1822019; gDNA_ID_1620666; Annot_ID_48053
taggagattatggttcgagtcttcccatcacaatttcaatcattaattgttggttaactagtaagaatattcagtttttccacacattttggagattataagttaggattctataatttgatccgagtactcatgttatcaaaaaagaattgttttataaaaaaaggtgcaatcaaatatagttgcattttacatatagaacgaagaagtctactttgaggggaatatggttgcattcagtaacattttttagtgaaagtttaatcgtcagtgcttagaccttttccactgaacgaaaaggccttaacctgcattttctccactctcatatgagattcaatttgtatggaaactaaaaatgtaggtactttactcttacaattattaaagtttaattggattaaaacatattatgtagtaatctcctttcaagttaaggattaagtttcaaaaaaagaaagtccaagcgaatcctctggatgagacagagagttatgaaattacatctttaaagaccgttagctgagtcaacttccggtggttgcaacccccacacataaaataagaaaattggtccaaatattgtattgtcactctcgtctacagttcaacgtacccctcacaaaaagctttagccataactagtctcaagtatcgagtttattatcgaagacattagtgagattgcaaaggaaaagaagtggaagatatgatagctgaaacgggaatggtgatggtaggtgttttgggattatgggcacgctttgtccgaaaaccgctccttcaattcaccggagaaatgatgcaagtaatctccgaagtcgtgtcgaggatgtgtcaaccagatacaacatcttatgctactctttcttcaactgctaattaataaccctcctcccaatatcgtcggaaggtgataacatatttaaatttagagttacatataactttttttaaccttgttatttgtaggttctcgattctataatatatacgtttttcgttttcttttgaatgttaaaattatggatcaacaaaagaaaagttatatacctggttttgtgttcctctctcgacatatgatatatatgtttacatgaaagcttaaccgcaatagagtactagtgaggcatcatagaggcttagtagatctattttaggcgaagctgcacgacatcagtaaattgattgataatcaaaggtttagaaatcgcaaaaaccatatgtgattagaataacgacatcggaagaagatgtgttctcgggttcatgaagctgatccacataaattagagcacgtgtataaatgagtctcgttataataacgacatatatatgatttattcggtttgtttgattcgggtacactaaaattaggttcggttcagatttggttttgattttctattttggtgttaccgtttctgctaagatcgttgattgtctgcttcatttgcttttacttcgtccacaaagttttacgagaaaggttggcacgggacttacgggtccccattgacctggttcatatgtggttcctagttcaagtcgtttgatcttaatttcggctactttttataattaattatttgggtttgggctgggccatgtaagcccaatataaaaacaaaaaaacacacagtttcactaacgacgtagaaccatggaaaattttactcatgggcctatttgcttcaatcatctttcttttttgtcacttcttgatgccttgtctcttatttggaccacaaaatatctgttgcagcaacaaaggaaaaaaagttgtaaacgtttaatttgttttctgtttataatgtaaatgtaacaaaatctcaagaaaagtaataatgaaacattcgtttctcaatatcctttgacaagaagtataagaagaaaagtagctacaattgatcaatcacgtgacccacattagtattaatcacaatacttaataattgcttataattattacaaacacaacttcactgtgactattcttgagttggttcttcctacaagtggttatatatcttttgacgataatcttgtgatatgaattaatgaagcatatgttctaactaacaatggaaaactttctggtgactacccactttaccatcattaatgattataatttccaaccttacactatataacgtatcaaacagatagcaaatttacattttgcaattattaagaacttcaagcacttatcttgtgcaataaggtcgtcgccccattctcaacctcacatggttagttatgaaatcatttgtgtatttcgattgtctcccctccaagctaagataaatcataattactaaacatcataaaacctcacactgctatctttgcagtatattctactattatctttatcttgagtaactgttactatcatttgtctctcttcgtacccaagttttgacatgtgacatgtcaactaacactttcacttccaacaaaacacttgtttattcaaattcatactatacacttctcatataatttacgaacattttctgttgtcgtataaaatatttctatacaatttatgctgttttcttattctcagtttctcaccatacaatactaacagtaatagaatatgtgtctatcggtgaagtgggtgtgtcggcgtacataacgaagggaccaaattgatcatttattaaatatttaatcaaaagaagaaaaacaaaaagaatcaaaaacctccatgaaataaaataaaatcctctctcttcttcttcatgtgaatgtctgagtttcaatgcatgtgctcgctcttggatctcaatcgttcttctacagctttttcttcactctcttctctatcccttagctgtcacgaaacattctctttcactcttcccttctctctccccaaaataaatcagaaacctatcaacattcttcaacagccacaagtaaaatttatagacatttctgtctgaagaagaaaaagattgaatttttttgcttgttgtgggttctttaatg

SEQ ID NO: 19481 - DNA, 3003 bp, Unknown; identical to SEQ ID NO: 19480
  misc_feature (1)..( 3003): 2750-1469P.txt file - cDNA_ID_1822019; gDNA_ID_2926191; Annot_ID_141027

SEQ ID NO: 19482 - DNA, 3000 bp, Unknown
  misc_feature (1)..( 3000): 2750-1469P.txt file - cDNA_ID_1822027; gDNA_ID_1620666; Annot_ID_48051
gaatttgtggtgcatatatagtaaacgtactatggtctatgggcttccaagcctcctatccaaatgatatgatcacataacccattatttgagattacttcaagcaataagtggtgttaggggaacaatgatttaacttggtttccagacaataccctaaaaaattcagccaattttttttgtagtttcttgcaaagtaacgtttttatgtgttataaataaaattaaagaacaaaaaaaacaagacatcaagcgtttgagaaaacataaaactctaatttacataaatgagataataaaattattttaatttttctgtttaaagaaaattaggaagaggacttaaaaagttaattaattagtcgctggtacccattgcggccttcttagtttctcattttatttttaatatataaaccagctgattgttttgtatgttgtacgctattcatcatatatacgaacaaaataattattcaacaatttcagaaaacaattgcagctacagatcgctattttacacttagaattgtcttcttaattaataaccattttccaatttatgtttttaagttcatttaaaactatatatatatatatatatatatatatatatatatatatatatatatgttgaagtttgtcatttttggaagaattgtgttgaagtgggaactatttaaacatttcattggtaaaaaagggtctaagaatcatcgatctctatatagattaggtgctaccatctacaaaattttagaagagtctaaaattcagaatggaatagtcatcactaaatcaattatgagtgtcgaattaattatgtagtccagattttgcttatctactataagtattgtcgaattaattatgtacaaatgtagagtgcatatatagactatgcatttagaaagcataatgccttttgtttttgttttctctctttttctttttggtaaaccttcgtgatcaccttatctcttttaaagctttaaccaacatgtaacttggcagagaaaaacatactttagaaaagaccatatataatatacgtttagaactcattaaatagaagtctacctatttattctctaaacaaatattaaaatgatttaaacgtcaccaacgatatttatcgcaaaagtggtaaatttctgtcaattaaaatgtatttttgaaaaaaaagtagaaaaatgttattaaaataaaataaattcattgaagaattttttgaacaagtttagattatggcaatctgttctttacctcattgtcatcaaaaccatatctcttaatttatttttttgtcaggatcataagagcattatacgctaattgaatagcgattgatgagtttcttatcaacacattttgcagttatgcgaatcgttgaaccaaacttgtcgtatctttgctgatattcagaaattattatcttacaaaagaaatgggtgggcatgtccatctctctgtgaacaagaattctccacgttcactaaaatctaaaaatccgaaaagcaattgaaaacgatttgtagagaataataataattaagaacaaaaaaaaaagaattatcaagaagaagaagaatcgagttctttgaatcgcgtcacatgtttatatataaaaaggcttctctgacctgttcagcatggtccaaatattcacttgtcaacttcttaggccatttctagtatttcttgagtgaacgaaaccctaattaacctctttttgtttaaatataaactaaaatatatgaaataagtcttttatgagataatcattgaaatatatataaaaatcgaatttagttgttctgacaaaacttgaaatttatcctttaatcaaaaacaaagagactacttgctacatttgtgagataatcttaatggtataatacaaacgatcatatattctcaaatgttattatctttaactaaaaaatattaaaatcatactattagtgttctgtatatacgtgtcttatgttaacgtatcttttcaatttattttagttagaactttgtagtttgtacacttgttcaatattttctgctgtttttattattactttttcttcttttttgtctcttttgattcttttatattgaagtcttgcctaactctcccaacacgtgtacaattcacacggacgggaaaatgcattccacgcgtgtctgattaatactcttttgttcataaaaacgtcttagtgccatttgttttactcaatagatttatctgtcaaatagttagtgcttcttcttttctttttctgactccaatctatgtagtgatcgagtgcttcaggacaaactaaatatcgaactggcctctaattatttggagcattttgatacacatcgttgttaggcttttgatcaaaattctagaagaaaggacaactggcttaacacgtgtcgataaactttagcttttcctgacggttcatgcacccgaacggcaccaatatagtcgaatatagaaataataaagcttcattgctttctcagtggaaaaaaacttactataattagaatatttctagtaaatatttagacattttacatgtcacgatggaataagaaaaaataaattactgcaatcactcagcggacttttctcataatcgtagtacacaaatttcttactcatgagaaaattttcctcgtgttttttgcacatttatatcgctggaaaatattgtacaacacatcgataaggtcggccagttcatagacgtggcagtatctaaatggttaaacgggtccacaaagaaaatcgtaattagattttagaacagtaagacaaggacgaccgtacttatccttgaagaacctttggcttttccgtagcctatataaaccaactacttactatattgtccaaaagatcgacgaacataaaaacaaaaacatataatttgggtttttagagttcgaaacttgaaatctttttttttttggttgctgaggaatcgaagtagaagagtataaatg

SEQ ID NO: 19483 - DNA, 3000 bp, Unknown; identical to SEQ ID NO: 19482
  misc_feature (1)..( 3000): 2750-1469P.txt file - cDNA_ID_1822027; gDNA_ID_2926191; Annot_ID_141025

SEQ ID NO: 19484 - DNA, 3003 bp, Unknown
  misc_feature (1)..( 3003): 2750-1469P.txt file - cDNA_ID_1822030; gDNA_ID_1620667; Annot_ID_48084
ggaacttttatacgtttttttctctcaaaatatttaacatttactttcttctttatacaacgtttccttctacatagaagatcaaaagaagttttgtatagtagatcaaatactatcatcacttaaccaaattggcttgatatactgtcaaatcatgaacataaacggtcgctgtacttagagttgttcaatacaacaatcttgttcacgagccgtgcctattcccgactttttccaaagtagttgatcaatttaaagcatccacactagcgccacacatacaataaatattatcaatgtatacaaccaaaaaataatgtgaacaacgttataacaaactatagagaagattccaataatgatgatatgacttatatacatgtctcgactttcttttgtatagctgcgataaaacataactttttgttattctgggaccattaattataatgtttcacttaaaaagtgattttggtcccaaaatgttacaggtactaattaccaagttctacaactaggttaaaagtgaaaacacacactcacaatatagttcgactatttatctatatattaaatcagtatggttctgattctactgagtaccgagatttatatatataacttccatgctctaggatttgtgtccggaaagtgttattttgatctgttgccaattttgtgtccggaaagagtcatctcgaactttatcgacgttgtctaatttctgttttcagttctagtaaaacttttattcatttactaggaaaaaaaaggatccgagtactcaacatacataaaaagaattcaggtgcctaaaacttagattcgatcatatatataaaaatacaacacataccatacatgtatcgttgttttttttgtgtgtgtgtgtgtagccatgttgccattttgtagtacaaaaatgtctcatgagtcttgtaaaagacacgtgataacggcttccttcgaccaaccaaattactaatttccaaaatatagaaatcggtggaccatgcgtactccatacctcccatttattagttttatccgaatcctatgccaattcttcacttgtgttgtacgtatattaattaggaacaagtaaatttctttaaagtgttgaagctatatatgatctacactgaattgtgaactaattctgtgatctataggcatacgttatatttacagttaagattagttatatcatatagcaagtttagattttgaaattacatcttcctcgtttttgttttcacaaaaataacaaaagtaacttgaaaaattagtgatcatctcggcctcaatgtgtgcacgtgatctgacgttgaccgtaatattatagtccggagttttttttttgtcgtatcctattctttgggtgcttgtataattgcagttttgggagtaattaaaacacaccaagtccatatttttcataatggaaatttggaattttatttgagacagtaaacatttcgatagtttattttataacaacctaggattttcttttgttccgccatatttagaaacaaatcttagtccatcacttacagtcttacactgttaaacactattcatctcgatcatttttaatgatttttatagtaatcatctttacaattgatgagacaaatcaattttgagtggttgcaaaatagaaaccttaacttaatcaaaagaggcctgatattaattaagagcttccacaaatttagaatctttcttttcatcatgattaaaagggaaaatatatgataattattttggattattactattttgatgagtagaaagatttgactagcttgagtggacattgttctccttttaccatatttattgagaaaataaaaaagaattcgttatttaaccaacattatttcaaatgtagtaattttcgaaagtaaattttaatggatatttccaagcattcaaatagtcaaatggaccaatgatattactaagaaacatcagaaaaaaaagaaaaacacaagaataagaaaataaaatgccaacgactagttttaaaatctgtacttttttttcctagaaaatttgtacaaaaaataacaaaaacccaaggcgtatattcaaaggtcgaaactttatggtaatgtactaatgtctcagtgaaaaaattcagaaactttttaataccctaaattttttttttttttttttaataccctaaaactttttaataccctaaatctttttaatttaggaaaagaaagaaaaaagaacatactaatttctattgcatgcttctctcctacaaacggacacttctttattggttttgttcctatcataagcctctgtgttcgtgtctgcaacagatctgtctcctctttcatttttctttttctctttagaagaaaccggaaaacaacaaaaccctctacccgaaagggaggtttttaaagcactgtgccaaaaagccatcgttttctccagaaacccatcagtttcctctgaatcctgcatgtgaaagtttggtgaagaaagaggagagagatctgtgatttcctttaaaacgctgccgtttctctccttttttttgtttctctttctcttgatctctgttgttctgtggctgatgatgtcactaacaacgatgcccacttgcctccatcaatttttcaatctctctcatcttctttaatgtgatacaagttctcatcttcagtgtataagaatcataaattttgatcctttagcttctctgtttcttcttcttcttcttcttcccttgtaacagagagctcgaaagttttcatttttctttctttccccatctgggttttcaatttcactaatttactactcctgatttgggttttttgagattttgtggacttaaagctattgccatagtttgtcacacaaaatcacttcaaatttggaaactttttgcaaaaatgagatacaattcgatttggtacttatgcaagattccgaggaggaaagagatgatatttttctgctgaattaatg

SEQ ID NO: 19485 - DNA, 3003 bp, Unknown; identical to SEQ ID NO: 19484
  misc_feature (1)..( 3003): 2750-1469P.txt file - cDNA_ID_1822030; gDNA_ID_2926171; Annot_ID_140129

SEQ ID NO: 19486 - DNA, 3000 bp, Unknown
  misc_feature (1)..( 3000): 2750-1469P.txt file - cDNA_ID_1822034; gDNA_ID_1620667; Annot_ID_48083
aaaaaaaaaactccggactataatattacggtcaacgtcagatcacgtgcacacattgaggccgagatgatcactaatttttcaagttacttttgttatttttgtgaaaacaaaaacgaggaagatgtaatttcaaaatctaaacttgctatatgatataactaatcttaactgtaaatataacgtatgcctatagatcacagaattagttcacaattcagtgtagatcatatatagcttcaacactttaaagaaatttacttgttcctaattaatatacgtacaacacaagtgaagaattggcataggattcggataaaactaataaatgggaggtatggagtacgcatggtccaccgatttctatattttggaaattagtaatttggttggtcgaaggaagccgttatcacgtgtcttttacaagactcatgagacatttttgtactacaaaatggcaacatggctacacacacacacacaaaaaaaacaacgatacatgtatggtatgtgttgtatttttatatatatgatcgaatctaagttttaggcacctgaattctttttatgtatgttgagtactcggatccttttttttcctagtaaatgaataaaagttttactagaactgaaaacagaaattagacaacgtcgataaagttcgagatgactctttccggacacaaaattggcaacagatcaaaataacactttccggacacaaatcctagagcatggaagttatatatataaatctcggtactcagtagaatcagaaccatactgatttaatatatagataaatagtcgaactatattgtgagtgtgtgttttcacttttaacctagttgtagaacttggtaattagtacctgtaacattttgggaccaaaatcactttttaagtgaaacattataattaatggtcccagaataacaaaaagttatgttttatcgcagctatacaaaagaaagtcgagacatgtatataagtcatatcatcattattggaatcttctctatagtttgttataacgttgttcacattattttttggttgtatacattgataatatttattgtatgtgtggcgctagtgtggatgctttaaattgatcaactactttggaaaaagtcgggaataggcacggctcgtgaacaagattgttgtattgaacaactctaagtacagcgaccgtttatgttcatgatttgacagtatatcaagccaatttggttaagtgatgatagtatttgatctactatacaaaacttcttttgatcttctatgtagaaggaaacgttgtataaagaagaaagtaaatgttaaatattttgagagaaaaaaacgtataaaagttccaatccatttaagaagaaaaagaacatttaaatgttgacaaatggttgaatttatttgtgatttcatctctgacatatgtatctgattcccaacgtatttgtaattaatgtgatcattagaaccacattaaaatacagtactacagtatgtatcatggtttagcgtttctgcaataaatacttccatactgttatctatacccaaaagaaaatattggagacaaatttgactttttctttttgtacatttgactttttaaaatagaacaggtagtataattagtgttgcgaggatgaatttgttttttaattaagggatgagtttataaaatacacctaaaaatcgaggttgttgtagttccaaaatacagtggactaaaaaggtgacttcacataggtagacatctctctgacgcataaactttaacgttttaatttggaaagtgttttgattctcgagcccaaactgatgctttaacacttggaacttgtaagtggtgaagagaatctttatctaataaactcaggatttactttgctataaacttataaccctatttttataaatttgttctaactaatgtagacaaatgttaaaatccaaagaaaaagaaactccatgatgtatttgttctttaaaaaaatataatttgaatctaaatagtaatgtattttgagaatttttacctaatttgaatcttttgaatatatatttttcttttgtgcaccaaacaatttggatattcaatttttgaaattttggctatccgtagatggacaaatacaaaccgatccaaacatagaactcactgcatatttcagatggaatttcaacatccaaatctaaaatttcagtacctaatacttagaaaatgtctaaacctaaatggctaaatttatgtacaaattagaaatcacgtgcccattgcccaccattgcttctttgcggcggcattgctaggctccacgtgtcagtcttgaatattaagcaaaactaaccaccacacagaactaaattgtcccccacatgttcttctatgtaatgtttgataaagcctagtttcagttatcctataaaatttactagtctcaaacaaaagtcaaaagctcaagataagaaaaagccagctctattacatgttactatgatgacattggcttaagaatagtaacttatacatacttaaacaactgaatgttttatgtggttattttcttaaatctcattatcaatatagtaaaacaattggtagtcctcaggtagcaagtgcaacaagctttttaacttctgtttagtttggtatttataattaagttttcatatgcttaacaatagcgtctgtagtccaacggttaggataattgccttccaagcaatagacccgggttcgactcccggcagacgcatttcctcattaaatcttttgcgtgaaacttcatcagagtaaaactatgtcgtttgaattagatcggtatcaccggaaccaccctaccggttaattaaaccggaaaacaaaccgctgagacttccccacgtgtgtggtctacaatctctatcgattccacagcacaaaaatcttttgcgcttttgagatttttccagaattcaatctttcgagtgttgttgaattcagaaatg

SEQ ID NO: 19487 - DNA, 3000 bp, Unknown; identical to SEQ ID NO: 19486
  misc_feature (1)..( 3000): 2750-1469P.txt file - cDNA_ID_1822034; gDNA_ID_2926171; Annot_ID_140128

SEQ ID NO: 19488 - DNA, 3000 bp, Unknown; identical to SEQ ID NO: 3824
  misc_feature (1)..( 3000): 2750-1469P.txt file - cDNA_ID_1822077; gDNA_ID_1620667; Annot_ID_48069

SEQ ID NO: 19489 - DNA, 3000 bp, Unknown; identical to SEQ ID NO: 3824
  misc_feature (1)..( 3000): 2750-1469P.txt file - cDNA_ID_1822077; gDNA_ID_1620667; Annot_ID_163981

SEQ ID NO: 19490 - DNA, 3000 bp, Unknown; identical to SEQ ID NO: 3824
  misc_feature (1)..( 3000): 2750-1469P.txt file - cDNA_ID_1822077; gDNA_ID_2926171; Annot_ID_140114

SEQ ID NO: 19491 - DNA, 3000 bp, Unknown; identical to SEQ ID NO: 3824
  misc_feature (1)..( 3000): 2750-1469P.txt file - cDNA_ID_1822077; gDNA_ID_2926171; Annot_ID_199496

SEQ ID NO: 19492 - DNA, 3003 bp, Unknown
  misc_feature (1)..( 3003): 2750-1469P.txt file - cDNA_ID_1822181; gDNA_ID_1620669; Annot_ID_48130
acgtgtaactgtagatgcacacagagattgtgtaataccttcaccgatagggtttgtcgaaatgactaatatataaaatatttaaaagctaaacgtttatctatagcaaacaacaacaaaaatagagttaaaaagtatagtccaaaacttgaaatgaagatttggctattagattaatagggttggtacattaatgactgatggcttatagatagatatggataccatttcattttatcgttctgcttagaacttagaagaataaacaaaacaaaagcatgtgggaagagaaagctccctttaacacctcaaatatggctaagagtccccaacacaaatcctattaataaattcacacatacaacaagtgttcatgacctaaccaacaaattcaatagagcccacttttttgagagacaaagatgcaatactcaaaataggaacaattctcttaatatgtctaattacatttttgttactagacaagtcagcatcaccaacttcaaaactaatgaaccttatttaatgtaccgaccaaaagtttaacaaaataaatagtaaatttgctagatttttatcttctgatccaatctaatccctattacgatggaatcaagttcaaaacaaaaacatgtcacaagggatcataatcggaaaagcaatctttatgtataagatatagttaggtatgtgtacacatgtgttaatgtgtataaatttgtgtatattttgtatgttacagcaaactatagaagagacaagatgttgattttttgtaaaaggaccaccttcaaaatattattattaagggttttattaattgaaacatatacatatatacacacatatgaatagatatattcacccccacaaggttatgtgacattcttttcaattctctgttctttccccttcttcgacgctgctcaacattaatttctcctttcactttcatagtaattagctaagtttttttcctcaataaatcaatctaagaaacctctaaatgactaaaccacgtatacgtttataccttctatttttttttttgtctaatacaaatttaacaataaaacattttatgttgacaaaaaaaaatacaatcaaaattttaataaagtgacccatattcgagtttcaatgatgactgcaatcaataagttgcattgtaattaaggttcattagattatcaatatctcacgtcattctacttcatcatcgatttgttttatagtttaattacaattactaaatgagagttgtagtgtcatttgtcaaacttttttatttttattatataaatagatgtgttaattaatttgtgtttgatcaaaacacaaatagaagtttaacacacctttttttcgtcaagaagtttaacacacatgaacacgcaaaagaagggggaaagcaatatgcatgatgagatgtgctgagaaagcaatgcgggaaaaagtcagcatcaaaacagctctttctctttccaattgttctatgagtttaaatactgatggtaaaacaacatatacaattacaaactgttaggctacatatcttagtccatatgtatatcacttgattaattaacattttatgtacgtatctaacaaactttaattttagatgtgcgagttttattacattattggcttaagtcttataacgggattaacatctttaaaagattgccatttttgaactaatttcgaagtaatttcggtgacactaaaaatatcataattttcacacgcacaaacaaaaattcatgatcttcaaatcatcgaatgatcatcttattagttacttatattcacaatttaaaatgcacctcataccgttactactttttataatgcagtggcttcgagtactacatctatgatattacctattagattgttcaaattgtagttgatgatgatacgtatatagaatgatggagaacatattattaggtttacgaatagtgtcattttgacatatgttacatattacatatatacaccctaattaataaaaataataattcaacatacaaataaacccctatctaacactatgattaatgaaatgataatgacttatattcaaagtttattaaatttgaataaagggaaaattataatttttgtttgaaaaataacattaaaatagaaaacgtcatttattttgtgaaacagaaagagtactaattaaaagttacaaatttaatgtgggatttaaatcagcttaactagcattgaaacaattttaatgtcactaatgctgttatttaccattcttaaaccttatcgtcaataactctatcacccagctatcataacagtttattaccatacattttttttggaaacgagttattacaaatttcttcgaatcgagttattgccatttttacgaaaaataaaacaaaaattataattgctcatgatttcatatttttctatatatgattctatggtctaaccattgtcagcatttccgaacacaactgaaattgtcaaagacaaaggtaatctaaagaaaagaaccaaagcactccaaagccttaaagtgttctttactttggttttaaaatttgaatctaaaatgaacagaagaacgttcctcgttatatgtgtacactctctcaacactgtacttaaaaataaaataaagcacagtgtagtttcaatttcatatgctaaatgtaggattatttttccaacggtcgaaaaaagcttaaagcatttttaaccaattctttatttattttttaaaacattacaaacttttcatatttttattactctctcaagtagtctcatcttcttcttaatccaaaggcccaaactttgaatcatcactatcactctctctctctctctctatctctcaagaactgcacggacaacgacatgcttttaatttccatgcaaatctctcctttcttctcaagtcatttttgaaaatcaatcaaaaaactgaaacttggtggagcttttatcattcactcatcaatg

SEQ ID NO: 19493 - DNA, 3003 bp, Unknown; identical to SEQ ID NO: 19492
  misc_feature (1)..( 3003): 2750-1469P.txt file - cDNA_ID_1822181; gDNA_ID_1620669; Annot_ID_164040

SEQ ID NO: 19494 - DNA, 3003 bp, Unknown; identical to SEQ ID NO: 19492
  misc_feature (1)..( 3003): 2750-1469P.txt file - cDNA_ID_1822181; gDNA_ID_2926171; Annot_ID_140103

SEQ ID NO: 19495 - DNA, 3003 bp, Unknown; identical to SEQ ID NO: 19492
  misc_feature (1)..( 3003): 2750-1469P.txt file - cDNA_ID_1822181; gDNA_ID_2926171; Annot_ID_199483

SEQ ID NO: 19496 - DNA, 3000 bp, Unknown
  misc_feature (1)..( 3000): 2750-1469P.txt file - cDNA_ID_1822185; gDNA_ID_1620669; Annot_ID_48129
tgcatattgctttcccccttcttttgcgtgttcatgtgtgttaaacttcttgacgaaaaaaaggtgtgttaaacttctatttgtgttttgatcaaacacaaattaattaacacatctatttatataataaaaataaaaaagtttgacaaatgacactacaactctcatttagtaattgtaattaaactataaaacaaatcgatgatgaagtagaatgacgtgagatattgataatctaatgaaccttaattacaatgcaacttattgattgcagtcatcattgaaactcgaatatgggtcactttattaaaattttgattgtatttttttttgtcaacataaaatgttttattgttaaatttgtattagacaaaaaaaaaaatagaaggtataaacgtatacgtggtttagtcatttagaggtttcttagattgatttattgaggaaaaaaacttagctaattactatgaaagtgaaaggagaaattaatgttgagcagcgtcgaagaaggggaaagaacagagaattgaaaagaatgtcacataaccttgtgggggtgaatatatctattcatatgtgtgtatatatgtatatgtttcaattaataaaacccttaataataatattttgaaggtggtccttttacaaaaaatcaacatcttgtctcttctatagtttgctgtaacatacaaaatatacacaaatttatacacattaacacatgtgtacacatacctaactatatcttatacataaagattgcttttccgattatgatcccttgtgacatgtttttgttttgaacttgattccatcgtaatagggattagattggatcagaagataaaaatctagcaaatttactatttattttgttaaacttttggtcggtacattaaataaggttcattagttttgaagttggtgatgctgacttgtctagtaacaaaaatgtaattagacatattaagagaattgttcctattttgagtattgcatctttgtctctcaaaaaagtgggctctattgaatttgttggttaggtcatgaacacttgttgtatgtgtgaatttattaataggatttgtgttggggactcttagccatatttgaggtgttaaagggagctttctcttcccacatgcttttgttttgtttattcttctaagttctaagcagaacgataaaatgaaatggtatccatatctatctataagccatcagtcattaatgtaccaaccctattaatctaatagccaaatcttcatttcaagttttggactatactttttaactctatttttgttgttgtttgctatagataaacgtttagcttttaaatattttatatattagtcatttcgacaaaccctatcggtgaaggtattacacaatctctgtgtgcatctacagttacacgtctctgtatgtgaccgttcgtttttgtggagacagtagtgaaatggagcctcgtgtagccaccatgcattggactcaggaccattttcactaaaatgttcatactttaacattagcaattattacgtactgttgtacatttggatttctgcagctgtacaatcatatgtaccatgtacaacaaattatcaaaaatttcaccgaatattgtggcggtcaaattgagaatcatctaatctttgtgtaagagaggcgtatgaacaagtacatgagaaattaggcctatatggacgaaagatgtactcttcaagcccattttgtaaaaaggcctatcttcatggtttagtttgaacataaaggatttagtacccaataaaatatgtaaatctgcagattagtgtatcgaacaatttattatttaattttacccactaatccgctatatttaatcatctagatttgtttcacagcttttatatgcataacgtgatataataaatgcagggttgtaattagtagacctccattggttacgaagcgtccactactaagaaaatactaattaaaaacaaaataatctatatttgtgatctgaaaatgaaatcatgtaatgtatcaatatgtgggttttatagttggtaaacacataaatgacatgaccgtcaatttcggagctatacctggctcattatcgactatattatctgagataatgttaaattatttgtataaattttgttgcaaatcacttttaatggttttctataacaaaaacgaatatatgatattattccaaagaagataaagctgtatcgacctatccaaacatatagtattacgttagatagcttgctccacgtttacaagcaattgacaattactcaattagtgacatgaccacactataatgctttcacgtaacatgatgattcaatctcatagcaatatacattaatgtttttatatggactatttttaaagtacatatgctcgattcgtaatttcattcgaattttgactttacggtttaacaaaatataggaataatcaaatttaaaataatcctagtttggtaaggttcggtacaaaattagtttcactgttgattccttataaaatatatcttcaaatttgagtaaatttgacattgaaccgcttttaggtttggttaaaccatttgcagcatggcaaaaagtgaaaaaaagattacaagaagagaaaggaatcgtttgtactgtgtatgttgatgcaaaggtgagctattgctttccttaaacgttaaaagaacatcttttcggatcaattaagaaactttatcaaataaaaaatactttatattttaataccatatcgagaacgatacttcctctgcaacacgcctacaatacgccaacgaatatttatatcatcaaaccactctattgttttcatttttcaacaaaattcatctttaatttttcgatccaaggagcttctctgatcctaattaacctaaacaaaacattcattacaggtatcttaaagattatggaggaagaagacaagaaagtgatgaagtgttttagcttcaagagaatcatg

SEQ ID NO: 19497 - DNA, 3000 bp, Unknown; identical to SEQ ID NO: 19496
  misc_feature (1)..( 3000): 2750-1469P.txt file - cDNA_ID_1822185; gDNA_ID_1620669; Annot_ID_164037

SEQ ID NO: 19498 - skipped

SEQ ID NO: 19499 - DNA, 3000 bp, Unknown; identical to SEQ ID NO: 3838
  misc_feature (1)..( 3000): 2750-1469P.txt file - cDNA_ID_1822197; gDNA_ID_1620669; Annot_ID_48126

SEQ ID NO: 19500 - DNA, 3000 bp, Unknown; identical to SEQ ID NO: 3838
  misc_feature (1)..( 3000): 2750-1469P.txt file - cDNA_ID_1822197; gDNA_ID_2926170; Annot_ID_140099

SEQ ID NO: 19501 - DNA, 3003 bp, Unknown
  misc_feature (1)..( 3003): 2750-1469P.txt file - cDNA_ID_1822213; gDNA_ID_1620669; Annot_ID_48120
atatacaacaactttctcttcagacaaagttctttaaactggctgttgggcctttgcccatgtatgttttatatttggcatgttaaattggcgttgtagtatgtagtatgaataaaaacacacttgtgacagaaaaatagattaacgtttttttttgtgaaaaatgtaaaataaataaataatcttgacatataattatacaatatatacatgtctatatatgtatacctatcaaattagcaacggtagttttcaatgtatttctgtcaaaaagaagataataacgtctccaaataatcacttcccaaatcctcaaactcaaacaaaccaaacacatcacatactgtctcttctccagtaaccgtcttctgcatttcaacttcttgacacatagaatcttcattactccttcgtctctttcttaaatcgaaccaagtttcttcactcccacgcaaaccacgagtctccgagtgctccttagttgaacaatagctaagggcacaatggttttcaaccatcccatcaacgacttcatcataagccttaaccgcctcttttcctgttctcaatccgattttgcggctgcttcttaatggatcggacgtatttgagttgttcatccggtagtagtttgggttgcaatccatttccatagcttttataactgtttcgagctgaaaatttgtgtgagctttttgagtacctctaattctaaccgcggctttatcgtaagccatagctgcttcctctgcagtttggaacgttccgagccaaaccctaacaccgtttctcgtcgaatccctgatttcggctgcaaatttcccccacggacgcttccgtactcccctgtattttcttgttttgcaagaaacccgagaagacaaagaacatgaatcaatggtagggttggttaatggatcatgattggttttgtttgggaaagaagcaatagcatcgagaatctctgtccattcctggtcctccgtcgacatatctaggctttgaagcatttctctagaaccttctggtatgtcatcaagggtaggcaacgcttcccaagttctagaaacttctggaacttgaattgatcttgtatcggtttgtggtgttccgatgtaattcgcccaaacgttctttaggatctcgccgtctagttcttggatattgccaaaagccattgttgaatcagagaggagtatgtgttggtgagatttagggcattttaaagagattgttgctttgggggttttgtgtgtacgttgaatgggaaatctgcggcaggataattgggaagtacagttggtgaaacttgtgttctaaggtactgaccgcatttcatggagggttttaggttccacataaaatcaggggttttctgtgtatacacacacacacgtaccattatgtgaatagatcatcttaagtcaacttcaataaattaatttaataatgttacctcagtttgaagtataaagattgtgtactattttcattaaaaaagtgcagattgtgtactcttgaaaaggactagatgcagagtattaattcacttttgtataataaacatattaatcttcagtttaacgcttcatgagaatctatgacgtgttcccaccagaggcacaaatccgttttggagaattgtgattattaaatcaaacataagtttattgttttaatgtttcgttccacgctcgtcgcattttaaaaaactttttaactatttttttggttataaaaagaaatatagcttctaaatgacttgtttctactgttagattgatgaaccttaatactgatttagcttttcatacatcgataaagaattcttcggtgtttagttaagtttgttagaagttattattttaccatacgatcacagtttaacgcatattgcctagagaatataatataatgataactaaacgctatcaaaatgtgaaacgaaataagaaaaaacatgtaagggctaagtcatcactaactttttatccaagtattatttgtatgagatcattttccgtaagtccaaagatttgaaacaatgatgagaggtgaatagaatatataaattccacacgctttgaaacatagcttacaattgaaaaaaaatgaaaaagagattaatatctctattcaatgtattatagagaatgagctagagatactttatatggtaggttcaagtcacctcaagtacgtatcagctaatattaaaaaactatctgctaatttttatatcaatcgtttaagattcattcattcgttctccactacgagagtttcttgctttggcacatatatagttcaagaaagtctcgtgttggagagactccaagcgtgctagagcgtttcgattagaaaggtgttttgttcgagcattaaagattgttgcaatggttctatcttaaggtagtcatttgttaaattttggtattcaatctcgagagcttcataagtctagcgagcttcataaacacactacaagtcatgtgtataaaatttccaattctgtaatcacaagtctaaacttaatctgaatccaaatcacaaaaagcattttcaaaattgattaaaaaaaaaactacaatatagaaaagattttaattgatgcttggaacggaactaacattacctgttatgatttcgggcctgaaagtattctgagttttgattcagaaccactcggtattaaagaaaaagaagacttactacaaaaaaaaaattatatatatttttatgaattattataaccaactaatattgtctctattggttctaagttcaaacttctaaccttcgagggccgggttcaaattccagtaagtgatttattttttgctaacaattctcttatggcgggaaaattgacttctgtcgagaattagggtttctacaaatctttctccgttctaatttcggattaagatttcaatctctccttctcgttttcttctttggtgctgctgagaagaaattagtgaaattgtgaaagagaagatg

SEQ ID NO: 19502 - DNA, 3003 bp, Unknown; identical to SEQ ID NO: 19501
  misc_feature (1)..( 3003): 2750-1469P.txt file - cDNA_ID_1822213; gDNA_ID_2926170; Annot_ID_140093

SEQ ID NO: 19503 - DNA, 3000 bp, Unknown; identical to SEQ ID NO: 3835
  misc_feature (1)..( 3000): 2750-1469P.txt file - cDNA_ID_1822221; gDNA_ID_1620669; Annot_ID_48118

SEQ ID NO: 19504 - DNA, 3000 bp, Unknown; identical to SEQ ID NO: 3835
  misc_feature (1)..( 3000): 2750-1469P.txt file - cDNA_ID_1822221; gDNA_ID_2926170; Annot_ID_140091

SEQ ID NO: 19505 - DNA, 3003 bp, Unknown
  misc_feature (1)..( 3003): 2750-1469P.txt file - cDNA_ID_1822266; gDNA_ID_2926148; Annot_ID_197882
cgcgtccgtgggagtgatcaaagctgatgtgttcatcatccatatctgaatattctgtatatttttgtttatagaatgaatcctattgacattaaaatatataactttggatgagtctacgtatggccttttttgagatgttgctgacattatcatatactaaaataataaagtgcaatgtggttcactcgcaatagccgcattttgtcaccatttaagggaatttactatttttgtggtgaaattatgtaaattaccacatgttaaaaaaagaaaaaatattagatctcacaacttcatttgaactagggaacggttgacattgttttttttttaaatagttaagaaaatttggaaataattttgaaaagtaactttgacataaagaaaatcttgagaattgatcttttatttgttttcagaaatgattaattttatgatgatttttcttgaatcatagaaaagtcatataggaattgctccatgaacaaagcgacaagtttctccgtcatttagaagatctgtagataacatttgccaagaaaggactcacaatcacttctcaaaatgatccagctgacgagccattgatcgaaccatcttatagctgacaagacatttaatgaaagtcgcgcttacgtcacttacactcaaaacacgttcttctttctaagaaatcgtcaaaaaaaaaaaaaaatagattgcacgaaaatgccgagaatacaacttggaatgttttaactagtcccattaattcgatattttacctaggtcaagtaacactcttataaataatccttgcactctcgaagaaaaagaaatagggagtaaggtaattcaccagttcccaccttaaaagtaaacctaacttgctatatctaaatacaacaaaatttcactcatgaggaggagaacagttcacggatcatccaacttgttctctctcattccttctttcttattctcaaatggacatcatcgtgtttcaaagattttcagcacttattacagagacaatctacatttctacatctcattcattttgtcatttgtaatcaagtcattcaagttaaataataaaaagtgtgttttttctttcaaaagtttgtaatcttttgaagctttgtcaattcaagtttattggtgtgattccatagtcttgtttgattgcgtttctagtgtgtttgtgagattcaaacattctagttcgtgtgttgttgtggattcaacgacaaaacttccattttccatctctaccatcgttccatcgaatcattcaaaccgtaggccgagaaaccgagaaacataaaccttaggtaaattccaaggtttgcatcagattgctttgaccaaggctcataagtcattacttgacaccactctatctttcacgaatttaagaatttagagagactttgtgaccttttggatatggttagatctctgttattatttggttttgagagtcattggtaattgattcaacatctttatcacttaatagtgatactttttctatgtgtttttttttgttggttctatttggcttaccctttaagaattctagtggtcttgtatcttcctatatatctaataacatatggttgtttctatttcatttattttttatatttaccgcgacacgcatcagaaaacgaacttggcaacttaacaaattagctattaatcaatggacatgacatgtacatgccaaattaaattgggcttaataaaacacgtgttcgttggaaaaaattaaatatgttttgtatttttatagttaatagtgtaacgatttatcatgatctgcgccgaaattcacgctcagagttatatttgagttctttaaattattatttataaaaagtaagtcagaatatgaaaaaaccggaaacatcgatcacattaacttaaaagtaataatttttcattttaggatatattttggataccgacagctttgtcactacatcgaacaattttatgtttttttagaatttgttaatatgatgataccatttgatatccaataagatacttatttactttatattattagattagaatcatctacaacataaaatctaattatttagatgagtattatagatttgttacctctcgagtttaagatcgataactcatgttgttgaaacaagaaacataaaagatagttctgaaatttaaaacataaaagagagtttgaaattgaaaattatatatattgtagaaagtttatgacaagaggagaaagtatgattcttttagtatttgtttctatataatattaagaggaaaaagtaaagttcttatagaatatattctttcaagcaatttagctacttccagctaaatcattaaactcctttgactagcaaattaaataaatttaaatcatataaaggtaaaaaaacacacataaaatattagttttaagaaagatgaaaacaagtaaaaaacataaacaaccgaacatgtgtcaattgttttcagcagtctaatactcgtgtgactggccaatttaatgactatgactcactttcaactacctaacggtttcaaaacatgttaaccttgttttttttctttaaacaaaatcccattagttgtcactttaaatctctattattatagtaattattacaatctttttttaagaaacacttagtgacccatattaagaaaaaaataactttatttttaaacccatatcttatattttgtatctatccaattccttcctattatgtaaatttaattctatattattatattttgttgtgacatcttctcataaaataaataaatagctatcacaatttgatagcacctgaatacttcacctgaaactttccccacctctctctctcatcttatctatcaccattgcttcatctccaaatcttgaaattctctgttttattttcaagaaaagacagaaagtgaaacaagtcttttttttttttttttttggtgtggaacattgatatttgagtgacgatg

SEQ ID NO: 19506 - DNA, 3003 bp, Unknown; identical to SEQ ID NO: 19505
  misc_feature (1)..( 3003): 2750-1469P.txt file - cDNA_ID_1822266; gDNA_ID_2926148; Annot_ID_139196

SEQ ID NO: 19507 - DNA, 3003 bp, Unknown; identical to SEQ ID NO: 19505
  misc_feature (1)..( 3003): 2750-1469P.txt file - cDNA_ID_1822266; gDNA_ID_1620670; Annot_ID_48141

SEQ ID NO: 19508 - DNA, 3000 bp, Unknown; identical to SEQ ID NO: 8138
  misc_feature (1)..( 3000): 2750-1469P.txt file - cDNA_ID_1822266; gDNA_ID_1621195; Annot_ID_174723

SEQ ID NO: 19509 - DNA, 3003 bp, Unknown; identical to SEQ ID NO: 19505
  misc_feature (1)..( 3003): 2750-1469P.txt file - cDNA_ID_1822266; gDNA_ID_1620670; Annot_ID_164080

SEQ ID NO: 19510 - DNA, 3003 bp, Unknown
  misc_feature (1)..( 3003): 2750-1469P.txt file - cDNA_ID_1822270; gDNA_ID_2926148; Annot_ID_197879
taaatggagctgttttttgaagattttccagtaacatttgccataaacaaaactatcttataacttcaaacttagccattggtgcaaggaaaaccatgttttaaataacatgtgcaccgatgcttgtccacattgttgcgtcgatcatcccagcacttgcagtgggtaatagttttaaccacatctttattaaattttcgttccatttcactaaaacataacttaggtccgtcatgcccacattttccgtttgccgacagtccaagcgggcatggtggttttttttttccctgccctattttcaatcaataaaaaagtataaaatatatagaatttagttgataatacaaaaaaatgaaagctctatttttaatgcatatttgttttatagatataatcaatgttttcgatcttgtgaataaggtattagttaaatcttaacgagactaagatattacctttaacattgttcataaggaggaacatgagaaaacaataaattataagtgaagtagcatttttcatgattcagatttgtaaaaacgttttgtatcttacttggaacgttgtttttttcttaataaatatacttaacacatactaaaaatagatttttattttattcaaaaactaaaaatagaaagcagatataccagagaaggtcaaccagctagaaaaaaaattagtgtgttgtaagaattgattgatatttagaaaattaaagttgaatgcgtcaataaaaattaaaaaattgttttttgtcaatctatctttatttagagctcaaaagagtcaactctaagaaatgttgtttgcatatgtgatatgatacggttagatatcgagaaaggtagaaaaaaaaaagaaatagttgtggttggaaaaaataatgagattttcttttcattgatagtatattagtatgtggttaagaaaaatatttgactgcatcggaaatatgtggttagttaatatttgaacttttattttcaattgcctattttatctgcttgtatgattggtaaatagtaactaaataagggttatatctttaactgtctttaatatgattaccaatgaaagcaacaattaactttttgactgttgggaatttgggctgagctttacactcttaaaagaaaaagattgatgtagaaagaaagaaaaaaaaaacaccaatacataagtttcaccgcaaaaaaaattcagtgtatcatccatcaataaactgacaaacaatgagccctatataattaacagatttactctaataaatatctgaaaaatctctactggattgaagaatactttgaagttgtcacaataagtctaagagtctctttcggtgggcaagtggacgttatcctaaatctgtgaataatgggtgtgaaagctttacttaagaactagaatcgtagaaagagtcgaatggtcacaaagctccttacccgtttttggatattccttgacatattcattatggggcttgtgtagtaatgcatttcattttatcttttaaatattatatcaaagtccaatatagacacaagattataactataatttgcttattttataatataactggtagtttggaattttaggttttggttataatcttagaaaacaatgaccctaaaatttatgtcaatatcaaattcccaaatattataaaaaaatactattataaacaaattattacacattaaaagaaatgaattaagagggatcacagtttagttttcgtttcattcatatttttcttaataaaatgaaaatgataaataattggctaaactataataaaagaaaaactacatattttgggtagatgaaaaaaaacaatatccatgaatttgtcatttgttgttcactcgaataataaatttcatatttattgctatattacaattttgagtttggatatttcccctatgaaagaaaagaacatataacatctttgttgtctctttttccatgtcactcgttccaatctcatgatcccatttacactcaagatatattattgtgcaaatgagcatcaacatgatttatatagactttaaagtccatactatttcagttaacctttaccatctcctactcagattcttcttcaactatagaaaccattcacattagttttcgggtttgaagtggcttaaaggtatccaatttgtgaaagcctggaatatgctctgttccattacctccacatgccaaaaacagagctaactacatacttatacgactttaaatcccttttcttcacgtctctacctgcaataatacacatcatcatattacactcatctttctcaacctcaatcatattcacagaaaacaaacttggtcaccgtgtcgaaaacagggtttaatcgagttagttatttagaggttttggtcccgaacaaagacgttgaagttcagtgagagattgagaaggcagactcgagaaaacatgaggctatagaaacaagtctaatgggaacaaatgaagaaaaaggccttgtgccactcattattctctatctccacaaaagaaaagaagagacaaacttgaaaaaggaaatgggtgattcttattcttttagagaatctgataatgcaaaaaaacttactaaaaaagaagattctctttgagattaggacagaatatttgtctttccagagtttaacggttataacatgacgttgtaatatgccatctgagagatgataatacaaataacaagaaccacaccaaagttaagcaaatatttgaaattaaatatcaagaaataaaagagtaaagagaaaaaggagggaccttttgtatgagattataaaatgcaaagctaagttgatatacaaaactaggcctctcttccaccctatagctgaaggagattcggtatgtaaaatgccgaaaaatcgaatttgttccttttatctattgctgtgtgtatagatgtttatgtaaattttgtcaaaggagttttcagtgcaacaatcagagagatg

SEQ ID NO: 19511 - DNA, 195 bp, Unknown; identical to SEQ ID NO: 8142
  misc_feature (1)..( 195): 2750-1469P.txt file - cDNA_ID_1822270; gDNA_ID_1621195; Annot_ID_57560

SEQ ID NO: 19512 - DNA, 3003 bp, Unknown; identical to SEQ ID NO: 19510
  misc_feature (1)..( 3003): 2750-1469P.txt file - cDNA_ID_1822270; gDNA_ID_2926148; Annot_ID_139193

SEQ ID NO: 19513 - DNA, 3003 bp, Unknown; identical to SEQ ID NO: 19510
  misc_feature (1)..( 3003): 2750-1469P.txt file - cDNA_ID_1822270; gDNA_ID_1620670; Annot_ID_48138

SEQ ID NO: 19514 - DNA, 3003 bp, Unknown; identical to SEQ ID NO: 19510
  misc_feature (1)..( 3003): 2750-1469P.txt file - cDNA_ID_1822270; gDNA_ID_1620670; Annot_ID_164076

SEQ ID NO: 19515 - DNA, 3003 bp, Unknown
  misc_feature (1)..( 3003): 2750-1469P.txt file - cDNA_ID_1822276; gDNA_ID_2926148; Annot_ID_139190
cataccgtcatcgattacgcttgaactctctaatttcgtctccgatgtgattgaatcagttgattctgtatcagagccatgatgaagaagctcccaatcatccattgatgatcgaattcgaagatttcagattgggattgcaataatcagaaaccctaatggataaaaccccaaatattggaaaaggatcgcaacaaattagagcggttgatgatggaaaagaatggttcttatccactttgagaaagtaattacgtggaggtatctaattggttgcgtgtcaatctcagtcctcaactaaattttttggcattaaagtttagtagattcagagaactatagtatttattcattttgttctttcatttttattttattttttaaaacgatttaattaggattcggcaataaatcgtatggtgcggatcaaatgaattaaacaaatatgtatcggttaaaatagagtagacgatgtaagaaaaatatatataatcaagattcaaacggttgaggtgggttttgcaaataaatccatcggtagattgaaatattttcttatttattatttatagattagtatttataatagtactgaccaaaaatatagaaaaaaaaaatcggtaaaaactttagaccgattttatatagaaataaatttagtttataacggattattgtccgctccaaaattaaatggtttagtctctaatagtttagtttgtttcgaaaagaatggttcttatccactttgaggaagtagttatgtagaggtatctaattggtcacgtaacattctcagtactcaactagatcttttgacattaaaggttggtagattgagagaagtatggtatttattccttttgttctttcatttttttggtttttcacaatgatttaattagggttcacgacgaatcgtatggtgcagatcaaatgaattaatcaaatactagatgatttacccgaactatgtacagggagaaatagttatatgaaatatataaacaagtttttggaaacagattttatattatcacttgatatataagtgtgaatatttgaatatgatttagtaactgatatattttggagattttattagttaggaattaggatattctatatttggaataagattttaaattaaaatattgacccaaaagaaaatctgaaatatcattcctataattcagaaatatattcgaatattttttgtattttataagattttattttggaaacaattcaatataaaaactgaaaagagtatgaataattatgttttaaacgtaataaatttttgattatcttttattattcttcataattctatgtagttaggattgatttattgcatatcccttattttattaatcaatttatattgttacgataaggttttgggttgtaaataaattttaactaaaatgagtaaatgactaattaaattgaataaactgtgtaaaagttttaataaattgataaggtaaaaatttgaaaagaaataatattgaaagtaatcagtaagcggatacatttttaacatagattaatattgaaatattgttcatagtgaatgtgtaataaatgaaatgttactaactaatttatgtaaaactatgttccgaatatattcaagaatcatatgggctcacatatacatttagattttttgcaatttataacaaaaaaatagaatgtcatatatgttaaaattctaaatgttttctataaaacctaaaaaaataaagtacgaaacatataataaacatttatattatatgttgttcatcataatttatgatatatactttttacttgtttgctcaaatatatatggttttttgattaattttctttattaattgctactctcttaaatgtagaggaaaaatatgcataagtaccactaatggcattatatgtaattagtctagtaaatattggataactattaagtttgttgaaagtttttctggttacgacatgtcagcatgatagtcttgtaaatcacacgtgaatgtaaggttttttatttaaaatacttctcaattaatatataggggatgtatcagttaaaatagagtagacggtctaaaaccatctccaatgcacacctctatttttttctttcattttagagacaaatttattttagaggaaattagattttgctccaatgtattcttctaaaatagtttttttctccaaaatagagaaaataaatagattttactctttatatagattaaaacgtaagattcctttattttagagaaaaatctattttagagacatatattgaagcaaaatgtatctaacatagaatcacctctaaatggagaaaaaaaatagagatggacattggagatgtttagaagaatatagattcgagcggttgaggcgaataaatctttctgtagattgaaatgtttattatttattatgaataaattatcatataatagtgtaaaccaaaaattatagaaaaaaccccgctaaaactacatacccattttctagaaataaacttaggttacaacggattgttgtctaccccaaaatttggatggtgtaatctgctaatggtttagtccgcttcgagtaacatttaagcaaatcgttagtataaaatgggtaaaataagtgatactcaaatacatattaaataatgtcaactttaaaatattttaaatatttttcatgtttcaaataattttcttacaaaatatatcatttaaattcttaaagaataaacaaattttaacaagaaagtaaacgtgaaccatacttcaattcttagtccaaatgtagttcatacaaatatgacaataatttaacaaaaaataagaaaaagtattcttccgggttaaaaaaatagattcgatcaaacttaaggtcttttttgttaaagtcttcttttcgcaaaaacctaaaatctcctctcctttgtactctcaagcttcgttttttcttcttctccgtccaaatttctccatg

SEQ ID NO: 19516 - DNA, 3003 bp, Unknown; identical to SEQ ID NO: 15603
  misc_feature (1)..( 3003): 2750-1469P.txt file - cDNA_ID_1822276; gDNA_ID_1620670; Annot_ID_48135

SEQ ID NO: 19517 - DNA, 636 bp, Unknown; identical to SEQ ID NO: 3864
  misc_feature (1)..( 636): 2750-1469P.txt file - cDNA_ID_1822280; gDNA_ID_1620671; Annot_ID_48171

SEQ ID NO: 19518 - DNA, 3003 bp, Unknown
  misc_feature (1)..( 3003): 2750-1469P.txt file - cDNA_ID_1822280; gDNA_ID_2926200; Annot_ID_141468
atatttgtagtcctattagttttgtttcataagtcttaatctcacttcagttacagttaatacatgcatgatcaattctactatatatgcatatataatgcatgcatgttgtagagttgagggttatgacacaatgctatgcctattttacttgtactaattaaataaacattgaaagaaagctgtaaggaagaatatgtagataaaagacaaaaagtaaaatgagagtggaatccaatgtggacttcaactagatgtcatattttgtatttttctaatatcaatgtttaacgcatatttggatgtaacgttgggtgtcgaataattttgctttatattcttcactttaacgtctaaacatgaaccaagcacatggtggtcttggaagatgaactataaatatcaagaaaatgatgtataatgggtgatccaaaccaaagcacatataatctctagagttaaagtgggtcgaataatctctagagtttgtggaacgcatagtatctttgccatttaacgtacgtacgtatctagaaccaataatgataaaaactgtagtggattaattactcgaaactcaaaagtcttattcccaacatcaagataagtggtaaattttaatactggaataaaccattatcccacgaaagagaatattataaagtttatatattggttgactttgtgttaaataatgatgggattatattaagaaaaacttgttaaatgaatatcagaatcaataatcgtatcaattagacaacttgattaagatttgattctggtcagtaaaatatatgaaacatgctccatatgctatcatatcttcaataaaataaacgaattgaagacgagtatatcgctatcatggcaggttccaattagttatctccatcctcttttttgtttccacaaaggagccactttgtgttctttatttttgaaaatgtttgattggttaattaaccaagtgaagttgtaatactattatgcaagaattaattgcagcactctatgggtttcgtaatttggttaatagtttaatgggcctcgtacaagtcagcccattggatatatttcagattaatcgggtcgggtcacaaatgattatccttgttgccttgcctttgccaatcgtttgtttccaaaataaaaatcatggcgagacttttcgtctctatccctatgcaacccacacaaataagcttccctgcgtcttcttctcagccactattatctccgccggcgaacaatttcaccgatggtggagctgggggattatgtcttacacggagaatcagagacagttccgtggtgacgcgagcagggcctagtacgagcagctacttgctcgcgttcgccattcctgctactcttatcgccgccactgtcttcacttcaatcaaaatcgctgacaaactcgacgaagatttccttgaggatgtaagatccttcaatcttcgtcatatctaattcagattcgatttttgtctagctctctagtgttttaccttgctttaggtctagtttgtctcagtcttagtttaggtaatcgtggttaagcaaattttatttgggggaaacaattaagcaaatgactaacttttgaattttgggttgaattggttcaagttgttgaattaacggcatcgttagaaagtaagagataatcacatcctctaagagcgcattgcaatctaatagaattgaatctatctctttctggaaggagctcattcttatatccttgaggtggaatggatagaaacagtgttattgtatcatctataaggtctgtaaaactaactgctttgtactattatttttctgcttctgtagattgcgttgaaccaagcgataaaagcagcagaaaagggagagaatggagaaggtgatatctcactggacgatgtgattcaagaacctgtgcttcaacgaacacgtaaccggcctaaacgtgaagtttaaaaacgcacacacagcttcttcatgatgggaatagacgttgtaactgtaatacatgttgtgttttgtataagaaaatttaagcgtgtagcctttcctagtcccgtttatagttgtagttactggttttacattaccgtttgatcattttgtaaagaaaaaacggatgatgaatcaaaaacctcattacagttaccattttaagttgagagcagattattttattgtggccgagctttcttctgctgtaaatttgtaattttggaagaaatagaaggacatcttttgtatgcttccattgaccaaatactgtttcgtgtaatcgtctaatccgttttagattgggcttttaaggcccagtatgagttgtctctttacttttgaagtagtagtgtttaggaattcttctcttcgcttcaaatcgacgtctgtgtgaggttaaatcgcgtcgcgttttcatctagcagttttttttggttcaaacgaacgagacacaccagctaaaggccatttgcgttagatctaaggagagagcgacgtatacgtggtttcaagcaaattctccacgggaaggagattaacgagcaaagtcgatttcagtctcctttgtggagttttctcttcaacgcatcgagggtatggtttagctcagtttcgtgatttctagcgtgttattcatcgagttcctgtgtgtaatttgatgatctccaattgtggttattggaaacgagtttggatttagcttctgatgggtttgtttttcaattgaatctggagattgattttcgtttagctgctgcacaatttgggtctgtttttttacaaaatttaaagccacacaagctttttatttgtcttgttcataattctaagccactatatttgtgtcggtatcatataagttttgtgaaatttagctcagttttctttgttgtgattggattctgcgtcaatcaggtggcacgaaccatggttatctaaacttggtggtgatccacgaagagtcattgtgggaacaagaacacagtgaatcgaatg

SEQ ID NO: 19519 - DNA, 3000 bp, Unknown; identical to SEQ ID NO: 3884
  misc_feature (1)..( 3000): 2750-1469P.txt file - cDNA_ID_1822288; gDNA_ID_1620671; Annot_ID_48167

SEQ ID NO: 19520 - DNA, 3003 bp, Unknown
  misc_feature (1)..( 3003): 2750-1469P.txt file - cDNA_ID_1822288; gDNA_ID_2926200; Annot_ID_141472
aattcaaaaaccaaaaatattagttatgatccgtatgcacaaaccgtagatttaaggaaacgaattaagacttaaacagaggtcactgacgttgtaatgacttatgtgctgtctttttctatcacaaaatgtcttaatccaaagtattaattagtagtagtagtagacccatttaaaaaacttttccaccattaaatagaacaaacatttcatgtgttcttgatagttgatagttgataccaacacatgtctaatgtttaatatggttatgctacagccacaacttaacaattatacattagcatgattgcatctacatataaaaataggtattgattttttttttttcttaacctaaacgagaaattaactgatcaatgaagtttcacatcaaaattaaatctcactctaggaccgattttcctggttcaactctcaaatacatcggttcgttctgatcattgatttgagtggcaaagtctataaaccggggtaatgccttcccaaacgaaaccaaaccggaccgaaattctcattttttgtgagcttccaaatcagacattagcttagccggtttagcctttttctgtcggtacttggcatatgagtaccacacaccaccagctgtgttgaccactaaaccggacacgttcaaagcatgtacttcaacaccacccaagaggacaaaaccgagcgtctaggagattaaaaaggaggcaaagattagtaaatgattgcctctatagatttcatctcgaaagagagccaaatgagggtttatacttacagtggaaccaacgcctttgagaacaccaacgatggttgttgttagtgcagagttcacaatggtgcaaagaaacatggtgaagttgaggacaatgcccataaccagtgaaagaatgagaatcaccaagaacggcaaataagaacactgtcaaagaaaaaaaaattgattttgacattttgaagagactagtttctgagaatagccgcaagcttggaatgatgaagtttctaacctttgcaagtaatagtgatagagagtttgggaattcgccggtaactatgatgaggatggacaaaaatgggagagaaaggaagctgttatagaacattatctcgatggaggaaagcccgtcttctgcaccagacttctccaccagcacaaggtacatagtctgcagcaatgatgagaaacaatattcatttactcgtatgggtgagtggagactgatttaagagaaggaaaagaacaaatgaaaccaacctggaaaaagacagatgttaaagccaaaccatacccaaaaagatcaaaagaaaaatcaccaagagctgcaattacacagcctgcagcggtaagtagtacagatagagcaacctgaaaattaaacaaaagattcagagcttgaaacattatacaaattcacaataaaaaatcaacattcttatggtaagtacctgagttgttggtttgcctttaccaaacaaaaccccagaaatcaaaacagcaagtggagtgagtctcttaatggcgatatacattggaatgtttactcctttcaaacttgcaagagcaaatgcaacattagcattgtagaagatagaaaccggaagaagctttttggccgtagccatatcaattcctttagctcttgtgtatcccattcgtctaccaaagtgtataagcaaagaagtagccaattgctaacacaaccaaacaaaagcaaacgggaccgaattcataatcagcatttacaggaagtgaataatctctttagatatctagtacttgagaaatatggatatcagtacctgaagagtaagaacagtcatggaatgtggatactgcataatcacagccttgttgataaaaaccattgccattgaagcaatgccatatgaaacagctgcgactaaactgcatcatagaacaaaccagtaaataaggttacttaaaatgtctatagctttgattctctataactctctagagatccagatctacccagatgaagaaccgcaattcaaagtttcaaaaatcacaactttaagaagttatcgaatcctctgaaccaataattatcacccctactaactaaatcgatcagaaacatccctaatcgaattgaatttgaagaaacagagcactaaagaaggagactacagtacctaatggacgaggtaggctccatttcagcttgaacctccatggggaaagaagagtgatttgagttataaatctttggaaaattcctctcagggtacacgtttcttggcagattcaacgtgatttagacgcatttcgagaagaaagagcgattaaaaattacttctttatcagattttcatttcaatttacagtttttttcccttggattgaggatcttagttcttaagcgaggttacagctttttccagtggattactaaattggacgagagagtaatagtcaacactcaaaaagtctttaaccttctgtcggaacaagaagggcttgctgtccgttgctcatctcatatagtaaggcccaaaaggcccaaaggcttctttttccaattaaaactaatttttgtatagcgaaattatgatgaagaaaatcgtttcatggcacgtcaaaaaactttcgcacaacaatttttttttacaaaagggtcacttttatcagaacctaatctatcatagagttcccatcaacaaaaaacctatcatagagtctagtcctgtgttaacgtaggtgatgggttggtttcatggtttacatggacaattattatggtgtaagaaaaagatgatgggtacacatattccatttaaccaatgtgaaagattcacatcacctttttcgatttttaatagattcggttttaccttctcgtaacgtaattctaagaaaagaaaacgtcaatcatatttactaggaaagataattataatttattgctttttctctcactctctgacctgaaatctcctactgagatttttgaagtgtattcaacaatg

SEQ ID NO: 19521 - DNA, 3000 bp, Unknown
  misc_feature (1)..( 3000): 2750-1469P.txt file - cDNA_ID_1822304; gDNA_ID_1620671; Annot_ID_48163
tgtttctattagggcatgtcagaagacttcgaagtaagcaaaaccaaaagagtaaaaactatcttttcgctttttgcattattggatttaagtagaattgtaaaattaaagaagtaaacagagtagtactcttccaaagcaactcaaaagctccaaaatttctgtgaatctccccaagaacactttttggatctttaattcgaagtgatcggcaatgaagaatccgacactctttgctccaaaaagtccacactttttccagcctattcttcccggtttcaagagccacatcgtaagtaatctctctgtttctctctctctgaacatatagactcatgtcacagttctactcgtttgttgcagaaaatccctgtgaagttcttctccaagcatatagagggaaaacacgagggaaatactgtctatttgagatcatatccttcgaggagaacgtggaaagtgaagatggagggccataaactcactgaaggttggaaagagttcgtggaggcacatgatcttcgagtcggtgacttcgtcgtcttcaaacacaaaggagacatgttgttccatgtgactgctataggacccagttgctgtgaagtccaatacgcaccatctcgtagccacgacagaaacgaagagagtgatgaaattggtataacataatcatcattcagagagcatttagatttatctagactctttactatttgttaagcgttagatttctgcttcaggggaatcttcaagaaatgagaaaattattgaggagaatgtgaaaacagaacctgatcagttttcaccagatctaacatgttttagccaatctgtgaccgcttcaaacctaacgagagatttagtggttagttagttatgattgtgttccatatatcgattttagagtttgagtatgtgtgactgtgtttgtgtttgtgtttgataactactgcagggtattcccagagatttcgcaaagcgatatggtttgaacataggtaggcatgagatagttttgatggacgaagaaggaaatacatgggaatcagaagttaaaagttacaagtctggtcgggtttttatagctggaggttggacaagtctctgcactgcaaataaattagaagttggagattcttgtacatttaaactgctccgcaacccgaaaattcccgtgtttcggctctgcagccgcccaaaggctggagcagaggctcggccacacaagagatctcgagtccaaagtagcagcggggggagtagacagaagcatgacgtgaggcagaagttagatgaagaaggagggccatctcgttgcactcggtcatctaacaaggctactggtgatcaagaaaagttgcagcaaacgcaatcttgctttatctttgatcatgtggctaaggtgaaacagagcgttgaagatactttaaatagtattagacggttccgggctaaactcgagacaaaggaacataatttggaagctttgttacaggaaacgaaaactaagttatgatttgaaacatgatctacgcatgtatggagcgttaggttggactttttatagcactctcccacgtaatattaaactactagctacaatgggggatcaagaaagcacattcgttttagggtttaatttattttagggtttcttcagtaagagtttttagattttcttttaacaaaaaggttaaatgtttagattcttttaccaatatagtactcactagaaatatactccacctcaggtaatgcagaggccataaatactagctgagttccctgactcattaatggaaaataaatgttgtgactcattaaaacaggtagcgggatgtctaataaataagaggagccatgagatgataacgaaaagacactgatctttaacttagacttgagtcatttttttgttgaacaatggcggatccagttcttcaatctacgacaaacccacatttctttcagcctcttcttccttgcttcgactcctacctcgtactctgtctctgtccctttctacgagcattagcttattgagaaaggtggtttcgttttaaaaactctttttcatatttttgcagaacactcctgtaaccttctaatttgtaaagattaagttatttggatctttatgtttgtttgtttttttttttttttttttttttttaactaaaatatatttatagaattgggcttcccagaaaatgggcctggccttgaacaaatacaattcagaaaacagccacaaaaagggttaaacggaaaagtcgaatgcttcaccggagagaagatccggacctgctgatggacggaggcaaagaatgagatagataacccagcaaacacaagacccacggtttagttaccacatttggatctttatgttgttgattcatttagttaccacatttatatcaagatttttttttttcaactctttttttacatttatatctagagatattggtagaaaaatgtaatgagtttattatgttacttcttcttttttatatacagaagatttatttcttttacattaaactttatatattgacccatacattctaatagaaacagttaacatagtgatttatctttttgtcaaccatttaattaacatgcataagattggtcaatttattccctgctttatgtgatttagttagttttttcataagttaaataacagagactaatgaagactctgtttataagtctgtgcttaaacaaattatgtacgttaattctctgtaagttttattcacatagttgactttattgaggatcccatactgtttctattattgcatgtcagaagacttcgaagtaggccaaaccaaaagagtacaacatatctttttacttatttgcattattggatttaaaagaaaacagagtactcttccaaagcaactcaaaagctctaaactttctgtgaatctccccaagaacaacaacaaccttcggatctttagttcgaagtgatcggcaatg

SEQ ID NO: 19522 - DNA, 3003 bp, Unknown
  misc_feature (1)..( 3003): 2750-1469P.txt file - cDNA_ID_1822304; gDNA_ID_2926200; Annot_ID_141476
tactgtttctattagggcatgtcagaagacttcgaagtaagcaaaaccaaaagagtaaaaactatcttttcgctttttgcattattggatttaagtagaattgtaaaattaaagaagtaaacagagtagtactcttccaaagcaactcaaaagctccaaaatttctgtgaatctccccaagaacactttttggatctttaattcgaagtgatcggcaatgaagaatccgacactctttgctccaaaaagtccacactttttccagcctattcttcccggtttcaagagccacatcgtaagtaatctctctgtttctctctctctgaacatatagactcatgtcacagttctactcgtttgttgcagaaaatccctgtgaagttcttctccaagcatatagagggaaaacacgagggaaatactgtctatttgagatcatatccttcgaggagaacgtggaaagtgaagatggagggccataaactcactgaaggttggaaagagttcgtggaggcacatgatcttcgagtcggtgacttcgtcgtcttcaaacacaaaggagacatgttgttccatgtgactgctataggacccagttgctgtgaagtccaatacgcaccatctcgtagccacgacagaaacgaagagagtgatgaaattggtataacataatcatcattcagagagcatttagatttatctagactctttactatttgttaagcgttagatttctgcttcaggggaatcttcaagaaatgagaaaattattgaggagaatgtgaaaacagaacctgatcagttttcaccagatctaacatgttttagccaatctgtgaccgcttcaaacctaacgagagatttagtggttagttagttatgattgtgttccatatatcgattttagagtttgagtatgtgtgactgtgtttgtgtttgtgtttgataactactgcagggtattcccagagatttcgcaaagcgatatggtttgaacataggtaggcatgagatagttttgatggacgaagaaggaaatacatgggaatcagaagttaaaagttacaagtctggtcgggtttttatagctggaggttggacaagtctctgcactgcaaataaattagaagttggagattcttgtacatttaaactgctccgcaacccgaaaattcccgtgtttcggctctgcagccgcccaaaggctggagcagaggctcggccacacaagagatctcgagtccaaagtagcagcggggggagtagacagaagcatgacgtgaggcagaagttagatgaagaaggagggccatctcgttgcactcggtcatctaacaaggctactggtgatcaagaaaagttgcagcaaacgcaatcttgctttatctttgatcatgtggctaaggtgaaacagagcgttgaagatactttaaatagtattagacggttccgggctaaactcgagacaaaggaacataatttggaagctttgttacaggaaacgaaaactaagttatgatttgaaacatgatctacgcatgtatggagcgttaggttggactttttatagcactctcccacgtaatattaaactactagctacaatgggggatcaagaaagcacattcgttttagggtttaatttattttagggtttcttcagtaagagtttttagattttcttttaacaaaaaggttaaatgtttagattcttttaccaatatagtactcactagaaatatactccacctcaggtaatgcagaggccataaatactagctgagttccctgactcattaatggaaaataaatgttgtgactcattaaaacaggtagcgggatgtctaataaataagaggagccatgagatgataacgaaaagacactgatctttaacttagacttgagtcatttttttgttgaacaatggcggatccagttcttcaatctacgacaaacccacatttctttcagcctcttcttccttgcttcgactcctacctcgtactctgtctctgtccctttctacgagcattagcttattgagaaaggtggtttcgttttaaaaactctttttcatatttttgcagaacactcctgtaaccttctaatttgtaaagattaagttatttggatctttatgtttgtttgtttttttttttttttttttttttttaactaaaatatatttatagaattgggcttcccagaaaatgggcctggccttgaacaaatacaattcagaaaacagccacaaaaagggttaaacggaaaagtcgaatgcttcaccggagagaagatccggacctgctgatggacggaggcaaagaatgagatagataacccagcaaacacaagacccacggtttagttaccacatttggatctttatgttgttgattcatttagttaccacatttatatcaagatttttttttttcaactctttttttacatttatatctagagatattggtagaaaaatgtaatgagtttattatgttacttcttcttttttatatacagaagatttatttcttttacattaaactttatatattgacccatacattctaatagaaacagttaacatagtgatttatctttttgtcaaccatttaattaacatgcataagattggtcaatttattccctgctttatgtgatttagttagttttttcataagttaaataacagagactaatgaagactctgtttataagtctgtgcttaaacaaattatgtacgttaattctctgtaagttttattcacatagttgactttattgaggatcccatactgtttctattattgcatgtcagaagacttcgaagtaggccaaaccaaaagagtacaacatatctttttacttatttgcattattggatttaaaagaaaacagagtactcttccaaagcaactcaaaagctctaaactttctgtgaatctccccaagaacaacaacaaccttcggatctttagttcgaagtgatcggcaatg

SEQ ID NO: 19523 - DNA, 3003 bp, Unknown
  misc_feature (1)..( 3003): 2750-1469P.txt file - cDNA_ID_1822330; gDNA_ID_1620671; Annot_ID_48153
acactaacatcaaatgcaaattatgaagtgaacagttgcagtttattacaacaaccttcaagattcctctcattctcctttctattttcattgtcactttattcgagtcaaaacacagagacaataaaaatggcgtcctcttacagaataaactgttccactcttcttcatctccttatgtttctgtctagtcttctcacttcctccgccaacctctcctttaatttctatgctagttcttgttctgtagccgagtttctagtcagaaacaccgttagatcagctacctcctccgatccaacgatccccgggaaactccttcgtcttttcttccacgactgtttcgtccaggtaacacgcactaattacgaattactgaggaaagttcaaacaatttggcttaaactttgtttgttggttgaacttgcaagggttgtgatgcatcagtgttgatacaagggaatagcacagagaaaagcgatcccggaaacgcatctcttggaggattctcagtcatagacacagccaagaatgccatcgagaatttatgtccggccactgtttcttgcgctgacatagttgcacttgctgctagagacgccgtcgaagctgtaacatttacttcactcccacttcacttcaatctatattgctctaatccggtttaaccaatcccaactgaaccgaaagcatacacatgaaatcgaaaaaaagaaacaaaccaattctgtatcattttcgcatagactacacaatgaaccaaatataaccggagttgtagatacattaaaccggttatccttattaaggtttgaatgtttttcttctttggcgggacaggcaggaggaccggtggttgagattccgacagggaggagagacgggaaagaatcgatggctgcaaacgtgagaccgaacatcatcgacacagattttactctcgatcaaatgatcgatgccttctcttccaaaggcttgtccattcaagatctcgtcgtcctctcaggtatatatcaacgtttcttgaaacttctaatcaattttaccaacatgttttgctaaacgcaaacagagtatgaaacagagttttttttctttaactatggtaaagtcaattcttgtagcaaaatctgtttcatattctgttacactcagcttcttctttttttatttacattcaggagcacacacaattggagcatcacactgtaacgcattcaatggaaggtttcaacgagactcgaaaggaaacttcgaggtaattgatgcgtctctcgacaactcctacgcagagacactaatgaacaagtgttcgtcctcggaatcctcatcattgactgtgagcaacgatccagagacatctgccgtattcgataatcagtactataggaatcttgagacgcacaagggtttgtttcagacggattctgctttgatggaggataatcggacgaggacaatggtggaggaattagcgagtgatgaggaaagcttttttcaaagatggagtgagtcgtttgtgaaactgagtatggttggtgtgagagttggtgaagatggtgagataagacgttcttgttcttccgtcaattaaaaacattgtccgcttcttaattaatttgtcccattttggatagtctgtaatgttatctcttaaattttgtatttgtgacgagttttggtacttgaaaatcgtcttctagttgtcgagacagatcctctttctaaagttgcgtctaatatgggaaacacattttcgatttggaaacaaacaagaaaacgagtagcaagtaaagtgaaattatttactactactagttagtacagaggaggacgtgagataaatcaagcgtagaacaatcagctgcatgtgacagccacgtgtcgaaatctagtgagaaggacggttgattcattctaacttgggttcaccgtaaagttgacaaacccaaaaaaaaaagaaaaaaggaaggaataataatcatctttttaggcccacgagattgctctttgcttatagagataacatcaaatatatttatttctcaaattaccaactacttatccgtaattaaatcattattattaattgctaataatgaaaacatataattgtatccataattaattgggtatcatatttcaaaaagttagctggttcttcgtcataaatttctccagttttgtcaaaaacgaagaccacagcgagccctaaatcttgtcgggcgttgaatcttacaaatttgcaagtgattctcgtcatacctgtatcttcttcttcttcttcgttcttcttctggtacgcccaaattactctcaaatctcccccaaattactcttatttttcgatctgatcgtgctcaatccattgccatttcaatttgtttgctcaatccattggctatttccaattatctgctcattatttgtgctgtggatagtcgttctggcttcaggactcggtctcgtcattggtttgatatgtctgttgagcatttggtgattattgacatattgttttacatgtttttcgacgttgtgttaggatttgattggtggacaaaggtagctgaatcagcttcagaattgaatttgatctttgtttgagacaagaagcattggtgtttggagcatttctgaggagttatgggatatctgaattctgttttgtcatcttcgagccaggttcactccgacgatggacctgttagcggtggtggcctcaggttcacttttctctttctccccagcttaatctttctcaggtttttagtattaagttataggattaagaatgcaactacagattatagattgctcagaatcatatactctttttagcctttattaatgtctgattcaagtcctagctactgatttgaaaccttgtcttggctgatttcttctgataactcttgcgttatacttatctttattggaagctcatctctgttggtgtgagttaaagagttattgtgcaaaataatatctcaattatacatg

SEQ ID NO: 19524 - DNA, 3000 bp, Unknown
  misc_feature (1)..( 3000): 2750-1469P.txt file - cDNA_ID_1822330; gDNA_ID_2926200; Annot_ID_141486
ctaacatcaaatgcaaattatgaagtgaacagttgcagtttattacaacaaccttcaagattcctctcattctcctttctattttcattgtcactttattcgagtcaaaacacagagacaataaaaatggcgtcctcttacagaataaactgttccactcttcttcatctccttatgtttctgtctagtcttctcacttcctccgccaacctctcctttaatttctatgctagttcttgttctgtagccgagtttctagtcagaaacaccgttagatcagctacctcctccgatccaacgatccccgggaaactccttcgtcttttcttccacgactgtttcgtccaggtaacacgcactaattacgaattactgaggaaagttcaaacaatttggcttaaactttgtttgttggttgaacttgcaagggttgtgatgcatcagtgttgatacaagggaatagcacagagaaaagcgatcccggaaacgcatctcttggaggattctcagtcatagacacagccaagaatgccatcgagaatttatgtccggccactgtttcttgcgctgacatagttgcacttgctgctagagacgccgtcgaagctgtaacatttacttcactcccacttcacttcaatctatattgctctaatccggtttaaccaatcccaactgaaccgaaagcatacacatgaaatcgaaaaaaagaaacaaaccaattctgtatcattttcgcatagactacacaatgaaccaaatataaccggagttgtagatacattaaaccggttatccttattaaggtttgaatgtttttcttctttggcgggacaggcaggaggaccggtggttgagattccgacagggaggagagacgggaaagaatcgatggctgcaaacgtgagaccgaacatcatcgacacagattttactctcgatcaaatgatcgatgccttctcttccaaaggcttgtccattcaagatctcgtcgtcctctcaggtatatatcaacgtttcttgaaacttctaatcaattttaccaacatgttttgctaaacgcaaacagagtatgaaacagagttttttttctttaactatggtaaagtcaattcttgtagcaaaatctgtttcatattctgttacactcagcttcttctttttttatttacattcaggagcacacacaattggagcatcacactgtaacgcattcaatggaaggtttcaacgagactcgaaaggaaacttcgaggtaattgatgcgtctctcgacaactcctacgcagagacactaatgaacaagtgttcgtcctcggaatcctcatcattgactgtgagcaacgatccagagacatctgccgtattcgataatcagtactataggaatcttgagacgcacaagggtttgtttcagacggattctgctttgatggaggataatcggacgaggacaatggtggaggaattagcgagtgatgaggaaagcttttttcaaagatggagtgagtcgtttgtgaaactgagtatggttggtgtgagagttggtgaagatggtgagataagacgttcttgttcttccgtcaattaaaaacattgtccgcttcttaattaatttgtcccattttggatagtctgtaatgttatctcttaaattttgtatttgtgacgagttttggtacttgaaaatcgtcttctagttgtcgagacagatcctctttctaaagttgcgtctaatatgggaaacacattttcgatttggaaacaaacaagaaaacgagtagcaagtaaagtgaaattatttactactactagttagtacagaggaggacgtgagataaatcaagcgtagaacaatcagctgcatgtgacagccacgtgtcgaaatctagtgagaaggacggttgattcattctaacttgggttcaccgtaaagttgacaaacccaaaaaaaaaagaaaaaaggaaggaataataatcatctttttaggcccacgagattgctctttgcttatagagataacatcaaatatatttatttctcaaattaccaactacttatccgtaattaaatcattattattaattgctaataatgaaaacatataattgtatccataattaattgggtatcatatttcaaaaagttagctggttcttcgtcataaatttctccagttttgtcaaaaacgaagaccacagcgagccctaaatcttgtcgggcgttgaatcttacaaatttgcaagtgattctcgtcatacctgtatcttcttcttcttcttcgttcttcttctggtacgcccaaattactctcaaatctcccccaaattactcttatttttcgatctgatcgtgctcaatccattgccatttcaatttgtttgctcaatccattggctatttccaattatctgctcattatttgtgctgtggatagtcgttctggcttcaggactcggtctcgtcattggtttgatatgtctgttgagcatttggtgattattgacatattgttttacatgtttttcgacgttgtgttaggatttgattggtggacaaaggtagctgaatcagcttcagaattgaatttgatctttgtttgagacaagaagcattggtgtttggagcatttctgaggagttatgggatatctgaattctgttttgtcatcttcgagccaggttcactccgacgatggacctgttagcggtggtggcctcaggttcacttttctctttctccccagcttaatctttctcaggtttttagtattaagttataggattaagaatgcaactacagattatagattgctcagaatcatatactctttttagcctttattaatgtctgattcaagtcctagctactgatttgaaaccttgtcttggctgatttcttctgataactcttgcgttatacttatctttattggaagctcatctctgttggtgtgagttaaagagttattgtgcaaaataatatctcaattatacatg

SEQ ID NO: 19525 - DNA, 3003 bp, Unknown
  misc_feature (1)..( 3003): 2750-1469P.txt file - cDNA_ID_1822338; gDNA_ID_1620671; Annot_ID_48151
gaacagacaaatgaattatgaaggagtaaccaaactatagaccttaatcctcacctggcaataaaagtggaagttgcagcaaaattagattgatgaacaatgcgtggagatgtaccataataagtcattttccacagagttccatgtttcaccagaaaattatagctcctgggaagctggttgaacggccagggcgtatgatctgtccacaaatccgtaataaacacctgcgcaagcactcttagaacggaacaaaatcaacaatggctcacactacttaaagtaccaaagatctagactttcaaatgtatttggttaattattccaagaaccaaatttaatttaaagtcagtttcacactcttcagctggaacattcctaagccatcaagtgaatgtaacgcaatgctatccacttacatgaaccaaacatctaaatcctattttctctaattcaagaaactctaaacctgactacaattacaagtttataagtaaactgaatctgaagcttcgaagaactctaaaactaagaagacagaatagagattctccgaacatccaaacagatacttcaatttactaccaaaacttgtaaaagtcccaaactgaaatccatcaatgatcaatcaatcgtgattctacccaaaaagatggatggaaatatcaagacgaacctggtactcatctccaaactcctgattaaaagcagctctaatggcttccgcagaagctctgtgaccaccaccagtatcactcatcaaaatcaaaactttcttcggccgatcagcttcaacaccattcaacggcaatccctcctcacccaaaaccccaccagtcccattttccctaatcccattctcatcactcgataatccgactcctccgacggaggcaaagctctccggaaccactttatcgcagtgaaacctaataaagctattgaaatcgctgataaacctacggagactcgaaccagcactgctcttagtgttgaagctcaaggaagctagggtttttcccatccttcgggagggtaaagtccggaaaccattgaagtacaaggcattggacgatgagagagcatacccatctgaattcgaacacggggatcgatttctagaggttaaacctctgagccgtgggaagaaatcaaagaccggtgcggctgattcctgggttaccgttgaagggttttgcatatttgatagagagagagaagagagattcaaatagccatgaatgatgaagcgcgtcgtgggagagattgcaaaccacaaagataggatttttaagaggagagtggatgatggatggattcaggacgagggaggacgattggagttttgttgtttttgtgtaagaagacgacactgcttttggctaaaccgaaatacttatccgaatattctgtgggcaatttctaccaaaattcaggtaaccaatcaaccaatttatgtaaatgtaaatatcgtgtactcattaatagtttccaaataaaataataaaaatatttatttgttgattctagtatcatgttaaaagcttataaatggatgtcggcataatggacaaattaatttcaaattttagcacatttatcagccattgtatcactatcacctttaaaatctagagtaacaatgtgaggaaatgttcaagtttttcttatatatatatatatcagtttatttgatttttgttttttggtgagagagtgattatcatgagtttgggaatggttttaaccaacttataatgaatagagatacggtatatgttttttatatactggattgatattttagctcaattctctcaaccaaaagattttccgccttaggcttatagtacttcggacccgatccaagccacatggtataatactatagatatagatagtctacatgggttctttggtaaaatgattcattaaacagcgatttttctttttttcttaaacaaccgattcttgtatctgaaaaagagttatgaaaaaacgaagtataatccgactcagacgatttatcgaattcattaagatttcaaaactcgtgagtcaacgttggcattctgatgcacatgtgtttcatgcttccaattctccactcgttcctataccttaatactataattttgaggtacttttgttatttatagttatatttgagctactcactcagatataatcaataatttataaaaggtttagattagaaaggagaaaagtggaaggaactcgtcatggaatagaattcgttattagtaagaagactacgaccgaccaaagaacaagaaaaaggcacgcatggtgtgaaaactaaaagttggcgaggcatgcctttcacatgctttagattctaaaacaaaacgtgttttacaaggaaactacgacgaacatgaatttaattattctaatatctaacaaatataggtgcaaaacctaggatatccctcacattcgtttagtttcgagaaaaattaacagacaaaaaattatttatatatcaaactcataatcaactgttgcaactatgattttaacccattatcaaaaaaagaaagacagaccatttcttataataggccctattttaacggactaaaatcaaaactcgcagtacacatggaaaatgtttagtgggcttttgggcctaacccaaatttattttcaattttagcttttgggcttttggttgttcttcttcattccgcgccgccgtcccgcgttttttctttatttgactcttctcttcgaaacgaccgtggttttggtgtttattgaaacgacatcgttttgttcttcttcttcctcagttttgattctcaaaatccacaaccctaaatccacgcttcttctctgctcttcttactcaattcttctgcctctttcttggtccttgtccactaatcgtttgttcgtctcacggcacgaattcaaatttgtaagttgagctcgtcgaattagtgaaacccgagaatagtagaattcagcagagagatg

SEQ ID NO: 19526 - DNA, 3000 bp, Unknown
  misc_feature (1)..( 3000): 2750-1469P.txt file - cDNA_ID_1822338; gDNA_ID_2926200; Annot_ID_141488
cagacaaatgaattatgaaggagtaaccaaactatagaccttaatcctcacctggcaataaaagtggaagttgcagcaaaattagattgatgaacaatgcgtggagatgtaccataataagtcattttccacagagttccatgtttcaccagaaaattatagctcctgggaagctggttgaacggccagggcgtatgatctgtccacaaatccgtaataaacacctgcgcaagcactcttagaacggaacaaaatcaacaatggctcacactacttaaagtaccaaagatctagactttcaaatgtatttggttaattattccaagaaccaaatttaatttaaagtcagtttcacactcttcagctggaacattcctaagccatcaagtgaatgtaacgcaatgctatccacttacatgaaccaaacatctaaatcctattttctctaattcaagaaactctaaacctgactacaattacaagtttataagtaaactgaatctgaagcttcgaagaactctaaaactaagaagacagaatagagattctccgaacatccaaacagatacttcaatttactaccaaaacttgtaaaagtcccaaactgaaatccatcaatgatcaatcaatcgtgattctacccaaaaagatggatggaaatatcaagacgaacctggtactcatctccaaactcctgattaaaagcagctctaatggcttccgcagaagctctgtgaccaccaccagtatcactcatcaaaatcaaaactttcttcggccgatcagcttcaacaccattcaacggcaatccctcctcacccaaaaccccaccagtcccattttccctaatcccattctcatcactcgataatccgactcctccgacggaggcaaagctctccggaaccactttatcgcagtgaaacctaataaagctattgaaatcgctgataaacctacggagactcgaaccagcactgctcttagtgttgaagctcaaggaagctagggtttttcccatccttcgggagggtaaagtccggaaaccattgaagtacaaggcattggacgatgagagagcatacccatctgaattcgaacacggggatcgatttctagaggttaaacctctgagccgtgggaagaaatcaaagaccggtgcggctgattcctgggttaccgttgaagggttttgcatatttgatagagagagagaagagagattcaaatagccatgaatgatgaagcgcgtcgtgggagagattgcaaaccacaaagataggatttttaagaggagagtggatgatggatggattcaggacgagggaggacgattggagttttgttgtttttgtgtaagaagacgacactgcttttggctaaaccgaaatacttatccgaatattctgtgggcaatttctaccaaaattcaggtaaccaatcaaccaatttatgtaaatgtaaatatcgtgtactcattaatagtttccaaataaaataataaaaatatttatttgttgattctagtatcatgttaaaagcttataaatggatgtcggcataatggacaaattaatttcaaattttagcacatttatcagccattgtatcactatcacctttaaaatctagagtaacaatgtgaggaaatgttcaagtttttcttatatatatatatatcagtttatttgatttttgttttttggtgagagagtgattatcatgagtttgggaatggttttaaccaacttataatgaatagagatacggtatatgttttttatatactggattgatattttagctcaattctctcaaccaaaagattttccgccttaggcttatagtacttcggacccgatccaagccacatggtataatactatagatatagatagtctacatgggttctttggtaaaatgattcattaaacagcgatttttctttttttcttaaacaaccgattcttgtatctgaaaaagagttatgaaaaaacgaagtataatccgactcagacgatttatcgaattcattaagatttcaaaactcgtgagtcaacgttggcattctgatgcacatgtgtttcatgcttccaattctccactcgttcctataccttaatactataattttgaggtacttttgttatttatagttatatttgagctactcactcagatataatcaataatttataaaaggtttagattagaaaggagaaaagtggaaggaactcgtcatggaatagaattcgttattagtaagaagactacgaccgaccaaagaacaagaaaaaggcacgcatggtgtgaaaactaaaagttggcgaggcatgcctttcacatgctttagattctaaaacaaaacgtgttttacaaggaaactacgacgaacatgaatttaattattctaatatctaacaaatataggtgcaaaacctaggatatccctcacattcgtttagtttcgagaaaaattaacagacaaaaaattatttatatatcaaactcataatcaactgttgcaactatgattttaacccattatcaaaaaaagaaagacagaccatttcttataataggccctattttaacggactaaaatcaaaactcgcagtacacatggaaaatgtttagtgggcttttgggcctaacccaaatttattttcaattttagcttttgggcttttggttgttcttcttcattccgcgccgccgtcccgcgttttttctttatttgactcttctcttcgaaacgaccgtggttttggtgtttattgaaacgacatcgttttgttcttcttcttcctcagttttgattctcaaaatccacaaccctaaatccacgcttcttctctgctcttcttactcaattcttctgcctctttcttggtccttgtccactaatcgtttgttcgtctcacggcacgaattcaaatttgtaagttgagctcgtcgaattagtgaaacccgagaatagtagaattcagcagagagatg

SEQ ID NO: 19527 - DNA, 3000 bp, Unknown; identical to SEQ ID NO: 3863
  misc_feature (1)..( 3000): 2750-1469P.txt file - cDNA_ID_1822346; gDNA_ID_1620671; Annot_ID_48148

SEQ ID NO: 19528 - DNA, 3003 bp, Unknown
  misc_feature (1)..( 3003): 2750-1469P.txt file - cDNA_ID_1822346; gDNA_ID_2926200; Annot_ID_141491
gggaacagatcattccacttatgaatccccattactaattttccattcctattacagacgttttacgtagtagggaatctagtttattaatatacatatcacatagattaatcttgattgtttcgcaaattttaatggttttcggaaacaaaaagggggtacaaagtgagctttccgaaatagtgtagttcccagcatccaaatctctcaaaattccttccacaattagaacgattgttcgttcgttcgttttcacaatgtatctcgacctcttttagcaagagtttgctactaaactcgaaccaagtggaaacatgtgggttttgcaatctaaattgaatttgttttgtcaaaaaaggttcttatatttagtacactgtaaaaaatttcgtttctaataacataaatacctagtatagtgtaatggtgttcagagttagcatgcaaacttgtgttaggaaaggatatcaaaagtctcttgtttcaacaatttttattttatattcaaaaattattatgatttgatctttcaagttgattcaattcatgaagatcacataaagcttcttctctgaaatgaatgtcacatggaataattatgtattgaagagcaaaaaccgcatatagtaacctagcttaaaccgaatatacccgaagtcaagactttaatgagaatcagactaaatcctgaatttatttgaaaacaaatcatatgatttggtcttcggtccggtaaaaaaactcagataagtttgaaaacaagttttaatatttatactatatgattccgtcttaatcaaaattgtcaacttacatcaataaaatcaaaactcattttaactagattctaagaatctcatcgaacaatcgatctttgtaaatcttcatggaatagtggttagcatttgtatcattgagtttgaaagaaacggaataattaaagatgacactaaattcacaactttgaacaaacaaacaaaaaaaagtgacaagaaaaatagaggtcggtgtcggagccgcccaaggtggcaacttgttcacacctcataataaaagcttctcacaagttggaagtcgcggtcgagtccagtcaagattttgttgcccttttcccgtgtgggctcaccaccctctttgtcttcttctccccaaaaattttccacgttttttgtttcactctctcaatttatttatattttttttgtcggctcatatttaatttgtgttaattaacacttccttgattagaaagtttttttgtaccgacttaaatttatcatgcaatgtgattggtcgctttcccaaaacaatctctcaacgacaaaaaagtagtaattagtaattaaatacattatattttgttgttaaatagtactcattctatttcaaaatataaaatatttaagtaaatatcacacggttaatgaatttaaatatataactcaagtatagtactaaaaagaatactttaacaaacaaacagaaacctattgtacagtaaaatatcaatcagtgaattattaatcaaatagtaagggaaactaggatataatagaaaaagaattgccgacctacaaatcagagtcaatggtcaagcaagtcaagggaaagttcgtaattgttatggatctggagtctggacaaattaaaaaaaatttgttaaatagaagaggatataaagggaacacagatcctacatattgaaatttatgtatgacgtccaaatttttcttcagcatgggacactgccccgccgaaattattgatttttcggatctttcttctacttgcttcttttttgtttgcttttataagttttgcatagctaattcttaatttcttatcatttatttctagttggtagagacttataaattgaacgtttcaagtctttggacggtatttgagatttcttgtaatttcacttgtaattgtaccacctaacagtgactaaagcagaataaattacgattcgtatacaacaaagtattcaaatttctaaatgtggatatattattgattttattttgggaaacatgtttatgataatcacctatatctcctctatagtctactagaaacgatatttgtcaccttcatcgtacaagactataatgtataattctatccataatgaacgatctagtttttaacatgtactatagagatgaatgattacgacagtaaatttaacccatgcatacgaaaatacataccgatagatataacacaattcagaatgttttacacaatcccatatttttagccaatcagtgtgattttaatagacagctttctatgtcttgttgtgctttttcttcttctttttttcccaaagtctttaatgtcttctggactttatagaagacagctttttatatgttatcttcactttcgaacgactttccttcctaacatatcccaaaacctatctctttaatttattcctatcgtacttacagcttttattaaaaaaactttcttattttaatcactaaacaattaataaaacatttatttatgatttttcattttcgttaaagctcttttattaaaaacttaatcacaacaaatttattaatcttaaatttgaccttaggataaaatttatatattaatcttatatctgttatacattaaataaactttaatttctgcgcaacaaactaatttattatttatttcttgtctctgtctttgtagttttagtataaataaagccattttgctccgaggaacttctcattcagtcggaccaacttgtgaccgaagaaagcaaattgagactacgcaccaactagtcctttggtttgtatcttaagataaaggtttcttttatggacggttcttcgtttctcgacatctctctcgatctcaacaccaatcctttctccgcaaaacttccggtaagtccggatttcgtctgatccattttcccgaaatctaagttgatttttgtatcccttcaatttctatgaactgggattttgggaattaatcatg

SEQ ID NO: 19529 - DNA, 3003 bp, Unknown
  misc_feature (1)..( 3003): 2750-1469P.txt file - cDNA_ID_1822350; gDNA_ID_1620672; Annot_ID_48175
agacagttgaatttgttatatcatcagggttgataaacgggcacgaggtagtcaggaaatcgtttctaacactactgtttccatcgcagtagagaaatctaaagttacacacttctggtatcttctcacaagcttcacgccagcatctgtcttctcgttctactgatattaagtaccataaggctccaaacacatgactggctaacatatagagagataggttccaagcagctccagcccaagcggtttcagtaactatgccagatgttcttgtaacttcagtgtaaagtggatagatacgaagaatccttggaatgtattgagtaaatatgacagttatcaaatagtccttagtgatcaaagagaccggcttgttgacattggggatgacagctaagactacaagctgcagcagatacaacagaatattaaagaaccatcaagaaggaactataaaaccattaggaactaaaggttacctgtgggagtggaaggatagaaagaagatcgatgatgaagtaggaggagaggtacttgatggctatagctttaggatcatcaaccaactcgcctcttccgaaaacacgagaagaaggagagatataagcagttctaaactgaaacacaatgtgaatgatgtagaaagcatctataaacgtgcgaagcacactagctgctatctccaagttacgatgcaaattaagacagtgtctttctccatcaacaataggaatatagaaaaacaatggatcaatagccaaagcaatcactgaagcaaaaagaaagattttgttccagttctgtaaaaaagatccttgtgggtttataatattcttctgtgtagtggtactagaattagaatctctcttcttattatgtgaaccaaaacttaaaggtttcttaagtcctctacgaacattcttcaaaactgtgtttagagatggtctagctttatttcttccgtaaccatactctgttccctctgaaatccaatctctgaacctaaacaaaaaatcatcaacaaaaaagaatattttttctgagaatcattcatatccatagtttctcagtaaattcattctaaaaaaaaaaaaagacagagattaaagaaagcaagcaaacaacaaccttacacgattgttgcggccaaaagccatgagtcaagctttttttgctataacggatcctgaatcataagaacatcgatttgatcgctttaattcgttatccccaagtttacagtaacagaaaaaaaaaaaaaagaagaagaagaagaaacggaaactaagaaattaaaacatttatatccgaaactgaccagaacgttgaagtaactgagagaagcgatataagaaagattatagtaagaattttccgatgatctgaaattgggaaaattctcgaaattaattctctgaagtttttttttgaagcagtcaaataagctatcatcgtagagtcaagcttggcatggcgctggaaaatggagactccattggcagtttcttcgaaattgtgtgcattttacaataaaagacaaaagagagggaattattaaagagtcaaaaacatttgatgggcctaaccttaattaaaagcccaattcgatattgaatttgattttaaaattcagaacttgttatatatcagaccaacacagtaaacatcatagattccagtaatgcatcagctataaacagatcctagcagtgtgaaatagtaaatatgctacgatttaaaggtttggatccaaagaattttaccaacttcatagcagattgttcacactctacactcaataagccaaatgtaaacaaaaagatgaccaaagatcttcacaaatctaccatgaatcacaaaatctatgaagacaatgtgatttaaagcaaagatcttacagtttttatgggctcttagttaaattttgagatagtaaattttcatataggcccaaccgcccaagtgagcaatcttgcaggacttttgtgttgtttatggcttttgtcttgtctgactcatgaaatcttgtttttttttgtagataaaagaacgataaatgacgcttttaaaactttttaaagacgagagttctaataaaattaggaaataataatatatgatgttgacaaaaaatgtagaaaaatatatgaaatttttattggcacgaaaaatttgtagcgaaccgcatcatatcatcacttatataagcaatattttttgaaaataactcatttgaatatcattaattaagcagatgagaaaaaatgatatgaggttattgaaatttttaaccaaattgttttttatataaaacatgtaacactttctgtttgttttttcttttatataattttgttaacacctttctatattttctgctttcaatattttctattttcttttattttgaaatagtatttttttttgtagggatttgaaaatagttttttttttgtagggattttaaaatagtttttgaaactactaactaattattaataaaattcaatgctttgaataaaatctaaatggtatacaaatattaaactttacaagaatatgagttaactatttaatacctttaagatttcatatttacttttgatgatatgtacattttaatacgtatatggcaatatcattggtagatacactatttctaacttaaattttaaaatgtggtaaaaacataaaattgaaatactaagaaatgttactttaacacttttatcctcaaatttggatttctggatgtttctataggtcgaaccaataattaaagaattgatagtaacaaaatgggttttaatattgattagaagaaaattaaattaggttaaagaaaaaggaaagagtagacgaaaagttaaataaattttaatagggttttaatattgattgatataactctctgactcttctgtgactcttttcaacttctgactctttctctttcgctctctcattcttaacaagaaaaaaaactggcatcatctcatcatg

SEQ ID NO: 19530 - DNA, 3003 bp, Unknown; identical to SEQ ID NO: 19529
  misc_feature (1)..( 3003): 2750-1469P.txt file - cDNA_ID_1822350; gDNA_ID_2926150; Annot_ID_139254

SEQ ID NO: 19531 - DNA, 3000 bp, Unknown; identical to SEQ ID NO: 3888
  misc_feature (1)..( 3000): 2750-1469P.txt file - cDNA_ID_1822354; gDNA_ID_1620672; Annot_ID_48174

SEQ ID NO: 19532 - DNA, 3000 bp, Unknown; identical to SEQ ID NO: 3887
  misc_feature (1)..( 3000): 2750-1469P.txt file - cDNA_ID_1822358; gDNA_ID_2926150; Annot_ID_197988

SEQ ID NO: 19533 - DNA, 3000 bp, Unknown; identical to SEQ ID NO: 3887
  misc_feature (1)..( 3000): 2750-1469P.txt file - cDNA_ID_1822358; gDNA_ID_1620672; Annot_ID_48173

SEQ ID NO: 19534 - DNA, 3000 bp, Unknown; identical to SEQ ID NO: 3887
  misc_feature (1)..( 3000): 2750-1469P.txt file - cDNA_ID_1822358; gDNA_ID_1620672; Annot_ID_164133

SEQ ID NO: 19535 - DNA, 3000 bp, Unknown; identical to SEQ ID NO: 3887
  misc_feature (1)..( 3000): 2750-1469P.txt file - cDNA_ID_1822358; gDNA_ID_2926150; Annot_ID_139252

SEQ ID NO: 19536 - DNA, 3003 bp, Unknown
  misc_feature (1)..( 3003): 2750-1469P.txt file - cDNA_ID_1822366; gDNA_ID_1620673; Annot_ID_48186
tcctgttcgatatcatcactcccaggcaacgccacttcatcatcatcactttcttgcaataaatcaacattgggaacattgctgaagacattgacttctccatactttttaggtctggcaatgggacctccaggacggccacggtcttttttcactagtagcaaagggttgatctgaaattacaataatgtaattactggttaaccacatacactgattattttgttccaattaacaaatcaaatacttctgctacctctctgaacaatgctatgagggaagcagatgctgctgagatggcttttctatgggtacggtactttttatccgttttatactgagcaagatcatgcagcaagtcttctgtcatcaactgaagtatagcagacaaaaaaaaatatagaagaagcaaaaagacaactcagaaaaaaaaaaaaaaaaaaggattggtgctgtaaaactacatttatatgagaatgttaaaccagagttaagaactagttacctcgggaatcctaaggaacatttctcgtaccacattgagtgcgacaggaatagcctggttacatatatgaaaacaatgaattaaaaaggaaaaatataaatgatagaataagctttctagttaagtccctccctaggtgtttgaaatcacacctccggacttgagcgatcgtgtaaaaacttattcactatttgcttgaacagtggctccacggcatccgaaggtacctgctcgatataaaaatgattggaaggattgcaggatgagaaaagggatgatgctttaaagtgtaagatgtttgtataccccatcatggcaagcctgaactgctgctgcaagtatttgtgtaatgtcctttacaccatcctgcatttaagagcatccctgtttcaataaattttcagcaaagaaattgtaaaaagggcagttagcaaatcttaccttagcatacgcttgaagataagtataaaatttgaataaaagcaacttgtgaagaccaattgttcgtgcaataacttttataatcatcaacctggtctgcaaaatttattgaatacatggttagttagctcatatgtttctatagaatggatgaagcgagttaaaatacaattacctcgcgccgttcataagtttccccagtgctcttgtcatcagtttccccactgctcttgtcattagtttccacagtgctctcgtcaggcttaggcctaataaggggaagcaacctctctgcaaaattctgtaaaagaagaaaaacattcaagtacatagccacatagaaaaagctaggaaatgaccactacaaaaaagctaggaaatgaacctgtgcatcatttagatgattaagaggtgaataagttgaagtagtgttctcagacgacgcacgctgctttcgtttaatacttcgcatggcgcgttgcagttttgcttgctttttcttcttgctagaagatgtacctttgttgttggcctaaacatcggaaacaggacctagtattatacttaattcataatgataaaaatgatagtgacaactatatgaaggtggaaaattctattcacaaccagtagtaagcgtcttcgtcatagtctctaacaaaattcatgtataaatatgttgtttaccttgtaaacagcctctctgttaaacacaacctgagatcactatcatcctcatcgttaatgttgtcgtagtcaagaagaaaccgaagggaagatatcctgatcctgaacatgtaaaaaaaaagagaagttagtaattcgaccaaccaaatcatatcgaaatcttgcacagttaggaagatatacctaggtgaagtatgaaagcaggcttcacaaatggcaattgctactctgtcatgtttatcaccaaaccagacttttttcttgtgaagctcacaaagggtaacaagtgctctcttagccttggtttcatcttcttgctacaaccgaagttaaaaatcatctacttgattatacactgatcagttacacaaaaaacccatgaaaagggaaaagaaaaaagaaatacctccaacatagagaaaacaatcttgtgaagagatttgtgccttggatcagtgatactcattttacgaatggtttgaacaatatgagagaaagcaagctttcgcaagtttttatcaccaagagtttgaatatctagaaacagagctaacaaatcctcgatgacaagactctttaacacacaccaaagcaaacatattaaaaaaacattactttcgattacgatcatcttagaattcgtatcaatcacgtaataaataaaaaaacatacctttcgattcataagaagaatcagagattgcgcaacttggtaccgaagccccgacggcattgccaggcatgaggtacggagtaaatcagtcaattgagctggaaaagcggcgagctggttcggataaaacggagtgacatgagcgagaaacatggctcggtctcggagttccttagcaacggaagggccggggccgacggaggagaaagtgagagccgcctgttgctgaaagagatcgacggaggctctgaactgtttgtaaatcaaatggacctccgtttcgtaaccctctggttcacgcttgatttggctctgaaggataggaaggctgagcttctaggagatccggctagaagccttcaaggactccggcgtaagacctagagatccggccataatcggaggttttttcagagagggaaaggaaccaaccaaaccctttaggttttatacaaacacacagacttttgatatatttataggtttagttcttcactgtaccagttcggtttaggatttgattctctcggtttaggattttatttgaaaccattacaaggccaaagcccatacggccagaggcccaatacaaggaaaaaacgcaccaattgaatgaacaaatttatttgatttttgaatgaacaaattaaataatggcttctccttaaaattatctaagctcgcttgaccaatcatg

SEQ ID NO: 19537 - DNA, 3003 bp, Unknown; identical to SEQ ID NO: 19536
  misc_feature (1)..( 3003): 2750-1469P.txt file - cDNA_ID_1822366; gDNA_ID_2926200; Annot_ID_141464

SEQ ID NO: 19538 - DNA, 3003 bp, Unknown
  misc_feature (1)..( 3003): 2750-1469P.txt file - cDNA_ID_1822376; gDNA_ID_1620673; Annot_ID_48182
ctaaagcgtgcaactggagaattcaccaaggacgagaacgatgctaacaaacttaaccgcattcttcaactcacaggattcagtgacccagtctatgctgaagcatatgtgacggtacaccattatgatattgctcttgaagttacagtaatcaaccgaaccaaggaaacccttcagaacttgtgcttggagttagcaaccatgggtgatctcaaacttgttgagcgtcctcagaactacagtctggcacctgaaagaagcatgcagattaaagcaaacatcaaggtgtcgtccacagagacgggagtcatattcgggaacatcgtctatgagacatcaaatgtaatggagcgaaacgtcgttgttcttaatgacatacacattgatatcatggactatatctcccctgctgtgtgttcagaggttgctttcagaactatgtgggcagagttcgaatgggaaaacaaggtaatttattgaaaccttttatagttgtaccttcttttcgtatgtttgttggagtttggtataaccaattcctgttgtattctttatgtcaggttgctgtgaacaccacaatacaaaacgaaagagaattcctcgaccacattatcaaatctacaaacatgaaatgtctcactgctccgtaagtgtaaattcttctttcatcctgtagaaacgaaaaactcttcttactaattaatacttctttacttgcagatccgcaatagaaggcgaatgtggattccttgcagcaaacttatacgcaaaaagtgtatttggtgaggatgctcttgtgaatgtgagtattgagaagcaaacggatggagcattgagtggttacataaggataaggagcaagacgcaagggattgccctaagtcttggggacaaaatcaccctcaaacaaaagggtagtagctgaggttagctaatcttttcaaaacatattctatttctcgattaatacatgttttaatccttaaaccgcaattggtctaaatttcagtaccataccgatgatttctcacagtggcgtgcaaaggtaacaggtttagactacgtacgtttctcttgagcaattatcgttggttgaatctgcttattatatggagggaggaggcgttcaagggtatatgtaaaaagagtaattggctatcgttcttacttaaccggtatattttctggtatggtaccgatggatttcttcatctcatatggcagtgtgttttttactgtactagacgattttgttttatttgtaatgctttttcttctataatgtcgtttgttgaggactttaaaccgtgaactttatgatattgtagatttcaaagctacatttggtttgctccattttagaactcgtcatttcagatttgatctctattcttttctttcatatgcatttgaagtgaactattcaattgtcaaagctagactttaatttgctagtagctatataatacgggttatgttagcaagtaagttgtaatgaaacgcatgtattaatatggaccatattcaaaatctacaagccaaagaaaccaattgcttcacaaccaaacccataacatttgattcttacagccttttctattctcaagaaaaccaagcaataatttttaagcaaaatttaataatcttaaatcacttgcctcaaggtaccaagggacgatcacatacacattcgcgtaactagatatcgctaacatcattagacaagaaaatactagacgcgagtagaagaggaaagatccaaatacatcatcttctatcataaaatcatccatctctaaccgaaagttggagcacgtttcaaggaaaaactgacataattcctaattacgctcacttttaaaagtttggggtcgttttggaaacaataaaaaagtaggggctatgctttctcaacttctattggactgggcttgtcaacaatcaatatttgggcctgcgaggttgactcgcttctttccgttcttcgttttccaaacagaaggaaaaaaaactaaaaaacaaaatcggatttggaggagtaaacacaagggaagacgaatccacgataatattaaggacatttcataatctctcactttgtgcgagtgtttttttttccgagatccaaaatcttctaacggatccaaagctttgttactccgtggatctcctaccttgaggttcgtctctatctgttaaacttgcgactcagatttcgtagagatcgatcccacttttgcttttcctttgtgaaaatctacaatgttcaatattctctggcgttctttgcttgatctcgttgaatattgatccgatcccggtaggcaaacgattttcatgtttgtgcagctgagtgagactgcgaactatgtagattccattgtttgttcatcaaatctggggagatatattgcatttgtgatatgaactttggttgatccgaagcttttttattattcgattttatgttaatgttttggtcgtagttgtagtaaaagtgatgtgtattgctggatctgaggatttgaatttgtcaatgtcttgcatctttgggtcgttgattagacattaccgaatattcttcagcgattatgatgctttctcatataccgtggatttgagaacatagatgctttcttcattgtactgaaatatatgtagagaggtgtagattattattgctgagtagtattatggggatactctgaaacttcttgtttagaacttactcgagcagtgatgaagatactagtaaggtgcttatactaacttagtaattaaaagaaaattcttaaaattttggatatattgattgttacctgtgatctatactacttcattttatctttaaatcgattttcagtattttaggttcctattctctattcgctttgaatttcttatgttaacataggtacacttgttcttgcatgatttttccttttcatatgagctcacaattttattttatttttcactctttgtgcagcacctgaaaagatg

SEQ ID NO: 19539 - DNA, 3003 bp, Unknown; identical to SEQ ID NO: 19538
  misc_feature (1)..( 3003): 2750-1469P.txt file - cDNA_ID_1822376; gDNA_ID_1620673; Annot_ID_164159

SEQ ID NO: 19540 - DNA, 3003 bp, Unknown; identical to SEQ ID NO: 19538
  misc_feature (1)..( 3003): 2750-1469P.txt file - cDNA_ID_1822376; gDNA_ID_2926200; Annot_ID_141460

SEQ ID NO: 19541 - DNA, 3003 bp, Unknown; identical to SEQ ID NO: 19538
  misc_feature (1)..( 3003): 2750-1469P.txt file - cDNA_ID_1822376; gDNA_ID_2926200; Annot_ID_201774

SEQ ID NO: 19542 - DNA, 3003 bp, Unknown
  misc_feature (1)..( 3003): 2750-1469P.txt file - cDNA_ID_1822380; gDNA_ID_1620673; Annot_ID_48181
aacagacgacaggatcgaggagaagctgacctgaagtgaaccaaaccacataaatggtcaagcaacgagagagaagaagcagaaatgaaactgacgatggcacgagtcgaggtttcggccggcgatgagaaccggcgtcgatcttagccatagggttcaatttctgagttttgaagcgttgggcttttttaattcgttggctcttaggcccaaattaattctctcattaatttacggttcggttttaatcggttctaatttgtcaatccggataaaaagtcaataacatctaacatagaccaaaccattatcccaaagaaaaaaaaaacatagaccaaaccaagtcaacatgaattgaaatttaagaacctcggtcctcccaactcaaccgaaacacaatcaaaccggccaaacattgttttttttacggcaacaaagatatatcaaaacacaaattgcaacactaaaaatcatgtgttttattggtgccttatataacaaatgaaaccttacccgaaaggtttagcatatatgacatccagacaagagaaaacgtaattcatcattttcgttatctaacatacaagaatcaaaacaagatttcacattaacaaagataaagtgtacatagttgaggaaaataaaggtaaagataaagtgtagacaatattcaaaagggtggttgtccaacaatgttaccaggaggatcatagttacaaataataaatgtgtcaccggtcttgcaaaaactgattgcacacccaatcctcgaactcttcttccatacaagttgcgtgtaatgcaaacaatccccattcgccttgcagtgggaagtcctccggtcatagtatttcatctccgaggcccatgcagccaccgcatcccgtggagtccaaccttttccgcttccccagaagagattctccccgtaaggtcccccggagtggataagtttgcaatctccacggcgggttctggcccaccggctcgcatagagggcgaggctattgctccatttgagaggagggagacgaagcttggctcgtaagatgttgtgtggtcggagaaactgctgctgaatggtgttgcgggctagagctttgtcttgagaaaaaattagtgttgatgttgtcggtgttctgtttgatgggatttgaaaagagagagaaggaagtggagtgctgataactatgataatgatgatgaatatcagagttttttgttccattgggatgctaagttagatttgtttctgagcctctagatctagctagtacgatccttaccatatatatatacacacacacacataattgtttatgctttcatatttgtacgtatatatcatctaacgaatctaaacacatgctatgttaataatgcgcaatgacaagtgctaatcatttcggtggaacattgattatttgtagggaatgattttattcaaacaaagcatacattattgagctaattaatagatcattatatatgaaggaagttttaataggatgttttctttttttcttgtaagaagagactttatcatagcaacgagaatatatcccaagcataaaacattatatacaaactcattcaaatgaaaacctaagttagatatttaatttgaccactcttaaaatacttgtttagttataacatgtttactatgcagatttatgaggcgtatcagatggtgtgctagagaacgtgatacaaatttggatgccttgttttcaagaaatcttatacattccttggagatcaatttgtattgtgaggcttatagtcattgagcttaccgttgattaactaaatttatattatatagaacatcaaatagacgaaaaaaatcaatttagttgaccaccgtttgttagctaggttataaactctgacccaaagtgtcctatgctttcagtattcagtttattttataacgtgtggggtcgttttggaaacaattaaaacaataggggctatatttttctcaagttctgttggactgggcttgtcgttaatcaatatttgggcttttgaggttgactcgcttttttccgttcttcgttttccaaaatcaaacccaaaaggatttggaggagttaattcacctgacgaatccaccaccataatattaagcacatttgatctctcacttccttggtgcgagtgttttgttttccgagatccaaaatcttctcttggatccaaagctgtgttactgtggatctcctcctcctctctccctggatctcgtacctttgaggtttgtctctctgtgttaaacttgcgactcagatttcatagagatcgatcccacttttgccttttcctttgtgaaaatctacaatgttcaattattctctggcgctctttgtttgatctcgttgaatattgatctgattccggtaggaaaccgattttcatgtttgtgcagctgagtgagactgcgaattatgtagatttcattgtttgttcatctaatctggggagatagatcgcattttttttttttttgaattttggttgatccgaagctgttttaactgatttttcgtttttatgttattattttggtcgtagttgtagtacagtgatgtgtattgctggatctgaggatttagatttgtcaatgttttgcatctttgggtctctgattggacattaccgaatattcttctgaaattatgatgttttctcataaaccacggattcgagaatagagatcatgtattcaatgtattgaaatccaagcagagaggtatggattatcgccgatgatactgttgaacttcttgtatagaacttactctagcactgatgaggacactagtaaggtgcttatattcagtaattcgaacttgaaatcgccagaaatattaaaagttttgatatcttgtttttacttgtgatctatacttcattatgtctttaatcaattgtaacaattttgctctattcatcttctatttcttatattaacaaaggaacacttgttcgtgaatg

SEQ ID NO: 19543 - DNA, 3003 bp, Unknown
  misc_feature (1)..( 3003): 2750-1469P.txt file - cDNA_ID_1822380; gDNA_ID_1620673; Annot_ID_164158
agagaagaagcagaaatgaaactgacgatggcacgagtcgaggtttcggccggcgatgagaaccggcgtcgatcttagccatagggttcaatttctgagttttgaagcgttgggcttttttaattcgttggctcttaggcccaaattaattctctcattaatttacggttcggttttaatcggttctaatttgtcaatccggataaaaagtcaataacatctaacatagaccaaaccattatcccaaagaaaaaaaaaacatagaccaaaccaagtcaacatgaattgaaatttaagaacctcggtcctcccaactcaaccgaaacacaatcaaaccggccaaacattgttttttttacggcaacaaagatatatcaaaacacaaattgcaacactaaaaatcatgtgttttattggtgccttatataacaaatgaaaccttacccgaaaggtttagcatatatgacatccagacaagagaaaacgtaattcatcattttcgttatctaacatacaagaatcaaaacaagatttcacattaacaaagataaagtgtacatagttgaggaaaataaaggtaaagataaagtgtagacaatattcaaaagggtggttgtccaacaatgttaccaggaggatcatagttacaaataataaatgtgtcaccggtcttgcaaaaactgattgcacacccaatcctcgaactcttcttccatacaagttgcgtgtaatgcaaacaatccccattcgccttgcagtgggaagtcctccggtcatagtatttcatctccgaggcccatgcagccaccgcatcccgtggagtccaaccttttccgcttccccagaagagattctccccgtaaggtcccccggagtggataagtttgcaatctccacggcgggttctggcccaccggctcgcatagagggcgaggctattgctccatttgagaggagggagacgaagcttggctcgtaagatgttgtgtggtcggagaaactgctgctgaatggtgttgcgggctagagctttgtcttgagaaaaaattagtgttgatgttgtcggtgttctgtttgatgggatttgaaaagagagagaaggaagtggagtgctgataactatgataatgatgatgaatatcagagttttttgttccattgggatgctaagttagatttgtttctgagcctctagatctagctagtacgatccttaccatatatatatacacacacacacataattgtttatgctttcatatttgtacgtatatatcatctaacgaatctaaacacatgctatgttaataatgcgcaatgacaagtgctaatcatttcggtggaacattgattatttgtagggaatgattttattcaaacaaagcatacattattgagctaattaatagatcattatatatgaaggaagttttaataggatgttttctttttttcttgtaagaagagactttatcatagcaacgagaatatatcccaagcataaaacattatatacaaactcattcaaatgaaaacctaagttagatatttaatttgaccactcttaaaatacttgtttagttataacatgtttactatgcagatttatgaggcgtatcagatggtgtgctagagaacgtgatacaaatttggatgccttgttttcaagaaatcttatacattccttggagatcaatttgtattgtgaggcttatagtcattgagcttaccgttgattaactaaatttatattatatagaacatcaaatagacgaaaaaaatcaatttagttgaccaccgtttgttagctaggttataaactctgacccaaagtgtcctatgctttcagtattcagtttattttataacgtgtggggtcgttttggaaacaattaaaacaataggggctatatttttctcaagttctgttggactgggcttgtcgttaatcaatatttgggcttttgaggttgactcgcttttttccgttcttcgttttccaaaatcaaacccaaaaggatttggaggagttaattcacctgacgaatccaccaccataatattaagcacatttgatctctcacttccttggtgcgagtgttttgttttccgagatccaaaatcttctcttggatccaaagctgtgttactgtggatctcctcctcctctctccctggatctcgtacctttgaggtttgtctctctgtgttaaacttgcgactcagatttcatagagatcgatcccacttttgccttttcctttgtgaaaatctacaatgttcaattattctctggcgctctttgtttgatctcgttgaatattgatctgattccggtaggaaaccgattttcatgtttgtgcagctgagtgagactgcgaattatgtagatttcattgtttgttcatctaatctggggagatagatcgcattttttttttttttgaattttggttgatccgaagctgttttaactgatttttcgtttttatgttattattttggtcgtagttgtagtacagtgatgtgtattgctggatctgaggatttagatttgtcaatgttttgcatctttgggtctctgattggacattaccgaatattcttctgaaattatgatgttttctcataaaccacggattcgagaatagagatcatgtattcaatgtattgaaatccaagcagagaggtatggattatcgccgatgatactgttgaacttcttgtatagaacttactctagcactgatgaggacactagtaaggtgcttatattcagtaattcgaacttgaaatcgccagaaatattaaaagttttgatatcttgtttttacttgtgatctatacttcattatgtctttaatcaattgtaacaattttgctctattcatcttctatttcttatattaacaaaggaacacttgttcgtgaatggtttttccttttcatttgagctcacagatttttttctctttcactttttgtgcagcaccggagaagatg

SEQ ID NO: 19544 - DNA, 3003 bp, Unknown; identical to SEQ ID NO: 19542
  misc_feature (1)..( 3003): 2750-1469P.txt file - cDNA_ID_1822380; gDNA_ID_2926200; Annot_ID_141459

SEQ ID NO: 19545 - DNA, 3003 bp, Unknown; identical to SEQ ID NO: 19543
  misc_feature (1)..( 3003): 2750-1469P.txt file - cDNA_ID_1822380; gDNA_ID_2926200; Annot_ID_201773

SEQ ID NO: 19546 - DNA, 3003 bp, Unknown
  misc_feature (1)..( 3003): 2750-1469P.txt file - cDNA_ID_1822388; gDNA_ID_1620674; Annot_ID_48204
gcaatttttcaccagctgcgatgccaccgatttcatcaatgacaatagataattcattctctcctcctccatcttccggcgacttacctgaaatcccagatgcttggtacggcaacattcagtatctgcttaatatctcggtcattggtctcttatgctgcgtctccatctttctcttcgttaagctacgcagcgaccaccgtcgtatgcctggtccttctgctctcttctctaagctcctcgccgtttggaaagccacgtgtcgcgagatcgctcgtcactgtggtgctgatgctgctcagtttcttttaattgaaggtggaagctttgtgcttcttttctccattgctgttttagctgtttcggttatgcttccgttgaatttatatgctgggactgctttgttgagtgatgagctttcgaaaacgatgattacgcatattcagaaaggttcagctttgctttggctgcattttgtgtttgttgttattgttgttgttatctcgcattttggaatcgctgctattgaagctaggttgaagtttactaggtttagagatgggaatgggaatatcagtgacccgaacgcgaattctactgctgtgtttactataatggtgcagggtttgcctaagaatttagggtctgatagagttgagtttgaagattgctttaggctgaagtaccctgggaaagtttataagtttattgttcccatggatttgtgtgctttggatgatcttgctacagagttggttcgtgttcgagatgagattacttggttagttgccaagatggactctaggcttctaccggatgagtatgagaatgttggagataacggactagtgttctgtgtgtgttctttgtgggttagggtgaaggttttgtggtctcagattacagagaggtttggatttacagatgatgaaaaactgaggaagctgcaagaactgagagctgatttggagtctcagttagcagcttataaagaaggacgagcacaaggcgctggggttgcttttgtgatgtttaaggatgtgtacacagctaataaggctgttcaggattttcgaaacgagagatcaaggcgtactggaaagttcttctctgtcacagagctgcgattacagagaaaccagtggaaagtggacagagcacccttggctactgatatttattggaatcatctgggattgacaaaagttgctcttattgtgcgaagagtgattgttaatactattctactgttgattcttgtgtttttcagctccccattggccttgatcagtgcattggtaagtgccgggagaatcttcaatgctgaagcattggatagtgctcagtattggctcacttgggtgcaaacttctggctggattggatctctgatttttcagttcctgcccaacgtcttcatatttgttagtatgtacattgtaatcccttctgcgctctcgtatctttccaagtttgagcggcatctaacagtgtctggggaacaaagagcagctctcttgaagatggtttgcttcttccttgtgaacctcatcattctcaaggctcttgtggagtcgtcactggaaagtgcactcctgaaaatgagccgttgctatttagatggtgaggattgcaagaggattgaagaatacatgagcccttccttcttatcaaggtcatgcgtttcagctctagcttttctcatcacaagcacgttcctaggaatctccttcgatctactcgctccaatcccgtggatcaagaagaaaattcaaaagttcaggaagaatgacatgcttcagcttgtccccgagcaaaatgaagagtacgctttggaaaatcaagagccaagcagtaaccttgagacaccacttctccctgaaaacatgtttgagtctccaagattcggggacatagaacctatgagccaagacctctctgaatacccaatcagccgaacctcaccaatccctaaacagaaattcgactttgcccaatactacgccttcaatctcaccatctttgccttaacaatgatatactcttcattcgctccactcgtggtccctgtaggcgcagtttactttggttacagatacattgtcgacaaatacaacttcctttacgtgtacagagtccgtggcttccctgcagggaatgaaggaaagctaatggacacggttttgtgtatcatgagattctgtgtcgacctgtacctcgtctcaatgctgctcttcttctcagttaaaggagattccacaaagcttcaagccatattcacacttggagtgcttgtgatgtacaagcttttgccttcggatacagaccggtatcacccagctttactaagaagtattcagaccgtcgatagcatcatcgacggacctgtggattacgaagcttattctcacccaaacttcgattgggacacttacaacaacagatgattctacgaccttttaagtcttacaaattttgctctttgaccaaatacaactggaatctatttgtatatctcttctttgtgtatattccatcttttgtgcaattattttttgttcacgggttaagtttgcaagatttatcagttgagtccctttaatcattaattttggggttgtaatagcttcattcttaaaatatggggtatgaaatcggaagaaagagaattataaaaatagtaggtgggacccagtgttctctgaagtgagtatatcagagttctcttttcaacacatggactgttacactcacctaacgacgacgaagaagaaccaacatagatctcttctcttcctctcaaactcactaagcttcattgttaccccaaataaaccctaattttgctctcactattcgaagatctaaaatcatctcgcattttgatttccgaatactttcctgagttttgctggtcatgatttctcatttgctctttgttttcccgagaaaaatcttcaggagagtaggataatctctcgagtttcgaaatcgtttccaatg

SEQ ID NO: 19547 - DNA, 287 bp, Unknown; identical to SEQ ID NO: 4472
  misc_feature (1)..( 287): 2750-1469P.txt file - cDNA_ID_1822388; gDNA_ID_1620708; Annot_ID_48925

SEQ ID NO: 19548 - DNA, 3003 bp, Unknown; identical to SEQ ID NO: 19546
  misc_feature (1)..( 3003): 2750-1469P.txt file - cDNA_ID_1822388; gDNA_ID_2926210; Annot_ID_141935

SEQ ID NO: 19549 - DNA, 3000 bp, Unknown; identical to SEQ ID NO: 3917
  misc_feature (1)..( 3000): 2750-1469P.txt file - cDNA_ID_1822404; gDNA_ID_1620674; Annot_ID_48199

SEQ ID NO: 19550 - DNA, 3000 bp, Unknown; identical to SEQ ID NO: 3917
  misc_feature (1)..( 3000): 2750-1469P.txt file - cDNA_ID_1822404; gDNA_ID_1620674; Annot_ID_164194

SEQ ID NO: 19551 - DNA, 3000 bp, Unknown; identical to SEQ ID NO: 3917
  misc_feature (1)..( 3000): 2750-1469P.txt file - cDNA_ID_1822404; gDNA_ID_2926210; Annot_ID_141930

SEQ ID NO: 19552 - DNA, 3000 bp, Unknown; identical to SEQ ID NO: 3917
  misc_feature (1)..( 3000): 2750-1469P.txt file - cDNA_ID_1822404; gDNA_ID_2926210; Annot_ID_202542

SEQ ID NO: 19553 - DNA, 3000 bp, Unknown; identical to SEQ ID NO: 3915
  misc_feature (1)..( 3000): 2750-1469P.txt file - cDNA_ID_1822416; gDNA_ID_1620674; Annot_ID_48196

SEQ ID NO: 19554 - DNA, 3000 bp, Unknown; identical to SEQ ID NO: 3915
  misc_feature (1)..( 3000): 2750-1469P.txt file - cDNA_ID_1822416; gDNA_ID_1620674; Annot_ID_164191

SEQ ID NO: 19555 - DNA, 3000 bp, Unknown; identical to SEQ ID NO: 3915
  misc_feature (1)..( 3000): 2750-1469P.txt file - cDNA_ID_1822416; gDNA_ID_2926210; Annot_ID_141927

SEQ ID NO: 19556 - DNA, 3000 bp, Unknown; identical to SEQ ID NO: 3915
  misc_feature (1)..( 3000): 2750-1469P.txt file - cDNA_ID_1822416; gDNA_ID_2926210; Annot_ID_202539

SEQ ID NO: 19557 - DNA, 3000 bp, Unknown; identical to SEQ ID NO: 3914
  misc_feature (1)..( 3000): 2750-1469P.txt file - cDNA_ID_1822420; gDNA_ID_1620674; Annot_ID_48195

SEQ ID NO: 19558 - DNA, 3000 bp, Unknown; identical to SEQ ID NO: 3914
  misc_feature (1)..( 3000): 2750-1469P.txt file - cDNA_ID_1822420; gDNA_ID_2926210; Annot_ID_141926

SEQ ID NO: 19559 - DNA, 3000 bp, Unknown; identical to SEQ ID NO: 3913
  misc_feature (1)..( 3000): 2750-1469P.txt file - cDNA_ID_1822424; gDNA_ID_1620674; Annot_ID_48194

SEQ ID NO: 19560 - DNA, 3003 bp, Unknown
  misc_feature (1)..( 3003): 2750-1469P.txt file - cDNA_ID_1822445; gDNA_ID_1620675; Annot_ID_48233
actaagcaactcggaccgaggatcaactgaattcttaccagaaggcaatggatgcaatctactcgcagatggtgaaccaggagtaacagaatttgaaggaaactgggtacagtttggatcaaaccgtgaagacagcattattgcagcattagcttcaagattctcctcatcatcttcccgtgataccttggatattctaccagaagcatcacctgaagacttggcctcttttcccacgcgtctgtttgatgctgaggacttcctttttctgctgttactatttctttgtttaacaacaaccagctgatcatctttcactggagactgattagaatgcccattttccaactgcaacggagctgcggaattagattctttgatatctttgtcagagtccttctcttcaactttagagggttgatcctgaacactagattcttcagcagtaaccttagggatattaacaaccagctcctcctgactatcagactcccctgcagacttctgtgctaggccattctcaaacctactcctcccaacaaaatctctcctgcgtctaggaacataaatcgtactacttgccaaaccaacagaaatcacttgaagcccattactgtcacacaatttctcatccaaacccacctccttggagtcctccaaattgtgcaatatagtggtgccattgcatgccttatccagaatactctcgttctggctacctactttcttaaaactacttagagaaacaactttcctgctcttcttgtcctgcttcaactgatcaccatcaatcccagacctatgttttcttttaaagctcttattcactgaatccttggaaatgctagacttatagagcgtcttaagatctaaagacctggatttcttcgaaattcccactccattagagttacctagtctattttccatgaaagccacctcgaaccaatacccagaatcaaaagccagcaggtctcaaattccatcatatacgcaagcaaacatttttcagatctgtgacaccaaaaccaaacccagaatcacaaaaagtacccaaagtatgataaaagaagaacacacaagtcacccaaagaaacagatcaaatcccacttcaggaaaaaactttgcattgaaatccaagcaattgttttttcaacaatcaagcaaaatttaactgcaaaaaattaaaaaaaaaaagagagaaatttgcatgcctacctgcatcactttatcagacgaaatcgagtctcttaaggacctttatagtcgccacaatcccaaaatcaaaattagggtttcggtaaatcggactgcgaatcggatccctaaatcaaacaatcgaaaatttcccaaaagtattcgttcaatttagccgaaaataaaaaaagcaaaatttgcttcttttttttttcttttttaaccgggagaaacgggagagctagggtttcgtctggttccgcgagagtaaggttttttcagttataaagaaaacatattccaaataaacatcgtatcacgggtaccgtccgatggagacgcgttactatatctacggtccatatttagtttcgaaataagcactaaatttttaactctgcaacagaaaagatataatggacgttcgagattctcagctgcgaaatatttgtttggacggtcaggatttaaagatttcttcagagagaataatttattgttgtcacgtgtgttgctaacctaccgcaatcttgtgtttgtccacctagccaacaattgttagagacatcattcaacttaacaactattattactagaatactaggggataatttaagtataaaatcatcacattacagtattatctttttaataatttatatatatatatatatattattgttattttcttttaatatataaacttcattcatccattagcttaacaattttccaatattttgtaaaaatatatatatacatattattaggagttttcggaccatatttaagtattagtgtattactaccttattatgtgtttaaatatatatttttattaaatatagacatatagcaaaaagaattagtagtagagagattgattggaatcaatttttgattaattatatagtgtaaactaagctttaagaatatttaaaaaatagatttggtttccttataaatatgaattaaggtcattattaacgtatcataagatttagagcaatgtataaacacaagaagaaaaacaataaaagttcagaaattcctttttcgattcaaaaatacgttaaaaattgacaaaatattttggcgggtggattgtatattggaacccaaaatttgcttttttaatacagaaaaataaaataaaattggcttaattggaaaaactaatattgagttcataaaccaaattaaggtttaattagacagtctaatccaatgttcggttcaattttgtaatcaaatgttcggttcaattttgtaatcaaatgttcggtttgatgatccataagagaggagataacatcccaaatagagacagatccccttcccttgtcgtgtagcccagtagctctaatcgctacgattgctacacaccacatcccttaagaaaaccctaatcatctctctctcgcattctataggaatcgcttcccgaagcttccaacattctcttgtttctcctttgtctctcaatttcagtttcctatattatacgcttgtattaatcaccagtatacattttgtcgtttctgggtctggaaccctagtagttattatagcatccatcgctttcttcaatcgccgtccatcagagtttcaagggatttgctttaaagatcaatcctttcctaagaaaatagcgacaattcatcagcttttcctttcccatccttcattaccttaacttactcgagattcatcttccagctgaaattgtgaaacttcgtttctgggtttttatcagaaaacactctgtgacttattgtgtggtgatcgaggaaagaaaaaagatg

SEQ ID NO: 19561 - DNA, 3000 bp, Unknown
  misc_feature (1)..( 3000): 2750-1469P.txt file - cDNA_ID_1822445; gDNA_ID_2926202; Annot_ID_141570
aagcaactcggaccgaggatcaactgaattcttaccagaaggcaatggatgcaatctactcgcagatggtgaaccaggagtaacagaatttgaaggaaactgggtacagtttggatcaaaccgtgaagacagcattattgcagcattagcttcaagattctcctcatcatcttcccgtgataccttggatattctaccagaagcatcacctgaagacttggcctcttttcccacgcgtctgtttgatgctgaggacttcctttttctgctgttactatttctttgtttaacaacaaccagctgatcatctttcactggagactgattagaatgcccattttccaactgcaacggagctgcggaattagattctttgatatctttgtcagagtccttctcttcaactttagagggttgatcctgaacactagattcttcagcagtaaccttagggatattaacaaccagctcctcctgactatcagactcccctgcagacttctgtgctaggccattctcaaacctactcctcccaacaaaatctctcctgcgtctaggaacataaatcgtactacttgccaaaccaacagaaatcacttgaagcccattactgtcacacaatttctcatccaaacccacctccttggagtcctccaaattgtgcaatatagtggtgccattgcatgccttatccagaatactctcgttctggctacctactttcttaaaactacttagagaaacaactttcctgctcttcttgtcctgcttcaactgatcaccatcaatcccagacctatgttttcttttaaagctcttattcactgaatccttggaaatgctagacttatagagcgtcttaagatctaaagacctggatttcttcgaaattcccactccattagagttacctagtctattttccatgaaagccacctcgaaccaatacccagaatcaaaagccagcaggtctcaaattccatcatatacgcaagcaaacatttttcagatctgtgacaccaaaaccaaacccagaatcacaaaaagtacccaaagtatgataaaagaagaacacacaagtcacccaaagaaacagatcaaatcccacttcaggaaaaaactttgcattgaaatccaagcaattgttttttcaacaatcaagcaaaatttaactgcaaaaaattaaaaaaaaaaagagagaaatttgcatgcctacctgcatcactttatcagacgaaatcgagtctcttaaggacctttatagtcgccacaatcccaaaatcaaaattagggtttcggtaaatcggactgcgaatcggatccctaaatcaaacaatcgaaaatttcccaaaagtattcgttcaatttagccgaaaataaaaaaagcaaaatttgcttcttttttttttcttttttaaccgggagaaacgggagagctagggtttcgtctggttccgcgagagtaaggttttttcagttataaagaaaacatattccaaataaacatcgtatcacgggtaccgtccgatggagacgcgttactatatctacggtccatatttagtttcgaaataagcactaaatttttaactctgcaacagaaaagatataatggacgttcgagattctcagctgcgaaatatttgtttggacggtcaggatttaaagatttcttcagagagaataatttattgttgtcacgtgtgttgctaacctaccgcaatcttgtgtttgtccacctagccaacaattgttagagacatcattcaacttaacaactattattactagaatactaggggataatttaagtataaaatcatcacattacagtattatctttttaataatttatatatatatatatatattattgttattttcttttaatatataaacttcattcatccattagcttaacaattttccaatattttgtaaaaatatatatatacatattattaggagttttcggaccatatttaagtattagtgtattactaccttattatgtgtttaaatatatatttttattaaatatagacatatagcaaaaagaattagtagtagagagattgattggaatcaatttttgattaattatatagtgtaaactaagctttaagaatatttaaaaaatagatttggtttccttataaatatgaattaaggtcattattaacgtatcataagatttagagcaatgtataaacacaagaagaaaaacaataaaagttcagaaattcctttttcgattcaaaaatacgttaaaaattgacaaaatattttggcgggtggattgtatattggaacccaaaatttgcttttttaatacagaaaaataaaataaaattggcttaattggaaaaactaatattgagttcataaaccaaattaaggtttaattagacagtctaatccaatgttcggttcaattttgtaatcaaatgttcggttcaattttgtaatcaaatgttcggtttgatgatccataagagaggagataacatcccaaatagagacagatccccttcccttgtcgtgtagcccagtagctctaatcgctacgattgctacacaccacatcccttaagaaaaccctaatcatctctctctcgcattctataggaatcgcttcccgaagcttccaacattctcttgtttctcctttgtctctcaatttcagtttcctatattatacgcttgtattaatcaccagtatacattttgtcgtttctgggtctggaaccctagtagttattatagcatccatcgctttcttcaatcgccgtccatcagagtttcaagggatttgctttaaagatcaatcctttcctaagaaaatagcgacaattcatcagcttttcctttcccatccttcattaccttaacttactcgagattcatcttccagctgaaattgtgaaacttcgtttctgggtttttatcagaaaacactctgtgacttattgtgtggtgatcgaggaaagaaaaaagatg

SEQ ID NO: 19562 - DNA, 3000 bp, Unknown; identical to SEQ ID NO: 3960
  misc_feature (1)..( 3000): 2750-1469P.txt file - cDNA_ID_1822449; gDNA_ID_1620675; Annot_ID_48232

SEQ ID NO: 19563 - DNA, 3003 bp, Unknown
  misc_feature (1)..( 3003): 2750-1469P.txt file - cDNA_ID_1822449; gDNA_ID_2926202; Annot_ID_141571
tgattctccggttgtgttctccttcttctctccctcatcattcacttctttcttctcccccttatctgttcatatttgcagaagaaacgtctatcagtattagccataacatggttttctcagccagtgatacctcagcgtagaaaggtatccacagataaatatcaccaacgagtgaatagagtagagtagaattgttaccaacgagtgaatatagtaaagtgaaattgtgctataccttgagagtcttgttgaccattctcatctttggttgcaactccaaaatctgctagcaaagcctcaagctcagcaagttccttctttttcctctctttcttggaaagttgcctctctgcctccttaggaggagcacgaacttcaggagcctttttcacctcaggctctgcttctggatgaacttgtgtctctgttccctgctcgtgatcttcctccacatcatcatcatctccatcatcaagagtgtcttcttcgctttcaatttcctgcgacattgaaatcaaatgcatctctatgagaaacaaatgaacagataggcacacaaccacggtttagagaaaccattgcacaacaaacttacattgcctagaaaaatttcgataacaatgcaattagatatatgaaccttcaggagacaaagcagcttacttcacaataacattaatttccctttcagaattcagacaacacaagcctaagcctaagcgagataacaacagtagaaaaaaaggccaactcattcaattcgtggaagcatttgaaatctaaagaggcttattgcaagagacatattaaaccagtgttacaattttcaacatgtgaaatgcataaagctatgatgatgaacccaaaatcaacatatatatgaaagatttggacttgtgacctcagcgggaacgtctttagcatctgaatgggaggcttcagaagtgctccacagggactgaggtggagcagtggtagcgtaataatcatcatcttcatcatcgctatcgatatcagcccaagcctttgctttgagaggcgtaggtgcccagaaaacctgtggctcaggctccttctgtgaatcttctctcttagaggaagctttgctcttaccagccttatcagacttcttcttcttcctcgaagtatccaaagcagcaaacaagttggtgttctgaatcggcatcgatccctcatctctcctgtttccaccaccaaccatcttttttctttcctcgatcaccacacaataagtcacagagtgttttctgataaaaacccagaaacgaagtttcacaatttcagctggaagatgaatctcgagtaagttaaggtaatgaaggatgggaaaggaaaagctgatgaattgtcgctattttcttaggaaaggattgatctttaaagcaaatcccttgaaactctgatggacggcgattgaagaaagcgatggatgctataataactactagggttccagacccagaaacgacaaaatgtatactggtgattaatacaagcgtataatataggaaactgaaattgagagacaaaggagaaacaagagaatgttggaagcttcgggaagcgattcctatagaatgcgagagagagatgattagggttttcttaagggatgtggtgtgtagcaatcgtagcgattagagctactgggctacacgacaagggaaggggatctgtctctatttgggatgttatctcctctcttatggatcatcaaaccgaacatttgattacaaaattgaaccgaacatttgattacaaaattgaaccgaacattggattagactgtctaattaaaccttaatttggtttatgaactcaatattagtttttccaattaagccaattttattttatttttctgtattaaaaaagcaaattttgggttccaatatacaatccacccgccaaaatattttgtcaatttttaacgtatttttgaatcgaaaaaggaatttctgaacttttattgtttttcttcttgtgtttatacattgctctaaatcttatgatacgttaataatgaccttaattcatatttataaggaaaccaaatctattttttaaatattcttaaagcttagtttacactatataattaatcaaaaattgattccaatcaatctctctactactaattctttttgctatatgtctatatttaataaaaatatatatttaaacacataataaggtagtaatacactaatacttaaatatggtccgaaaactcctaataatatgtatatatatatttttacaaaatattggaaaattgttaagctaatggatgaatgaagtttatatattaaaagaaaataacaataatatatatatatatatataaattattaaaaagataatactgtaatgtgatgattttatacttaaattatcccctagtattctagtaataatagttgttaagttgaatgatgtctctaacaattgttggctaggtggacaaacacaagattgcggtaggttagcaacacacgtgacaacaataaattattctctctgaagaaatctttaaatcctgaccgtccaaacaaatatttcgcagctgagaatctcgaacgtccattatatcttttctgttgcagagttaaaaatttagtgcttatttcgaaactaaatatggaccgtagatatagtaacgcgtctccatcggacggtacccgtgatacgatgtttatttggaatatgttttctttataactgaaaaaaccttactctcgcggaaccagacgaaaccctagctctcccgtttctcccggttaaaaaagaaaaaaaaaagaagcaaattttgctttttttattttcggctaaattgaacgaatacttttgggaaattttcgattgtttgatttagggatccgattcgcagtccgatttaccgaaaccctaattttgattttgggattgtggcgactataaaggtccttaagagactcgatttcgtctgataaagtgatg

SEQ ID NO: 19564 - DNA, 3000 bp, Unknown; identical to SEQ ID NO: 3958
  misc_feature (1)..( 3000): 2750-1469P.txt file - cDNA_ID_1822457; gDNA_ID_1620675; Annot_ID_48230

SEQ ID NO: 19565 - DNA, 3003 bp, Unknown
  misc_feature (1)..( 3003): 2750-1469P.txt file - cDNA_ID_1822461; gDNA_ID_1620675; Annot_ID_48229
tgctacagattccaaaagctggcatccaaaatcccgaacaagggccagaggaaatgcggagtatttatttctctttagaaagtcaaacaaacttggcccaagcttctcgaacacctggtatcaccattagagttcattcacaggaaggttccgtttagttccaaacttcgaaaaaatccacatgagtaaacaaactacacaaacactatacacggaattggatttctgtcacttgggcatcaaacaaagaaaggtagccagaaatattatgattcattcatttgtaacactaacaaacctcacaggtcactgaacatagaaccaattaaatattagagatgcatttgaacggtggtggaaatcaatgagcttagttgggatacttacaatgcaaatatgatttcggtaatcaaaccagttcttcatctgtacacagctgcaaggacaaagcagaaatgaagaaactgagcaatgatatacacctctgaaggaaacgatgtcatcaactaaagtctagaagataaataaataccgtgtgcggcctttatcactcttaacaagtttctgaagtacatcaatttcaatcattgctgcatcccggtatttcttaatgcttcgaattatctttattgccacatattcttttgtatcacgatcccaacattccaaaacccgaccaaatgtgcctacaacaccagcaagttcactgaaatggcacgatttgattcacataaacattttttttatctcgaacacaccatgccacttgacagctaaccttcacccatcttgctaagtattttatctgtcaaaagtcaaaacagaacacacaatagcgtaagttaagcaattaaaaatgttcaggaaggattctcatcccaatgaaacgaaagcgaaaaaagattatccctaaggcaatggtgccaaacaaaacaaagagttactagcaacaatacacatatagaagcaacataggtaaatatcttagctcacatagaatagaaagttagcaactttatccatcaaaaactcacatctaggagtgagattgtccctcaaactgaaaacataatgaccatcacgatcatcgtcccttaatggtggtgacaaaatcctcccatcgcttccatgtcctttaatcacagcccttttagcctatcacaaaaaagtcaaaattcattcattgtcagcatatcaaaatctcaccaaagaaacataaatgctcggtctttcctccacattctaaaccctaattcgaagttctaaatgtcaaagattaattaaaaaaagaagaagaagaaagaggagcaacctctggttcagctggggcctcgtcccaggtcatacgaggacgtttcctgactcgttctttatccatactctcgaatccgttagctatcatcaccgacgcggaaaatcgatcaccgacacatccagaacggaatctgatgccaatctgcagctaaaagagggaaaatttctaccagaaactctttacgtagatgtaatcacaaggcggcgaatcggggagaaggtgataatctccgaaaatggtgaaaacagaggaattgctagggtttggaactagagagagtgcaagagaaagacaactcccaataattttaccggccaaatcccttggggtcgaaccgcgacgacatccaccaattgcattttttttgcactttccaccgaaaaaattgggtctacacgatcacccggaatgtttcgcccacccggcccaaatgaaatgtggtgagatcttcttataatcttggcccaaatttccatcatggatcttaaacgttcgtttcattgtttcttggattttttttcattaactggtccatctcaaaatgggcttccataaaaatgggcttttttacaaaagggttttgtttcattaattgattttcgtgtttttttatccgtaacaattatgctttcgtttcctaatttatacgagcaaacgtaaaaatgtatagtatttgactatttggttttacgtatcaacaatcaacaacatactgtacatcagtacatacacaatttttttttaacatacacaaacttactttatgtacaaatgaactattaagaaatggctttagccttgttattgcatgcatcttcttaatttgtgtatgtgaaattcttcataggagctaattaagggacgaagacaaagtgtatcccccttcatgtattacctaaacgtatcttagaatttcaaaacattgttttccttagaattttttaaaaaaattgtaaacatgcacatccaacactggaaagtggaaagaagtatatatatatgatatgttatctcaaaaaaactgaaatgattgtattaaaaacatactaaattctgactgatgatagatattgatacgtaattcatttgtttattattgttcgttttgttttcaacactactattcctgtcacggtctcatttaataacaacaacaaaaaagacgtcaagatttgacttttgagttcctcaattttttcaactccagtatttaaacagctaattattacataatttatcgtaagaaaaaaaaaaaaaaaaaccttatccccctgatattgtagatctcgattgtaatcactacacctgatgccacattaaatacacacagagacgtaaataagagtcaaaaaagtcgatgaagccttctgcatatataacaacaaagttgaatatataaagagtaaaattcatcatactacaatcttgaaaaattataatttattagatggttaagtaaatttgttttatagtattgttatattctttttttccaaaaaatatagggaaaacaaaaaccagtaaaaaaaaaagtcaacttaatttgctcaccaccttcttgatcatctaaacacctctttaataattcaaaactaaaaaaaaaaggtataaatgaaagagacaaaagagggaagtatatatcatcaagcttgaagaagagagagaagaagaagaaggaaaaaagaatg

SEQ ID NO: 19566 - DNA, 3003 bp, Unknown; identical to SEQ ID NO: 19565
  misc_feature (1)..( 3003): 2750-1469P.txt file - cDNA_ID_1822461; gDNA_ID_1620675; Annot_ID_164242

SEQ ID NO: 19567 - DNA, 3000 bp, Unknown
  misc_feature (1)..( 3000): 2750-1469P.txt file - cDNA_ID_1822461; gDNA_ID_2926202; Annot_ID_141574
tacagattccaaaagctggcatccaaaatcccgaacaagggccagaggaaatgcggagtatttatttctctttagaaagtcaaacaaacttggcccaagcttctcgaacacctggtatcaccattagagttcattcacaggaaggttccgtttagttccaaacttcgaaaaaatccacatgagtaaacaaactacacaaacactatacacggaattggatttctgtcacttgggcatcaaacaaagaaaggtagccagaaatattatgattcattcatttgtaacactaacaaacctcacaggtcactgaacatagaaccaattaaatattagagatgcatttgaacggtggtggaaatcaatgagcttagttgggatacttacaatgcaaatatgatttcggtaatcaaaccagttcttcatctgtacacagctgcaaggacaaagcagaaatgaagaaactgagcaatgatatacacctctgaaggaaacgatgtcatcaactaaagtctagaagataaataaataccgtgtgcggcctttatcactcttaacaagtttctgaagtacatcaatttcaatcattgctgcatcccggtatttcttaatgcttcgaattatctttattgccacatattcttttgtatcacgatcccaacattccaaaacccgaccaaatgtgcctacaacaccagcaagttcactgaaatggcacgatttgattcacataaacattttttttatctcgaacacaccatgccacttgacagctaaccttcacccatcttgctaagtattttatctgtcaaaagtcaaaacagaacacacaatagcgtaagttaagcaattaaaaatgttcaggaaggattctcatcccaatgaaacgaaagcgaaaaaagattatccctaaggcaatggtgccaaacaaaacaaagagttactagcaacaatacacatatagaagcaacataggtaaatatcttagctcacatagaatagaaagttagcaactttatccatcaaaaactcacatctaggagtgagattgtccctcaaactgaaaacataatgaccatcacgatcatcgtcccttaatggtggtgacaaaatcctcccatcgcttccatgtcctttaatcacagcccttttagcctatcacaaaaaagtcaaaattcattcattgtcagcatatcaaaatctcaccaaagaaacataaatgctcggtctttcctccacattctaaaccctaattcgaagttctaaatgtcaaagattaattaaaaaaagaagaagaagaaagaggagcaacctctggttcagctggggcctcgtcccaggtcatacgaggacgtttcctgactcgttctttatccatactctcgaatccgttagctatcatcaccgacgcggaaaatcgatcaccgacacatccagaacggaatctgatgccaatctgcagctaaaagagggaaaatttctaccagaaactctttacgtagatgtaatcacaaggcggcgaatcggggagaaggtgataatctccgaaaatggtgaaaacagaggaattgctagggtttggaactagagagagtgcaagagaaagacaactcccaataattttaccggccaaatcccttggggtcgaaccgcgacgacatccaccaattgcattttttttgcactttccaccgaaaaaattgggtctacacgatcacccggaatgtttcgcccacccggcccaaatgaaatgtggtgagatcttcttataatcttggcccaaatttccatcatggatcttaaacgttcgtttcattgtttcttggattttttttcattaactggtccatctcaaaatgggcttccataaaaatgggcttttttacaaaagggttttgtttcattaattgattttcgtgtttttttatccgtaacaattatgctttcgtttcctaatttatacgagcaaacgtaaaaatgtatagtatttgactatttggttttacgtatcaacaatcaacaacatactgtacatcagtacatacacaatttttttttaacatacacaaacttactttatgtacaaatgaactattaagaaatggctttagccttgttattgcatgcatcttcttaatttgtgtatgtgaaattcttcataggagctaattaagggacgaagacaaagtgtatcccccttcatgtattacctaaacgtatcttagaatttcaaaacattgttttccttagaattttttaaaaaaattgtaaacatgcacatccaacactggaaagtggaaagaagtatatatatatgatatgttatctcaaaaaaactgaaatgattgtattaaaaacatactaaattctgactgatgatagatattgatacgtaattcatttgtttattattgttcgttttgttttcaacactactattcctgtcacggtctcatttaataacaacaacaaaaaagacgtcaagatttgacttttgagttcctcaattttttcaactccagtatttaaacagctaattattacataatttatcgtaagaaaaaaaaaaaaaaaaaccttatccccctgatattgtagatctcgattgtaatcactacacctgatgccacattaaatacacacagagacgtaaataagagtcaaaaaagtcgatgaagccttctgcatatataacaacaaagttgaatatataaagagtaaaattcatcatactacaatcttgaaaaattataatttattagatggttaagtaaatttgttttatagtattgttatattctttttttccaaaaaatatagggaaaacaaaaaccagtaaaaaaaaaagtcaacttaatttgctcaccaccttcttgatcatctaaacacctctttaataattcaaaactaaaaaaaaaaggtataaatgaaagagacaaaagagggaagtatatatcatcaagcttgaagaagagagagaagaagaagaaggaaaaaagaatg

SEQ ID NO: 19568 - DNA, 3000 bp, Unknown; identical to SEQ ID NO: 19567
  misc_feature (1)..( 3000): 2750-1469P.txt file - cDNA_ID_1822461; gDNA_ID_2926202; Annot_ID_201946

SEQ ID NO: 19569 - DNA, 3003 bp, Unknown
  misc_feature (1)..( 3003): 2750-1469P.txt file - cDNA_ID_1822469; gDNA_ID_1620675; Annot_ID_48227
caccgatgccttatcttgcagcgattgcatctccctctctctctctctctctctggttttcgtctctctcgcagtgatgaagaaactgtgggtgattgaattgaattttaaaaaggaatggtgggggctctggtcgtggtcgcgtggaggcaacgctctcttttttctattacactagttgggcctttttggcatatgccgtgaccaaaactaaagacacttgtcttgatgattctctttgacttttggtcctatccaatcaatttaggattttgaagtaattgggcacacttgaattggcccgttaagaagcccattattctaaacgcgacaaactctttagtgacgacgatttgcgtttgaagaaataagtgatttaaaatccgcgtttaaaaaggactaagctgagctgaccccgtcgagaattggtttcctcttttcctcgctccgaagacaagaaatattccggtgaggcaatggcgtcgaacagcagagaagccaggaggcggaagatcctagatagaggatctgatcgtttagcctttatcactggtcagatcaacggcgttccttctccacctccttccgattctacttcttccctttcccagtctgaccttcaaactgaccaatccttaccggatacgattccccctcgcgatcagattcttaaagctcaagaaatcggtactctttcgctctctctttctctagggaatattgtcatccttggattgtttgtgtgtgtaagaatttgagcgacacaatcgaattttacttactctattgggtgaaaggataatcaaattggcttctttgatcagattttatgtgtgtttggctcgtttcagagtggaattcatgtgtgttaagaacccggcttgaaccattggatgtttgaaatagggcaaatttgtagagaagaataggacaacgcattatctacatttttatcttttagtttattttgtcctctgagtatagtagttaatgggcagtgaagctgttaaatccagatttcaacttggaacctacttgtcttaagctgaaattagatattatgaacctgatttcactgttctctacttttgcttaagtcacctcgccccttgaaattttctttgccattctgtgaaattctttataggtgtggttcaaccacagtcaagtgtttggaaagcttattatgttgtgtgtttttgaaatttgcttgccttgtattgtgtcacaaagtttggaaggaaaagattgctacgctgcttgattggagccaataaatcttaaggcgttgtatatattcacaatcagtgggttcttagtggtggtggaaaaacccattgattgtgaatgttctttttggcgtttcttgaagctaacctttgctgattttgatgatccttggttgtgaaattgcagctttcacaagtcaccaggacaacatctctgatgctgcaatgcttgagaatgtggatcatatcatccatcaaagcagggaagaacctcttcagcctcagaggcatgctgaaacattggcagaagcctctgcttcagatcctagagacacaacaacaatacaaccgcctcctacaacatcaagtgttcaaaacccatcagtggtagatttaggtgcttctcaagcatttattcctgtggttagttttgtgaacgccatcacaccaaagcacattggagcggccattgatgcttcggaatacgcacggatgttcacagctcttgcgattgcacttgttgtcatactatctcatctcggtttctcttccctaggcaacattgtaagcttcaggccagttttcttgcttgtcttgactgatgccacaattgtgcttggacgtgttctgctgagtcatcgtggagactcttcctcggcctcagggacggtgatgagcgggcagggtattgtggaccaagtaggcaacgctttggagacggtgatgatggtgaagaagataatggatgcacttcttatggattttagcttatacgctgtgattctcatatgtggcctcttggtcacccaaagcatctttccttaggtcaccttttaaattaggtttctttgtgctcggtagatttgtgttttgcttatggtttgaatatcttaaaattatagttagttccaaaacataattacatgtttcagatatctttctctttccttttcttttgcgtgagaagatcaatatttattggtgtttggtagtttggaagaataaatttaaaggttctcctccaattttttttaaagttatcattgcatcactgaattagggtgtattttttcttgttttgagattttgtgatctctgaaaggaaaagaaaagttaaggtgggaaagtgcagactgaagagaaagacaaaggaagaagtaaataaatttttggctgtcacacaataaattaccgagaaattagggaagcaacgtaagaaagtccctctgtcgctgtcaaaaaaacaaaggtaaaaatacgtcatacgacgaatcataaacgtttgtttctttttttttttctttttttttgattatttataaattacttttttttttctttttggcagccatttttttcatttgccgctaaagtgaaagtgcagactgaagagaaagagagagatacaatcgaagttccaaggtttctagttcccggaaatggagatttctccggcggaagacaaactcgttggctccggcgaagctgttactacagaagaagtatcagacataaataacaaagctgtagacatttgtcggatttgccaatcaccggaggaaccagacaatccgttgagacatccgtgcgcgtgtagaggctctctcaagtatatccactcagattgtcttttcctctggctcaatcgccgtaaacgcaaccattgcgaggttttaaacccctttttcaaaaactctgtttctgctacgaattgagtttaaagtttacttctttttcaaaaatttcctcttttctatgtgatttgaggaagatg

SEQ ID NO: 19570 - DNA, 3003 bp, Unknown; identical to SEQ ID NO: 19569
  misc_feature (1)..( 3003): 2750-1469P.txt file - cDNA_ID_1822469; gDNA_ID_1620675; Annot_ID_164240

SEQ ID NO: 19571 - DNA, 3000 bp, Unknown
  misc_feature (1)..( 3000): 2750-1469P.txt file - cDNA_ID_1822469; gDNA_ID_2926202; Annot_ID_141576
cgatgccttatcttgcagcgattgcatctccctctctctctctctctctctggttttcgtctctctcgcagtgatgaagaaactgtgggtgattgaattgaattttaaaaaggaatggtgggggctctggtcgtggtcgcgtggaggcaacgctctcttttttctattacactagttgggcctttttggcatatgccgtgaccaaaactaaagacacttgtcttgatgattctctttgacttttggtcctatccaatcaatttaggattttgaagtaattgggcacacttgaattggcccgttaagaagcccattattctaaacgcgacaaactctttagtgacgacgatttgcgtttgaagaaataagtgatttaaaatccgcgtttaaaaaggactaagctgagctgaccccgtcgagaattggtttcctcttttcctcgctccgaagacaagaaatattccggtgaggcaatggcgtcgaacagcagagaagccaggaggcggaagatcctagatagaggatctgatcgtttagcctttatcactggtcagatcaacggcgttccttctccacctccttccgattctacttcttccctttcccagtctgaccttcaaactgaccaatccttaccggatacgattccccctcgcgatcagattcttaaagctcaagaaatcggtactctttcgctctctctttctctagggaatattgtcatccttggattgtttgtgtgtgtaagaatttgagcgacacaatcgaattttacttactctattgggtgaaaggataatcaaattggcttctttgatcagattttatgtgtgtttggctcgtttcagagtggaattcatgtgtgttaagaacccggcttgaaccattggatgtttgaaatagggcaaatttgtagagaagaataggacaacgcattatctacatttttatcttttagtttattttgtcctctgagtatagtagttaatgggcagtgaagctgttaaatccagatttcaacttggaacctacttgtcttaagctgaaattagatattatgaacctgatttcactgttctctacttttgcttaagtcacctcgccccttgaaattttctttgccattctgtgaaattctttataggtgtggttcaaccacagtcaagtgtttggaaagcttattatgttgtgtgtttttgaaatttgcttgccttgtattgtgtcacaaagtttggaaggaaaagattgctacgctgcttgattggagccaataaatcttaaggcgttgtatatattcacaatcagtgggttcttagtggtggtggaaaaacccattgattgtgaatgttctttttggcgtttcttgaagctaacctttgctgattttgatgatccttggttgtgaaattgcagctttcacaagtcaccaggacaacatctctgatgctgcaatgcttgagaatgtggatcatatcatccatcaaagcagggaagaacctcttcagcctcagaggcatgctgaaacattggcagaagcctctgcttcagatcctagagacacaacaacaatacaaccgcctcctacaacatcaagtgttcaaaacccatcagtggtagatttaggtgcttctcaagcatttattcctgtggttagttttgtgaacgccatcacaccaaagcacattggagcggccattgatgcttcggaatacgcacggatgttcacagctcttgcgattgcacttgttgtcatactatctcatctcggtttctcttccctaggcaacattgtaagcttcaggccagttttcttgcttgtcttgactgatgccacaattgtgcttggacgtgttctgctgagtcatcgtggagactcttcctcggcctcagggacggtgatgagcgggcagggtattgtggaccaagtaggcaacgctttggagacggtgatgatggtgaagaagataatggatgcacttcttatggattttagcttatacgctgtgattctcatatgtggcctcttggtcacccaaagcatctttccttaggtcaccttttaaattaggtttctttgtgctcggtagatttgtgttttgcttatggtttgaatatcttaaaattatagttagttccaaaacataattacatgtttcagatatctttctctttccttttcttttgcgtgagaagatcaatatttattggtgtttggtagtttggaagaataaatttaaaggttctcctccaattttttttaaagttatcattgcatcactgaattagggtgtattttttcttgttttgagattttgtgatctctgaaaggaaaagaaaagttaaggtgggaaagtgcagactgaagagaaagacaaaggaagaagtaaataaatttttggctgtcacacaataaattaccgagaaattagggaagcaacgtaagaaagtccctctgtcgctgtcaaaaaaacaaaggtaaaaatacgtcatacgacgaatcataaacgtttgtttctttttttttttctttttttttgattatttataaattacttttttttttctttttggcagccatttttttcatttgccgctaaagtgaaagtgcagactgaagagaaagagagagatacaatcgaagttccaaggtttctagttcccggaaatggagatttctccggcggaagacaaactcgttggctccggcgaagctgttactacagaagaagtatcagacataaataacaaagctgtagacatttgtcggatttgccaatcaccggaggaaccagacaatccgttgagacatccgtgcgcgtgtagaggctctctcaagtatatccactcagattgtcttttcctctggctcaatcgccgtaaacgcaaccattgcgaggttttaaacccctttttcaaaaactctgtttctgctacgaattgagtttaaagtttacttctttttcaaaaatttcctcttttctatgtgatttgaggaagatg

SEQ ID NO: 19572 - DNA, 3000 bp, Unknown; identical to SEQ ID NO: 19571
  misc_feature (1)..( 3000): 2750-1469P.txt file - cDNA_ID_1822469; gDNA_ID_2926202; Annot_ID_201948

SEQ ID NO: 19573 - DNA, 3000 bp, Unknown
  misc_feature (1)..( 3000): 2750-1469P.txt file - cDNA_ID_1822476; gDNA_ID_1620675; Annot_ID_48225
agaaaaagagagaaactttagagacatcttcctcaaatcacatagaaaagaggaaatttttgaaaaagaagtaaactttaaactcaattcgtagcagaaacagagtttttgaaaaaggggtttaaaacctcgcaatggttgcgtttacggcgattgagccagaggaaaagacaatctgagtggatatacttgagagagcctctacacgcgcacggatgtctcaacggattgtctggttcctccggtgattggcaaatccgacaaatgtctacagctttgttatttatgtctgatacttcttctgtagtaacagcttcgccggagccaacgagtttgtcttccgccggagaaatctccatttccgggaactagaaaccttggaacttcgattgtatctctctctttctcttcagtctgcactttcactttagcggcaaatgaaaaaaatggctgccaaaaagaaaaaaaaaagtaatttataaataatcaaaaaaaaagaaaaaaaaaaagaaacaaacgtttatgattcgtcgtatgacgtatttttacctttgtttttttgacagcgacagagggactttcttacgttgcttccctaatttctcggtaatttattgtgtgacagccaaaaatttatttacttcttcctttgtctttctcttcagtctgcactttcccaccttaacttttcttttcctttcagagatcacaaaatctcaaaacaagaaaaaatacaccctaattcagtgatgcaatgataactttaaaaaaaattggaggagaacctttaaatttattcttccaaactaccaaacaccaataaatattgatcttctcacgcaaaagaaaaggaaagagaaagatatctgaaacatgtaattatgttttggaactaactataattttaagatattcaaaccataagcaaaacacaaatctaccgagcacaaagaaacctaatttaaaaggtgacctaaggaaagatgctttgggtgaccaagaggccacatatgagaatcacagcgtataagctaaaatccataagaagtgcatccattatcttcttcaccatcatcaccgtctccaaagcgttgcctacttggtccacaataccctgcccgctcatcaccgtccctgaggccgaggaagagtctccacgatgactcagcagaacacgtccaagcacaattgtggcatcagtcaagacaagcaagaaaactggcctgaagcttacaatgttgcctagggaagagaaaccgagatgagatagtatgacaacaagtgcaatcgcaagagctgtgaacatccgtgcgtattccgaagcatcaatggccgctccaatgtgctttggtgtgatggcgttcacaaaactaaccacaggaataaatgcttgagaagcacctaaatctaccactgatgggttttgaacacttgatgttgtaggaggcggttgtattgttgttgtgtctctaggatctgaagcagaggcttctgccaatgtttcagcatgcctctgaggctgaagaggttcttccctgctttgatggatgatatgatccacattctcaagcattgcagcatcagagatgttgtcctggtgacttgtgaaagctgcaatttcacaaccaaggatcatcaaaatcagcaaaggttagcttcaagaaacgccaaaaagaacattcacaatcaatgggtttttccaccaccactaagaacccactgattgtgaatatatacaacgccttaagatttattggctccaatcaagcagcgtagcaatcttttccttccaaactttgtgacacaatacaaggcaagcaaatttcaaaaacacacaacataataagctttccaaacacttgactgtggttgaaccacacctataaagaatttcacagaatggcaaagaaaatttcaaggggcgaggtgacttaagcaaaagtagagaacagtgaaatcaggttcataatatctaatttcagcttaagacaagtaggttccaagttgaaatctggatttaacagcttcactgcccattaactactatactcagaggacaaaataaactaaaagataaaaatgtagataatgcgttgtcctattcttctctacaaatttgccctatttcaaacatccaatggttcaagccgggttcttaacacacatgaattccactctgaaacgagccaaacacacataaaatctgatcaaagaagccaatttgattatcctttcacccaatagagtaagtaaaattcgattgtgtcgctcaaattcttacacacacaaacaatccaaggatgacaatattccctagagaaagagagagcgaaagagtaccgatttcttgagctttaagaatctgatcgcgagggggaatcgtatccggtaaggattggtcagtttgaaggtcagactgggaaagggaagaagtagaatcggaaggaggtggagaaggaacgccgttgatctgaccagtgataaaggctaaacgatcagatcctctatctaggatcttccgcctcctggcttctctgctgttcgacgccattgcctcaccggaatatttcttgtcttcggagcgaggaaaagaggaaaccaattctcgacggggtcagctcagcttagtcctttttaaacgcggattttaaatcacttatttcttcaaacgcaaatcgtcgtcactaaagagtttgtcgcgtttagaataatgggcttcttaacgggccaattcaagtgtgcccaattacttcaaaatcctaaattgattggataggaccaaaagtcaaagagaatcatcaagacaagtgtctttagttttggtcacggcatatgccaaaaaggcccaactagtgtaatagaaaaaagagagcgttgcctccacgcgaccacgaccagagcccccaccattcctttttaaaattcaattcaatcacccacagtttcttcatcactgcgagagagacgaaaaccagagagagagagagagagagggagatg

SEQ ID NO: 19574 - DNA, 3003 bp, Unknown
  misc_feature (1)..( 3003): 2750-1469P.txt file - cDNA_ID_1822476; gDNA_ID_2926202; Annot_ID_141578
acaagaaaaagagagaaactttagagacatcttcctcaaatcacatagaaaagaggaaatttttgaaaaagaagtaaactttaaactcaattcgtagcagaaacagagtttttgaaaaaggggtttaaaacctcgcaatggttgcgtttacggcgattgagccagaggaaaagacaatctgagtggatatacttgagagagcctctacacgcgcacggatgtctcaacggattgtctggttcctccggtgattggcaaatccgacaaatgtctacagctttgttatttatgtctgatacttcttctgtagtaacagcttcgccggagccaacgagtttgtcttccgccggagaaatctccatttccgggaactagaaaccttggaacttcgattgtatctctctctttctcttcagtctgcactttcactttagcggcaaatgaaaaaaatggctgccaaaaagaaaaaaaaaagtaatttataaataatcaaaaaaaaagaaaaaaaaaaagaaacaaacgtttatgattcgtcgtatgacgtatttttacctttgtttttttgacagcgacagagggactttcttacgttgcttccctaatttctcggtaatttattgtgtgacagccaaaaatttatttacttcttcctttgtctttctcttcagtctgcactttcccaccttaacttttcttttcctttcagagatcacaaaatctcaaaacaagaaaaaatacaccctaattcagtgatgcaatgataactttaaaaaaaattggaggagaacctttaaatttattcttccaaactaccaaacaccaataaatattgatcttctcacgcaaaagaaaaggaaagagaaagatatctgaaacatgtaattatgttttggaactaactataattttaagatattcaaaccataagcaaaacacaaatctaccgagcacaaagaaacctaatttaaaaggtgacctaaggaaagatgctttgggtgaccaagaggccacatatgagaatcacagcgtataagctaaaatccataagaagtgcatccattatcttcttcaccatcatcaccgtctccaaagcgttgcctacttggtccacaataccctgcccgctcatcaccgtccctgaggccgaggaagagtctccacgatgactcagcagaacacgtccaagcacaattgtggcatcagtcaagacaagcaagaaaactggcctgaagcttacaatgttgcctagggaagagaaaccgagatgagatagtatgacaacaagtgcaatcgcaagagctgtgaacatccgtgcgtattccgaagcatcaatggccgctccaatgtgctttggtgtgatggcgttcacaaaactaaccacaggaataaatgcttgagaagcacctaaatctaccactgatgggttttgaacacttgatgttgtaggaggcggttgtattgttgttgtgtctctaggatctgaagcagaggcttctgccaatgtttcagcatgcctctgaggctgaagaggttcttccctgctttgatggatgatatgatccacattctcaagcattgcagcatcagagatgttgtcctggtgacttgtgaaagctgcaatttcacaaccaaggatcatcaaaatcagcaaaggttagcttcaagaaacgccaaaaagaacattcacaatcaatgggtttttccaccaccactaagaacccactgattgtgaatatatacaacgccttaagatttattggctccaatcaagcagcgtagcaatcttttccttccaaactttgtgacacaatacaaggcaagcaaatttcaaaaacacacaacataataagctttccaaacacttgactgtggttgaaccacacctataaagaatttcacagaatggcaaagaaaatttcaaggggcgaggtgacttaagcaaaagtagagaacagtgaaatcaggttcataatatctaatttcagcttaagacaagtaggttccaagttgaaatctggatttaacagcttcactgcccattaactactatactcagaggacaaaataaactaaaagataaaaatgtagataatgcgttgtcctattcttctctacaaatttgccctatttcaaacatccaatggttcaagccgggttcttaacacacatgaattccactctgaaacgagccaaacacacataaaatctgatcaaagaagccaatttgattatcctttcacccaatagagtaagtaaaattcgattgtgtcgctcaaattcttacacacacaaacaatccaaggatgacaatattccctagagaaagagagagcgaaagagtaccgatttcttgagctttaagaatctgatcgcgagggggaatcgtatccggtaaggattggtcagtttgaaggtcagactgggaaagggaagaagtagaatcggaaggaggtggagaaggaacgccgttgatctgaccagtgataaaggctaaacgatcagatcctctatctaggatcttccgcctcctggcttctctgctgttcgacgccattgcctcaccggaatatttcttgtcttcggagcgaggaaaagaggaaaccaattctcgacggggtcagctcagcttagtcctttttaaacgcggattttaaatcacttatttcttcaaacgcaaatcgtcgtcactaaagagtttgtcgcgtttagaataatgggcttcttaacgggccaattcaagtgtgcccaattacttcaaaatcctaaattgattggataggaccaaaagtcaaagagaatcatcaagacaagtgtctttagttttggtcacggcatatgccaaaaaggcccaactagtgtaatagaaaaaagagagcgttgcctccacgcgaccacgaccagagcccccaccattcctttttaaaattcaattcaatcacccacagtttcttcatcactgcgagagagacgaaaaccagagagagagagagagagagggagatg

SEQ ID NO: 19575 - DNA, 3003 bp, Unknown; identical to SEQ ID NO: 15631
  misc_feature (1)..( 3003): 2750-1469P.txt file - cDNA_ID_1822496; gDNA_ID_1620675; Annot_ID_48219

SEQ ID NO: 19576 - DNA, 3000 bp, Unknown; identical to SEQ ID NO: 15632
  misc_feature (1)..( 3000): 2750-1469P.txt file - cDNA_ID_1822496; gDNA_ID_2926203; Annot_ID_141584

SEQ ID NO: 19577 - DNA, 3000 bp, Unknown; identical to SEQ ID NO: 3940
  misc_feature (1)..( 3000): 2750-1469P.txt file - cDNA_ID_1822500; gDNA_ID_1620675; Annot_ID_48218

SEQ ID NO: 19578 - DNA, 3003 bp, Unknown
  misc_feature (1)..( 3003): 2750-1469P.txt file - cDNA_ID_1822500; gDNA_ID_2926203; Annot_ID_141585
gtttgcataagtgtcataccaaattcttctttgcaagaatcaagatctttgcctgcttgaaagagtatgagttacattcggcacttcattgtaaaagtcaggttcgtcttcttcttcatcagatgataataaagatggtcccatccatgctttaaacccctcgttcactcgtctttcaacgtctggtgtgaattccaacggattagcttcaagcatctccaagccctgatcatttctgttcccaaactctccttcgtcaatagttaaagcagctcttcttctaagggagaaagcagttccagcatacaagattactaaaccccatgaagaaatctcgtagcaccaaaacaaaggcacagaacagctgcttcctaatgtgaggaggcttgagccgagaaatatagcaaggagaccatagatgatagcaaacacaacattcagaattgacagacaacggaccccacctgtgaatttattggacatgataaagaagatcaataacctattttgaggtccaagcttagtgataaactctgaagagcccagattctcaaaggtagaaacatagtaattactagcagatgaaatagaattacacataaaaatttataagataaagtctggcactgaaaaggaatgaatctattacacgaatgcatggatatacaaagaacaaatatggaaagctgaatacatattaaagagagaagagagtatacctcttcttgaagcacagtagttattttcaacgacttttagaaacccatgacggtgaggagcggaataagccacaaaaattcctgcagtattgcaacaaaatagcgagaataataagcagcagacataccacacctgtaaaacttagaagggctgccatgtggaggcagaaagcaataaaggaaataaatcagctccactaagttacatccatataaaattcaaatccaacaaaatctagcagaggaattaactggatttagcaaactccacagcttgctctatggctaaccccctaaaatcccaataaacctgaaccatcatcagacctgtctttatatagtggcttcaatcaaaacgagtgattctagaactaaacataacaacgagcattcagattttgaggacacatcaatcaatcaaccctctctgacaatatttcacctcaccaatcgaaaaattcagaagccattttgccagaaatttgctaagcatcaatatctagcgtaaagccactcagaactgagcatcatctaatgaaatcagccaacaaaacacaaatgcaaacccagctctgtagatatgaaataacgaagaacaaaagctagagacttgacgctcacctgctacaagataaacagatgatacaaggaaaattatagtcgagggaacgaaaacgaccatccagtaataatcaacagtttcttgatcggtcaagtaaaaagcaccgggaaagagatcggagtcacgagctttgccatagataggcaaaggttgtagctttatgtcgctgcaaaatggcctcttaagaacattcgaaggaaatacaattttcaagctgacgatcgtgcaagtgaagatgacaaaacaaaggaaagccacgatcgagactaaagtcggcctctgaagcttaatccaggctctatcttcttccctaaggctctcgtactcttgctttggcataaacgcttgacgcaacgcatctccaatgatcgccattgaagaaacacaaaaaaaaaactaatccacaatcgaattagacccttctcaccagataattccgaaacaattcaaaataggggtttccgaagtttatcaggaaccctaaatcaatgaacaccgaactggggaaatgaggaagaagtattagtgatgcagaaacaattaggcgcgtgtaaaggtacttgctttgataacttctgtgtaattacagtttgacccccaatagtttgttaaagttcgaatctatccccacttcccgctcaattattatcataatcatagaattagaatatgcttagctatagagtcctaattaattcaactgatgaagttagaactaacactcttatgcaattttgatgtctataaatctaaattattttttgcaagtgggtgaatacatccaacacagaaagtgataaagaaacgagaactcaatagaatagaatagagagtaaatagatgtgtagcaagttggtttaggtttgtatcacaccaatcacgactttcataagaccaaaatgttttctttatgatgaattttgtaaagatgtggatttaacggtttcatagcgttatcaaatgacactcataattaattgcatacgtgtgcaatcgcaatcgtaatcgctggttagttttgttttgcaaatactttgtttcgatcattaaaaagaaaacattgtaagctgttgagaatcgaccaatcatcaaactgtaatgttccatctaaatctaattcattcatttagattggataacattattatatttagctcccaaaaacgaaaaaataataatactaataactaacatttactgttagtgaaacgatgaccgtcggatttataggtgggtcaaaagcaacggtccgatggaaagcaatgacctgactgaattggtgtaactatccaaacacaacgatatgaacacgtggcaatcttttagtggacccttttccagaagatattcgacttatttccttttttgctatttcgtggaaaataaaaaatgatctgaagtacagaaaatacatttttaaaaaacaaattctgaaaattaacaattagagaaaaagaaaagaaaaggaaaaaaaaaagatttctagtagaaagagagaagggcgtgaattcctgagcgagagattcttcgccggagtaatctctttgcgtgatcttaccggctgcttaattcgtcttcgcctgattcgttggtttcaaaattcgtctctctctttcaatcggaggttaattgtttttctgtttgggggtcaaagcgaagatg

SEQ ID NO: 19579 - DNA, 3000 bp, Unknown; identical to SEQ ID NO: 3939
  misc_feature (1)..( 3000): 2750-1469P.txt file - cDNA_ID_1822504; gDNA_ID_1620675; Annot_ID_48217

SEQ ID NO: 19580 - DNA, 3003 bp, Unknown
  misc_feature (1)..( 3003): 2750-1469P.txt file - cDNA_ID_1822504; gDNA_ID_2926203; Annot_ID_141586
tttcaggccaagtgaccttgtaaaagttttttttttgtcttataacatagctattgatttatactgtccaacgttttcacagagctacatcgagctctggtaacggggttctaaatcagttggccctccctgcaccacctgtaactaatggttcagccaattccaaaatagacctcctcagtggcgatgatcttgcccttgttcctgttggacctcctcagccagcaagtccggttgcatcagatcaaaatgcactcgcccttatcgacatgttctcagataatactaataatccaagtcctgcaactgcaccaagtggcaatccagctcagaatattcctttgaatcctcaagggcaccaacaaccaaatagtcaagctggagaagctggattacaacaatccaatggatttgcgcctcaagtgggttattcgcagtttgagcagccatcatacgggcaaggagtctcttctccctggagcagtcagcctgcacagcaaccagtccagccatcttatggtaatatatataaacagtttttgtttttcacacatctggagattagattgcagtatgccaatgtttctctggttatggcaacaaggagaaagaatttccttcttttggattcagaagaatcagcttcaattgtgtctcatgtctaatcattaattgttctgtttttatggtaatcttgtaatataaagaaggtgcccaagacagtacggcatttccacctcccccatgggaagctcagctccaagactatagtccctctgcggagtcaggaagtccgttttctcctggaatgcatccaactcagactgccttcacacatgctcaaccagttaacaacaacaatccatatcctcaaattccccaaaccgggccaccagtcaacaataacagtccatatgctcaaatgccccaaacaggtcaagcagttgccaacatcagtccatatcctcaaattccacaaaacggcgtgtacatgccaaaccaaccaaatcaggctcttgggtcaggctatcaaccacagcaacaacagcagcagcagatgatgatggctcagtactatgcccaacagcaacagctacagcaacaacaacagcaacaggcgtatggaaaccagatgggaggatacggatatggctataatcaacagcaacaaggaagcagcccatatctggaccagcaaatgtacggtttatccatgagagaccagacatcgcatcaggtagcatcatcatcatctaccacatcttatctgcctccaatgaaacctaagaataaaccagaggacaagctatttggggatcttgtggacatctccaaattcaagcctacaaaaccgacttccggaagagctggtaccatgtgaaaattcctccatccattcatcatttaccagtattcatctcctctatcctcctcagctaactctctttcttctctttgttaagcttttttcatcattgattttattaccctcttgggagataacatagatatacatatgtgttatgttcttccttataatttaccgttggttatgggtttgtatatttcttgtagagaaaagaaaactggaaaatcttttgttgagaactcagcgatttggggtttgtctcgagattctattttaggacattttaatctctcatttgtattttcagaccttttatttgttatatccattggcaataaagtttgatatcaattggatgagagttatggttcttaaatttgccaaaaggacagtttatgttctttgtatatgattgcaaccctaattccatagtcaatggagacatcaaaatgtcaaactatgcttgcattatataatctctttcgactcaatgatgtcaattaccgaaaaagtagaaaggaaggatttgttttgtttgcgactgttgttagttcttatgttgctcgtcgtaaacaagaaaaacctgccattcgtttgggtttttgaaatctagtctaacagaaagaaacaagagacaaatgaagaagagtaaatctagtccattcatcatcatcagtcttttggatcgtgcatatattaatttgtataagagtctgtctaacaaaattgtcaatatgtccgagtggttaaggagattgactcgaaatcaattgggctttgcccgcgcaggttcgaatcctgctgttgacgtattctattttgttttcttttcagctctcttcagaatttttgtaaatattttaaaagggaaaaaaatctcaaaatacgatttcaattaaaattgtagagattctcctcacgtctgtttgtgaaatgttgtctctaataaatttccgtaaattactgaaaacaagacacgagaaattgttaatttaacaaaataaaaatacgttacgtttggggtttgccacgtaactacttaccgccacacgttctcgtccttttcttcttcctctctgcattcttcacagagtttgtcaccaccaacaccaaacacacaatttcacattcttttgcatatttcttcttcttcttccattatggagatacggagcttgattgtttctatgaaccctaatttatcttcctttgagctctctcgccctgtatctcctctcactcgctcactagttccgttccgatcgactaaactagttccccgctccatttctagggtttcggcgtcgatctccaccccgaatagtgaaactgacaagatctccgttaaacctgtttacgtcccgacgtctcccaatcgcgaactccggactcctcacagtgggtaaattgatccattccattccatttctcttctcttgtttgttttattaagctccaatttcagtttcgtcttttaatttatatgttcttcttacgatcagtgggacttaaaaaattgctcctttaaatgcttcagtatgttttgagtattacaaagttgtaagattttatttttattcatttggtggctcaccattcgacgactacttttgaatttgagtttttgaaaaatg

SEQ ID NO: 19581 - DNA, 3000 bp, Unknown; identical to SEQ ID NO: 3937
  misc_feature (1)..( 3000): 2750-1469P.txt file - cDNA_ID_1822512; gDNA_ID_1620675; Annot_ID_48215

SEQ ID NO: 19582 - DNA, 3003 bp, Unknown
  misc_feature (1)..( 3003): 2750-1469P.txt file - cDNA_ID_1822512; gDNA_ID_2926203; Annot_ID_141588
ttaattaaaattgtaaattgctatttattctgcatattttcccttctgttttatcacacggccgctcaagtttatttttaatttgtttttgggtaaaagtaactaaactttgcgcatgaaaacttttatgtgaggtttatgtattattttttttggtttgttgctgacttgttgttgagtgttattaaagaactaaatcgattttacctaaagcgtaacttttgttataggttttattacttaaatattaatttacactttcattttcaatgctacaagaaaaagaacagaaaatttacaattctgattccatttttcagctgctgccacatgtgggaaataagaccagccctccaataactccaagaaccggtagagaaatgaaggtatatatgatctattaaaccggggggtttccggtttatcattgtctcaaatcaaatcatatctttattaaaaggagtcgacgtaaagaatgaaaaaaagctggttggtttcggaactttttcgttgattataaaaattaaccgagagaaaagagaaagcattataattgtcatgatgaaatcatgcaattgtttattcaatccatatccttttctttttgaaataataaaaagggtaacacagtgagtaatgtgcaatgagcggaaattctatggttaacttttttttacgttcgaaataattgctgacaaaaagaaggacttcatttgagaaaactcaaatataatgtcaaacatcaatttggctagatctacccgttacatgaattcggttctagttttattggatttttagattcggattaatatgttatgtctggagaatataataatatatactagtcaattagactactcctcgccaagtgactattactagatgatatattatgagaatcaaaacatatgagcaaatatgaataaaatcgttgtgaatgatacagcatttgtacaagagcatgataagaggaagaacaatgggaagaagattaaaggatcagaaggagaagaagaaacaagagaccagaactcgcaacgctgagattcacgccgcggtctctgtcgcaggagtagctgcagttgttgccgcaaccgcagcatctaacgctattgcggccgcagaagatgcggttgaatcaacaaccgttgcagctgcaatggcatctgcagctgctctcatcgcttcacattgcatcgagatagcgggagagattggggcgggttataaccagattgccacggctgttagctccgcgaccaatgctaggactaacggagacattatggctttaacggcaagtgctgcaacaggtatcatttattgttttctcgcatagtctaccgctttcaaatgataccccatatgtgattttgaggttttgttgagagattttagcgttgcgaggagctgcgattctaaggtcacgaatggaaaggaacaacgagaacaaagcaatgctatatgcaacaaaggagcacgtcgtagaaatggaagagagaaatgtatttggagcgatgactttcgtctctagaggagaagagcttctcaaacgcacccgcaaaggtaacttgtgctccaagaaaacaccgttttgatcatgtgatgaatctgtcagggttaagtttccgaggatatttggtgacaggggatcttcattggaagcaagtatcttttaacatcaattccaattggcaagtaagttttttttttttttttttaagaactttcataaaaaaatgatatatatgatgttcctcatactcataggctcttgattttgaaataggtggttcttaaaatgaagagcaaacatgtgggtggaactttcacgaagacgaagaaatgtaagcttacatgacacaagtttctagcgaattagtgaataccaaagttgatagtcttcttaattaccttgtacaaaccaacattcccttggcggtttatttggatgcaggcgttgtcaatggagtgtgccgagatatacccgaatgggcacatagaggacgagcagataaaatggtagagcgaagagcctactttggggtgaaaacagtggaaagggtgattgaattcgaatgtggaaacaaaagagagaagcaaatgtggatagaggggattcaacagttgcttaactcactcgaaatcggttctagtgttcaatggaaacattagagttaggatcaaattaaaacactatttcacatttgaacatcatgtaataacgattgattttttttttcgatttcacgtgtgttgaagaatgtatgtttgtgtctggtgtaataatatttgacattgatatttatttgtcacactaacgacatttattatttcccgtctttctcactttatcgatttacagctggatttctgagtttttatttctttcttaaaaaggaaaacaaatataagaaaattagaacttaaaaaattccctctatcagtcaaatggagttcttcgtccttccggtggaaaattctcggaaacgattgaacttctgataatcaaatccggttcatgcgagttatgtaacatttatcggtaatatatcttcccactctactgcagtaattcgagttcaatttaggatagaattgctttacaaataaatttgagttatcttctacttcagtcttgtattgtatcttacaagttcatgggtcaattcaagatctcccttttcatgtttccgaatcaattttcttttacttgagagaaccaaaacttagcaggattcgcgttttcttaatttaatttgtttcgattcagctccgtttgcttcttgtcgcttccaatttcccgaccaatgggtgatagatttgtcctagcatagaaaaaaataagattaattgatgtctcagatgtaagatccattacagtaaaattcagttgtaacatccaattcgtgtgtttgaattcaattctctgttttttattctatcctgcagatcattcgttaagatggtgatattgagttgtttcatggagtctacatg

SEQ ID NO: 19583 - DNA, 301 bp, Unknown; identical to SEQ ID NO: 3973
  misc_feature (1)..( 301): 2750-1469P.txt file - cDNA_ID_1822589; gDNA_ID_1620677; Annot_ID_48289

SEQ ID NO: 19584 - DNA, 3000 bp, Unknown; identical to SEQ ID NO: 3974
  misc_feature (1)..( 3000): 2750-1469P.txt file - cDNA_ID_1822589; gDNA_ID_1620677; Annot_ID_164291

SEQ ID NO: 19585 - DNA, 3000 bp, Unknown; identical to SEQ ID NO: 3284
  misc_feature (1)..( 3000): 2750-1469P.txt file - cDNA_ID_1822589; gDNA_ID_1620636; Annot_ID_162892

SEQ ID NO: 19586 - DNA, 3000 bp, Unknown
  misc_feature (1)..( 3000): 2750-1469P.txt file - cDNA_ID_1822589; gDNA_ID_2926204; Annot_ID_141632
cttttatgcagtttgagcctgagcgcatgaacactcatatcgtggctcgaatcttggtcaaggctcttatggctatgccaactccagacttcagcctttgcctcttcttgattcccgaaagagtggtattcttctttcctcttaacttcacaatgttttgctttcttacatatatagcttatcgtagatacagaagaaacgattgttcaaatgtttctgactcaagttattatgccattccaagttatttctgtcagttcagtctgtgtactgagcattcatgataaagtgtgagtttcaatgtgttggattcttgaggactaataaatgtacttgtttggattgtgtgtttcagcaaatggaggagcagttcaagtcactaattgttctatcacactaccttgaggtacgcaaacatcagtattagttagttgagagttgaaaaggtgtgcattgagtatttaaagcacttgtttttcttttgcagactgggaggttccaacagttctgggatgaagctgccaagaaccgtcacattctcgaggctgttccaggtaactaacttctgaatcataaataaatcgtctactaataacaaatttctagatgtagatttgttacttaaggatatttgtgtgtagatgtcttatggtacgaacaaagtcctcagtagtggtttatggtactgtctattcattttatgattgtgtctagtgtagatgtcttatatgcgagagattaaatgcaggttttgagcaagctattcaagcatatgcaagtcaccttcttagcttaagctaccaaaaggttccaagatcagtgctggctgaggtatgatgtttggtttatgatctcgttttcaccacggatagcttaagtcatcaaaatagtagaacttcggatgtgaaatcttttactttctcatataattttctgttacgaatattccacatcatagttctggaaatctaatttgttgaccttttatttgtcaataaatgacaattttcacaggctgttaacatggatggtgcatctctagacaaattcatcgagcagcaagtgactaacagtggatggattgttgagaaagagggtggaagtattgtcttaccacaaaatgaatttaaccatccggagctcaagaaaaatacaggtgagaatgttcccttggaacacattgcccgcatcttccccatccttggttgaaccaattcatgagaacactgcaaattttccttttgtctcttgttatcttgtgatgtacacttttaagacaccgtaatgtgaattttggcaatggccttcctctttgcaatttgacagattttcttaaaaatctagtagaccgagactttgccataattagtagatcttcatagtctgagctctgcttcttacctttttttttaccttccatggattccaatactggtttctcaacaagtgttggaattggctcgtttctgattgattatcttctgtttacttcattacatctaaataaactaaacgaatcttcagacaacccaaacaattgtcttctttaaaaagcaaaggaaaaaaaaaacttttgtttaggtttcttggaatatagaaactgacacggcaaatttgtattgagaaagtttgaaatacaaagagactgtctatgtcttgtcgtcctctctacacagatcacatacgaagattgacagccatccatttggaagctcacatgttgacaccaaatcatgtcacgtgcacaattttctcttttcccatgcatattttgactgctccctatgtgataaatttgactgattaaactataattagttagatcatctcgtatctaagatgattgcttaaaacaatactattattctactaacaactaggttattcccaagatcataacttttgattttgatgtaactagttttgtaattttgtacatatatgagacttttttgaattgcttaacagaataaataattgaattttatgaatataatatataaattttcaatttgatcgacaacaatgaacggtgttttatttataattgtttttttgacaatcatgaacctaatgatttgttttttctattttatttagtcgacataatgaagactaatgaagatacaatatgtgattgaagtgaacaagttagatttaattaagatacgtggaggatataaagaagggtgataaatacgtgaataaaaagtgaaataaacaaaggcaaacgatcagacagacaagtcgtgaacataaaaacgggagagacaggaaaaacaaaagaaagccagacgagcaccaaaaaagaaactgcaaatcttcgtttatgtaaatcttcttaccgtctctctcttgtatttcttcaatttcaaaggtggcttttttttctttctttgttgggtattaatctgagagaaattgaggaaaactgttttcccctttctatgttctcagcttggcacttttctttgagattatggttaattggttcccttttggaaattgatttcaaatcttatccagaagaaatttggtgccttctgtttttaaacaaattttctagagtttccgtgtttaatttttgtttcttattttgttttctattaaaaaattcgtttcttgctcgtgttagttttcgcatttggagtttcctgacagcgagagttgctcgttttctggggtcacaacagaagaattcgagcttggaagattgaaatttgagatcttttgatcttgaatcaagcataaattctggattttgaagtttgagagtgacccagtgactttggtctgaatctcggaggtatcttattccaggtaaaatccattaacatctctctctctctctctcaagctcctttcttcttttaagagaagtttatgttgattttcgtggttaccattcatcttcagggatcaaggattagacttaatgcgattaagcaaatgggtttttcacgatgactctccttgttgttggggagattcaataaaatg

SEQ ID NO: 19587 - DNA, 3000 bp, Unknown; identical to SEQ ID NO: 3974
  misc_feature (1)..( 3000): 2750-1469P.txt file - cDNA_ID_1822589; gDNA_ID_2926204; Annot_ID_202041

SEQ ID NO: 19588 - DNA, 3003 bp, Unknown
  misc_feature (1)..( 3003): 2750-1469P.txt file - cDNA_ID_1822597; gDNA_ID_1620677; Annot_ID_48287
ctggaaaaagctttcactgatatgaccctttcctattgttaagacctcaagattcctgaaacagatcaaaagcattacgtttgatatataataactaagttatcgaaagcatatccgagggtaaacaagacagatacctcaaagtggtagcggctttcatagccagagcattaacagcaggagcgccataaacattaacttcagtagcatttggatagcgactacacatgttttcaactgcacataaagcacaggaggttatattgtatcccacgtatatttccacaattagcaactgtttttttgttttcctcaaacggcaaataacagaaaagacagatttaatgtatgtatgaagaacaacttacattgttccatagaaatccttatattttcaaagttcaagaccctccagaaatcctcatgagcactagctactctccactgccgacataccatagcagagcgacagaggtcgacatgattcaagaacgagaatacctgaaagaaagaaaatttttaaaaaaacaaaaaaaaggatacttacatgtatttatcttaaaatgcaagaaagaaaaaaagaataccatatgtaagaggtcatcagtcaaatcaatatgaacttcaaaatcttctgtgtctgaagaaccattatcatctccatcatcctttttcccatctttccgattataattcaagatgaaattctggcagaacatatcagtatccgtccgggaagaagaggcaatgccaaaactaacagttctctccaccgacgaaacagaatttccagcatctgaagatacccccgaaactgacctgcactcactgcaattgaacttcatagtcagaaacacatgaaatcagacagacgaataaatgacagattaaggattgatgtcaactaaaatatcactcttgatgacgctgataagccttaaacaaaacaaaaatccaagaaatcgattctacactaaagtaattgaacaaaacagagtttacgaatcatgcatgatacaaaagtaagagagctcacgcaagcccagagtagactttggcacgcttgtgatacgaatcatgatcagcttcctccatcgtacaatcctctgcttctgcaaccacattgctactactctcaccctgaaccaactgattcaagggaatctcagaggtccaaaagcgatccaattcagcccaagcggcttcactttcctcggcacacagcctcagcctccaacgtgggactcttggtgccctctcgttttcaccgaaattaacaaaatcaccatcgccgttactgttatccatggccgttgctaaagattgtttcttcactctgccgccgttatcgtcttcctcgtcttcgtcttcgtcggtgaagcaagaaaaacaccaaatcctcatgcaacccctaagcccacctccccaaaaacgaaatcttgtctctcgatctaccacatttatagaaaacttgctcacaaaaaccagaatttggggaaaagtaacggaattcggaaagcccagatagaattgagaggaaacagaattgaatctctaattctggatttaaagtgacgggaaggagaagatcaaacgctaatctgattcaggattagggtttgagagaaatgaaaaggtagaatcggatcagatcttgcgaggggcgagtagaggcatattgtgaggtttctttggaagaaaaggtggtcgatgatataatctggatgccgattcggaagaagaagcaaaataaaaatcggcgaaaatggaaagggaatgataaaaattaaaaagacaaaactaatcgcgaaacacaagggactttggaagtctttggttcttgcttcaccgttgtttttgttcagaaaggacgatgtaaaaacggtgtcgtttgacaataagtactactgtgtgtaaagtagatagatagatactctgaactctgaatactaggatattataacaatgtttagttcgtacgataaaataatggtttagacacaaccgtttatgtttgggtcaaagttacaaaatttgcgtcacgtgagcagtcgactgaaaatcgaagatagtcaggcgtcagtaggtagaccgagccacaactgtagtatattgtattagcaatttagcatacgtaacgtacaaatacttgttgttttagtattttggtgatgttatcgttttgtgatttaaataaaaaaatttttgtttttattcaatcaaaattctaaatttttttatcaaaatttgatattactagtttaagatttgtaaaaaataatctaaaatcttcataaatctgaagttattggattcatacttttataaaattattttgaaaagtttatattatttaattaaaacaaaataaagtatgattgctaattaattaaaattattgtattattgatttatgactttctaccatttttttgtgttaaattctatcattttcttcacaaaataaaatcatcaaaataaagaaattgattgaaaaagtttcaaaattataaaaaactaatcaacaatattatataaaactctgtgtttaaaataattcatttatttacgttcgatgatattattaaagttaataaagtttgggatcactaatcaaaattcatttccgagtaaaaaacacagacatcacatcactgtaacttttgtaccagcgaaacccacattaatattggggttgtttctctttatggcccaatggctatatcttcgttgtaactaggtcacgtgagccattgacttttcgcccaatatttaagcccatttaaaggcccaatatttaagcaacactcatatacaacatgatgataaaattaaaaccgttgaagtatgtaattaagattgagatgacggtggatgtgtgaaacagctgcttccggtgtgctagtgccccgataggaccaaagctgagaatataattgaatatgtggacggttgagttataattaggagaatctcataaatattattgaaatatcaacgatg

SEQ ID NO: 19589 - DNA, 3003 bp, Unknown; identical to SEQ ID NO: 19588
  misc_feature (1)..( 3003): 2750-1469P.txt file - cDNA_ID_1822597; gDNA_ID_1620677; Annot_ID_164289

SEQ ID NO: 19590 - DNA, 3003 bp, Unknown; identical to SEQ ID NO: 19588
  misc_feature (1)..( 3003): 2750-1469P.txt file - cDNA_ID_1822597; gDNA_ID_2926204; Annot_ID_141630

SEQ ID NO: 19591 - DNA, 3003 bp, Unknown; identical to SEQ ID NO: 19588
  misc_feature (1)..( 3003): 2750-1469P.txt file - cDNA_ID_1822597; gDNA_ID_2926204; Annot_ID_202039

SEQ ID NO: 19592 - DNA, 3000 bp, Unknown; identical to SEQ ID NO: 3984
  misc_feature (1)..( 3000): 2750-1469P.txt file - cDNA_ID_1822601; gDNA_ID_1620677; Annot_ID_48286

SEQ ID NO: 19593 - DNA, 3000 bp, Unknown; identical to SEQ ID NO: 3984
  misc_feature (1)..( 3000): 2750-1469P.txt file - cDNA_ID_1822601; gDNA_ID_2926204; Annot_ID_141629

SEQ ID NO: 19594 - DNA, 3000 bp, Unknown; identical to SEQ ID NO: 3983
  misc_feature (1)..( 3000): 2750-1469P.txt file - cDNA_ID_1822605; gDNA_ID_1620677; Annot_ID_48285

SEQ ID NO: 19595 - DNA, 3003 bp, Unknown
  misc_feature (1)..( 3003): 2750-1469P.txt file - cDNA_ID_1822620; gDNA_ID_1620677; Annot_ID_48281
atatatatatagaagaaaaaaaggaactctttttaatgcaaattcccacacctcaggttgtttgattccaagtataagcccacaatcagacaaatcatcagaaatttcacacccaacatcttcatacaaggcatcatgatggatacgcttagcagatggctgaaccacaatgcgggaaatgccggttctgtctttcccaccgtgtaaaaggcgagcgcaatgcgatggcgtcaatggtgttcgtctctcccatttgttaactgtttcagctagaatccccacaactccattccccaacttcttctcctcctcatggccatttgaattcatctttcatgtaaaaacatataatctctgcagatgaacaacaaacccttattttaaacaccctggaatagattcacaaacatttcatatttcgagtttcatcaaccaaacatcaaaaacccaaactttaatgtgaaactgttgaaaatcgaacaaactgggaacagaaatttaacgagttgagaaatagcttttgctcgagcgattaattgaaaactcaaatcagaacagaacagaacagaacagagcagagaggaagagaggaacgcaaattattaaatccaaagtgaaaaaatgaaggcagtgatttagctaaagcgctctccaaatttgcattcctcaagatgggaaaattatggaagaaggaatcaaaacgtacctgatgagtttgatcatgcaatgcctgtgagctggtttgtcaagaaaaaatacaagtttttttttttctttggaattagtgagttttttaggcgcagtaataatctctttccgtcctttttataagctaaattacgtatatgattaatatattgtgggcgtgttagcgaaagattaaattaatataatataatatttcttgttataatgtatgatgtgacaagaattctttttgttaataatgatctgtaatcagctataattattttcccctttcttcaggtaatcatttttgttaataatgatctgtcaaaaaaaaaaaaaaatcctcgtgttcatttttttttgaaacagaacataacttaattaagctctttcgaaaactacttttagttataacttaatgtggctttcacataatggatatgctccgaaactatctaatgcaatagagagacattaattaagtttgttgtatacacgagaacaacgtgagccagccaatgttgtaaaaataatatatatagtatataatgccatagacaataataatgaaatcaaacgaaacaaatgaaataagtatttttactatttaaagaaagcaaaaacaagaaaggaacaagctcttgtttacgtggatggatacttggataggaccgagggaggatcaatccaatcgaaaatgtattacgtgtattcgaagagaaatagacagagatgagtgaagacgtttgctcacgtagctactatatcctcgatgacgacgcttaccagttaccactttccgtgttctctacgtctctctcttctgagactttttttaacattattaactctttaatatgttgggttacgtatatgatgatttcaagttagggatattaatagattcttggatgaaacgcaccgttttactaaaaattcccaagtattatttgcagagagtgggcttgagttgttgtcttaatttggcccaagttccttttgccttggcatttgtaacccaaagaagaatgagaacaagcttcttcaatttaggaattaaggagtgcacaaaggtgacttcaaaatcagtgtgtacgaacaatagtatggcctaaaacgattatgctaccaacagaggatgcatgggccgcggtgggcagacatacgattcaacctcgacaagtgttcttcttatgaaatatctatgggccttacccaataaactatttcaagaaaaaacaatttgaaagtgaaacttgaacattgttttggtatcagttcatcgatatcgctgcaagcttagatttcgttgacggcttttcttttgtttaatttattaggttttcttttaaaagtttaattaaatagacgtagttaattggagatggcctgggaacaagttctgggcattgactttgcaatggcacaaaagtcgagatgcgagaagagattcctcaacgaggctacaaagtaacagtggtcctatccttttgctttttacacccatctctttttttttcatacattttttctcacaaataaagaacttttcttctttcttttttctgctattttttttaacgttgtgcatgtgtaaatctgaaactctctagtaaaacttttctgtaatatcatttgcttacataatttgactatgatttttttggtaaatgaaacatcatgcaacaacctcgagttgaatgtgcatctagaaacatgatgttggatttataaatattcactttcaactcaaccttttaccaaaaaaaataaaaaatatattcactttcaaagtgagagatttcacaaactcaaataaccatagaacaatagcatttgtatgacatgaccacaaaaggttgttgtattcttggatggagaattcaacgccaagtttgacaaaatgataaaagacaaatgtgacttgatgcccaaaaaaaaaagagaaaagagatttgtttgttttatggaattttaatttgatacgtatatatataagagaaacacgagcaaaagaaaaagtagttacttttaatttattattcgaaaggtaaaactgtttaaaataaaaaaagaaaaagaaaaaggaatgaaaaaaaaagaaagaaagaaagaaagaaagaagagaagacaacccacacgaatcgccacttttgaagagagaagagaagagaagaggcagctcctaactttctcttttgcttttgtctccatcttttatttcacacccgtgaccgtgccatctccacactctccgtgcgttaatcctggttttatgatttactttaattctcctgtatgtgaacatcaatg

SEQ ID NO: 19596 - DNA, 3003 bp, Unknown; identical to SEQ ID NO: 19595
  misc_feature (1)..( 3003): 2750-1469P.txt file - cDNA_ID_1822620; gDNA_ID_2926204; Annot_ID_141624

SEQ ID NO: 19597 - DNA, 3000 bp, Unknown; identical to SEQ ID NO: 3966
  misc_feature (1)..( 3000): 2750-1469P.txt file - cDNA_ID_1822624; gDNA_ID_1620677; Annot_ID_48280

SEQ ID NO: 19598 - DNA, 3000 bp, Unknown; identical to SEQ ID NO: 3966
  misc_feature (1)..( 3000): 2750-1469P.txt file - cDNA_ID_1822624; gDNA_ID_1620677; Annot_ID_164283

SEQ ID NO: 19599 - DNA, 3000 bp, Unknown; identical to SEQ ID NO: 3966
  misc_feature (1)..( 3000): 2750-1469P.txt file - cDNA_ID_1822624; gDNA_ID_2926204; Annot_ID_141623

SEQ ID NO: 19600 - DNA, 3000 bp, Unknown; identical to SEQ ID NO: 3966
  misc_feature (1)..( 3000): 2750-1469P.txt file - cDNA_ID_1822624; gDNA_ID_2926204; Annot_ID_202033

SEQ ID NO: 19601 - DNA, 3003 bp, Unknown
  misc_feature (1)..( 3003): 2750-1469P.txt file - cDNA_ID_1822628; gDNA_ID_1620677; Annot_ID_48279
ttttcaatgcagcaatcacaatcttcaggtgtaattttatattttggacaggccatagtgtttatccattaaggctcaatataattataaacctaacgcctcacattatcattcttttaatttaatcggtagttaaccgatcataatatagattaattacttttatatcttctgttagtccaattgtaattacaaaacctactctttaagttcttaaaaatttagttccggatggcaactactagttcatgttctaatcaacaagcattagtccattatcaacagtttctttgttaatattttcaatgcaacaattgtatggttgttacaaattttaataaggttatgataaactaatagaggaaccaaaaaattaaaaatcttacgtaatttactttaaatccaagggagatgactttaacttatacaaccaataatccccttagtgattataagcctaccacaatggattctatgcttagatgcagaatacaattaagctcctcactgcagctcctcctgcagggcataacccgtcctatcaaccttaccccttagtgtatctttctaagatctcagagttcttattgaatagatgctcagggaccagctcggtgagtctgaaaggtgattctaaaattagaggagaaagagtttgcccatgggttgatctctccagccaatatggctatccctaagatcacataataactctttgcttcttcattctacttgcaaagcttcactatccaaagaatccacttgtttactctctcttttcctcgtcacctgtcaaaccagaaggaattatctgtttagaaactagaacaaaagaaggcagaaaactttgtaaagagagtcataccgacttgttagggaaattttgagcattagtgaactttgaaggagcagaataatgagacttcttttgtagaatctcagagagacgccgctcgtttttctcttgcctaagtagatatctcaaggaaactgattcttgctcaagctttgacaccgtgatttccaatattgctaagctatccaaaagctcctgtgcctgaaaaaaatctctataaagttattaaagaaactcaatagcaaaaacaacaaataagatttttatatgtcggagaaagaggattgagtaccttatcaggaagttcacaaggcgaatccataaacggtgaactagaatgctcaactgcgctagttagagctaaccgtaagttaatctcctcttgtaactgctgctgcaatctcttaatctgtatcatcatcccaaatatcattaaccattaccattagcagtagtagtacaaacttttcagtggtttcttaaatgtgacttagttctataaataagtacgacaaagagaagcaagtgagggatctgagtgacttacatcttgttcaagctcacatttgtaccatagtttggtctttccatcaaatctaccactagtttgatcaatcatcttgctttcctgcttccaaaaaaaaaacaaaaatgcaatttcaaaacctttggcgtgaccataaccccctcaaaaccctagatttactaaatacattccaagaaatcagataagaataaaaggcagagatatatgagagagagaaagaggtacattacatcgagatcaggaaaaaacaaagagccatcaccagaagagtaagatcttctcgagaatgtaccagtcttcttcagatatctccggatcgagcttcccctgtatcagaaaacatcagcaaaccaaaaaaacaaaacaaatcgggagcatagagagaaggaagaagaagtatagatttagagagagtatatataccaattgatgggaagacgaaaagtggcatttccgaaggtgcgatcggtgctaggagaagaagaagaggaagcaaggttttgatcttcatgaagagcttcggctttgatacagagcatcgtttgtcacggagcagagaagaagaagaaagactctgaagaaagaaaggttccaactttgaggtttttttattattgtattgaagacagaagagtttggttgggttctctcactgctcacacttcactctctttcctttttttggtctgtcgcttttatgattttgtaacataaaattataagtagaaaaaagctgaaaagggaaacgaaggaatttattcgtgtctcacacaatttgactaggtgctcctcattttcataatttcattttacacacttttttttttggtcaaacatttacattgtctctatattttctagtagtatattatttaatagaaaaagagaagaaatttcggtttcatattattgcttttcatttcattatattccatttcggtatttatttttccataaattacgaaaaatgcttcatgtgtttttgaggactcaatgtatcatgtgtagggtaaatgatgacgcagataaacaaacagtggaatatctaactttaacatgttctttttctgaatcggactcaaaagaaagacctgattgcaacatatgagtcacacactcacatagagaaaaagattccaatcgtatcaaagagtgaaccgtattatggtttagtcaatttgacacaaaaccggatcaacccaatcgaaccagcctcaatgacaattttgggaccgacttttaaagacgtgtgtctctttattgtcgccgttcaattggtaagaggccacggcgtaatcgtaggacgacgacgaaacatatttttctttagtgtttattttatttttgtgttgggtttcagtttcaaagagtcccaccaatgaccaaaaagtgctccaatgcatgattattacgttggagcctcttcgatagagagatttttgctttctcaatttattattttttgtgtctctctctcgcccgatttggagtttttagggtttgatttttgtaatgtgagaaaggtttcgttatgttaaagaggcactctatcgccattctctccagaatcgcaagcttcgattcccataaaacccttatg

SEQ ID NO: 19602 - DNA, 3003 bp, Unknown; identical to SEQ ID NO: 19601
  misc_feature (1)..( 3003): 2750-1469P.txt file - cDNA_ID_1822628; gDNA_ID_2926204; Annot_ID_141622

SEQ ID NO: 19603 - DNA, 3000 bp, Unknown; identical to SEQ ID NO: 3963
  misc_feature (1)..( 3000): 2750-1469P.txt file - cDNA_ID_1822633; gDNA_ID_1620677; Annot_ID_48274

SEQ ID NO: 19604 - DNA, 3000 bp, Unknown; identical to SEQ ID NO: 3963
  misc_feature (1)..( 3000): 2750-1469P.txt file - cDNA_ID_1822633; gDNA_ID_2926203; Annot_ID_141617

SEQ ID NO: 19605 - DNA, 3000 bp, Unknown; identical to SEQ ID NO: 3997
  misc_feature (1)..( 3000): 2750-1469P.txt file - cDNA_ID_1822644; gDNA_ID_1620678; Annot_ID_48303

SEQ ID NO: 19606 - DNA, 3000 bp, Unknown; identical to SEQ ID NO: 3997
  misc_feature (1)..( 3000): 2750-1469P.txt file - cDNA_ID_1822644; gDNA_ID_1620678; Annot_ID_164321

SEQ ID NO: 19607 - DNA, 3000 bp, Unknown; identical to SEQ ID NO: 3997
  misc_feature (1)..( 3000): 2750-1469P.txt file - cDNA_ID_1822644; gDNA_ID_2926213; Annot_ID_142089

SEQ ID NO: 19608 - DNA, 3000 bp, Unknown; identical to SEQ ID NO: 3997
  misc_feature (1)..( 3000): 2750-1469P.txt file - cDNA_ID_1822644; gDNA_ID_2926213; Annot_ID_202773

SEQ ID NO: 19609 - DNA, 3003 bp, Unknown
  misc_feature (1)..( 3003): 2750-1469P.txt file - cDNA_ID_1822648; gDNA_ID_1620678; Annot_ID_48302
agaagttttatataaagtgaattataaaatggaagtttaatcatagtattgactagtaagaagcaatacaatatttaccattttgttttgtatcactaattttttaaagctatttacttaccaatctataactaatttcataaacaacaaatcgaataaaatctgagcaggcgcgtcaataaaatttgaaagttattagtgataaatgataatatagaaaacaatatcttttgcaccgcatccctataataacatcaaacaaatccataatttcataagcaaacaaacctaacaaaatatgacttaactccatcctaattcaaaaccctaaattttcattttactttgtttaaaacttggctaatttttgttcacaaacaaacaaatttcaaaaccatcacaatatgtatgttttatggtttggattacccatccataaatgcaaactcaatgctaattcctagtatcacatgttaattactcttcacacagtatagcacaagcactcttgcaaagttgcaataattcactatggaccatcaattacgaacatcactattacatcaagcaataatgagctctgagcaaagctgtggacaaaagacagagacttttcgttaaacaagataagaacaacaaagatcaagatactcaagataaacgaatcagaaccaaacgacaacgaaataatgttctcaatagactagacagacatatcacatcagatattttttttcaacttttcttacatcgtttaataattaactaattaaatctcttacaatcacatagcaatgtcattacgaatgtgacggaggatgacaggaataacagaatctggtgagctaagctgaggaagatgaccatcagaaggaataacctcgacgacggattcacagccaagattggcgtgaagatactcggagacaacgactggtacagctaagtccttaacactttggagaatgtgacacggaacagtgacaaaaggtaagatctgtctcatgtcactttggaaaatggtctggccgacggagagagctatgtcgggacgcatattgaagagtgttctgctgaattcttgaacggcgatggagtccatgtcgccaccgacggcgagtggagcgaaacctaagcaccacgctttgtagttgcttcggatggcttcgaatagttggtttaagtcttcttgttcgaatccaccttggtaatcaacatcgtttacgtatctataaacgtaccaaaacaatataatttgattatatatgtttcttttgtcagaagaaaattaaaatatataatatactgtgtgagcaccgtttcaacaattttttttaaaaaaagtgtaagtaacacctcagtaaaaccaaataaaaaaaaacaaataaacaaatgggtatttcatgattttttgttcataatttacggatttttattgaaatatataatgaaatgcttcactgattttgagaaataggataattcagacaagaggataaacaaagaggcactttgtcgaaattatgtcagaatgagaaataaatatttcgaaataatagataattgtgtaaatttaaggacttaagatgatttttttttatttaaattgtaatgtttaatagtttttatgaaatcagacaagagaaggaacagagaagcccttttgtctaaactatgtcaggatgagataaaaagcaaaacatatttctatgtacaacttgtgaaaaagttatacctcggagaagcagagatcatgacgattttggagaagagatcaggacggttaagagaagccaagacaccaatcatggcagaaacagagtggccaacaaagatacaagactcaatcttgagatcttccaagattgcaatcaaatcgaaagagtagccttcgagatttgagtaacgatcgaagtcgaaatagtcagggttggtcgtaccggctcccatgttgtcgtagaggacgacgcggtaatcgtcgaccagatgtggaaccaagtgtttccatactgactggtccgtgccgaacccgtgacctaacacgatcgtggcttctcctgaaccaatcaccttcacgttgtgagcttcttctaccacacccatctctctaaagaagattcttctctggttttcttcttggtacctctcttagtcagttcgtggagaaattatgatatttgtgttgttttagagtgttacgtattattctttataaaaaaattcgtatctgtggaagaggaaataaattatttaaaatatcgcgatttacaggtggcaaaaaaaggtgaatggaaccatgtttgttggattgtcaaacatcgctattcgtgataatttgttttttggaatcaagcccaaaatattttggaacatttaatggagtacatgacgtggagttactgacttctgttcaacaataaaattgttacattgggttacaaatacatgaaccaattatttttaattttgtgcatgaatttcaacaatgcattaatgcgaaagaaaattagtttcaatcattcaaagagtggcagcaaatagtcaaaagctgatataattattattttaacaacactagttaaatttcgcatgtatacaacttgcaatgaatatagcatctaaaaacctcataatatttgtttttttctgcttgactttaacttgtcagtacttttcgatcatttagaagttagaagacattaattattcatggaatgccatggtgagtatacgaccacgtattcacatccacttcctcatcattttaagagtcaaaaatatctgtgagaggatcctggcccattaaaattcaaggcccatttagtgtaatatggcttcatgttctctctttcctaagaccgtttttactgttgaccaataaagtctgaactcgtgatgacgtggcgtgaaatcgagagacccacgtgtcatcggcgtgccgttatcctctttccacttccggtctccgttcccacctgagtaaaccatactggtcgtgaaatg

SEQ ID NO: 19610 - DNA, 3003 bp, Unknown; identical to SEQ ID NO: 19609
  misc_feature (1)..( 3003): 2750-1469P.txt file - cDNA_ID_1822648; gDNA_ID_2926213; Annot_ID_142088

SEQ ID NO: 19611 - DNA, 3000 bp, Unknown; identical to SEQ ID NO: 3994
  misc_feature (1)..( 3000): 2750-1469P.txt file - cDNA_ID_1822652; gDNA_ID_1620678; Annot_ID_48300

SEQ ID NO: 19612 - DNA, 3000 bp, Unknown; identical to SEQ ID NO: 3994
  misc_feature (1)..( 3000): 2750-1469P.txt file - cDNA_ID_1822652; gDNA_ID_2926213; Annot_ID_142086

SEQ ID NO: 19613 - DNA, 3003 bp, Unknown
  misc_feature (1)..( 3003): 2750-1469P.txt file - cDNA_ID_1822659; gDNA_ID_1620678; Annot_ID_48298
gccggattaggtcagaggattgtgacattggcgcttggatcgttgattcaatgctttgaatgggagaatgtgaaaggggaagagatggatatgtctgagagtactgggttgggtatgcgtaagatggatcctttacgggccatgtgtaggcctaggcccattatgtcaaagcttttactctaataagatgagtagaggttaaaaaagaaaaaataacttattggatgtaactggtaattatctttaagataaagatgaataaaatgaatctttgcctcataaataacaaataaataatagataatttagattctttttattgttaactaaattatctccataaaatactttttatatatatataatttattccagtaaaattgagtttaggatgttattttactaagatgcagttttcttatacaaacgatttcaaagcttattttccgatataaaaattaattttgcttaaatcctcaagaatttttttattccactgacgaaatttccaggcttcaaatctcgctgaaatgaaaaataaagttagcaataagcaaataatcagtttaaaatacgtatcagaataataaaataacatgattttaaactaactagcattttctataagatactaaaaatgttagcaattgcgttttaacgaatggataaattttcattttaactagttacatttaagtttactctaactagttacataagatttagacttttttacaataattaataatcggaatcatgtcaaaactgaaaattttgtatgtgaattgtgaatgatacgtgactaaaatgctcgttgttgttctttaactgtgactttcataaataatcattgttatctatataaatttaccttccgagattgaactatatccaacgtcttctggaaatcttcctctcgacgtttaagttcagctagtgattcccactgatctggtatttccaggaaacgccttaaaaaagaaaattagagaaaccaatattaacgatttatccaaaaatacattatccatgtctattagaaatatttaataagcatatctataaaataagatatttactccaattgtttttccacttcggccagtcgtgcattgacttcttcgatctcatcttcgatctcctattttaagaaaaaaaaaagcatgcataagtactttaacttttttttgtttatatacctatatattgccaaatcatgagatttttattttattttaatcaacatgcctttggttgaattagataacgaagcccatcgtcaagactctcgtcactgcacttggtttctgaacgcatctgcatgaccaaccgttgtatattctagattctccataccaatcaagaaaaacaaaaaatttaggtaacgttaaacaaaatcactatacgaaaatcgagatgaattaaccgttagatagttttgatttttttaccggttcatgagggaggctgtgttcgatcagatggaccaaccgagtacaatatcaggagttcatgcatatgtataaaataagaatattagaactcatacaataaaattaaacaaacctattactttatgttcttatatataaatgcatgcattaacacaatgaatttaccgtgtgcgtacagcccgagcaagaaacttgcatataatctcttcgggtctataatcatgaacaataacgatgatttgatatcagatgatagtaataatatatatgatgaaataataaaatattggagctacaagaagaagaagaaaatgaaaacgtaatttattaatataatatacctctctttggcataaaagacgaagagtttaccagaaggagagaaaagaatgagagcaactggtacattacatagaacaaagagttcataagctttctttaaaagcccattttttcttttggcgaatgcaatatttctttgttgcctatcatttattcttttaatctgtatttttactctccccattttttcttgtcttcttttcacaatgttttctctttctcaattagctttcaaaatattttttataagtttatttatatagttatgagaaagaactttctatggctaaacttgtagattttccattaaattgtatcaaaattactaattactttaaattaaataaatttattaattaacatagaaccataatcttgtttgtcaatcaaaagatttagttttcttagttaatcttttcttctccagatatataaatgggtattatctattgcacatatattttataaattgaagtaaataattaatatatttataatataaagtaaatgttatattcattagattatgaatttggataagaaatctcatttattatggctcagtggcccatttcatcccatatatgaattgtgttatcaaaatttatgtcctggatgaattttttttaccaaatactatatgtaatgaaatgttttgaccaaatatatgtaatgaaaaaaataaaaaaaattgggtcaaaagggaaagaaatccttctctagaggataatggaccccacttgtgtaagataaaacagtctctctctctcccccacaagaaaaagcctcgaccacctaacgataatggtggctatgagatctccgtcttttctccgtcgtgtttctcaccgccgattataaaatacttatctactaccatctccttgtcggaaacggcgagctaagtcgattaggtatttattccttttatctcttttatctgttaaagctttcttagggtttttgtttttgttgttttgcatttgaaattgtgatctcatcgactatcaagcttcgaactttacattagggttttgtgtaaattcgtgttcttcttcactttctctttccaattcgacgcatatggatacgtgatgaaagttttcgaaaatttgttcaatttcaagtttagttctttatgactctactgattccggatttttctagggttttaattgagaagaaataaaaaggatattttggtatg

SEQ ID NO: 19614 - DNA, 3003 bp, Unknown; identical to SEQ ID NO: 19613
  misc_feature (1)..( 3003): 2750-1469P.txt file - cDNA_ID_1822659; gDNA_ID_2926213; Annot_ID_142084

SEQ ID NO: 19615 - DNA, 3003 bp, Unknown; identical to SEQ ID NO: 19613
  misc_feature (1)..( 3003): 2750-1469P.txt file - cDNA_ID_1822659; gDNA_ID_2926213; Annot_ID_202767

SEQ ID NO: 19616 - DNA, 3003 bp, Unknown
  misc_feature (1)..( 3003): 2750-1469P.txt file - cDNA_ID_1822669; gDNA_ID_1620678; Annot_ID_48293
cgaaattattggcggaatggttgttgccaagaagggtcccaagtctatattatccaaagatatcttcacaaatatcgtcagcaacgaaaaaccataaaataaatagtaacgacgccatgccttctttggatctaatctatatatctctctctttaacatagaataatcgtgttcttttttctttttttcttttttgatagaagttgaattggtcaaattttagtttgtacaaaactaaattcgcttactagatgtttttttttatgatcaaggaaatctcaggcaaaaaaagtaaaccaatcattaacatatgtaaaaaaaactgtaataatatgttgaaaaatagtcacacattgaaaagactaatcatttttatttttatcctctgtttgatttttgttctataaaatctaccaaaactatcgccaaaagtaatctaatgatcatgacattatcactcattcaactatggcgtccagtaaatgggctagattgaattaaatgtgcgagttataaattttgattgtcaaatttggattttaaaatggtcgtggaatattatcatttatcagtactattgcctacctaattcaagggtcaacttgagtactgtataatattgactttaattatatatggacaattgacaacaaattaacgtaaaaaggaccatataaaacaccctatgttttactgtctatatgaacatctatttcaaatttgttttgaaatttacataatatgttacatactaattaattgaatggtaattttgtacaggggacaataaatatcttttagtgaataagaatcagccttccaaaaatatattgataataattattattatagtagtcagcagccttcgaatatatctactattcatataagaaaaagctaatgccgttaaaacaaaatcctactaatatatgagatagttgaagtgactattctaatgaacaatttgctccagaagaaaatttgttcccgaaatgtctaatcaaagataatgcattatccgtgcgattagcctcttcctaaaatagcgaccaacgtctttttatttcgttaagttatttataattattggtccctttggctttttaatcttattgttaatattagtactatttaatcaaggcccacatgtcgagcgacccaacgccatgaccgaatttatattctatcaaatatgcatatatcatattgtttataaatggtcttggtgttgaaacataaatgtatatacagttgatgcattcgtttaaaaaaattccagagtcctattgtggtaaagaaatagactatatataatatagtgaaaactagtgttgtatgtctataacttcaaattagtctatttcagttttgacaaatcgttatccaataaacaaaatttagtaatcataccaaaaatgtagaaacctaattcaatctgcactgcggcataccatttaaaccccgaatgattaaactttattcattggtgattttttttttcttagtttgaaaatatggtttacctaaacaacggaaaacaaagaagaataaagttttgatgaattattgcaaacacaactacacaaggaacaacaagtaggagattaaagtctcgaaaccatattaaaaggagattggtgacataagtgctctgtaattaccgttgtttgtaaaaagaacgaattttcaggaaaaaaataaaatgaattaaatggagcaagttggggagggtacagcacgagcgacgatcatgaagccaattaccaaatgaaattgtgatttagggtgctgatattcataaacttgggttaagtcgttgtttaaaattgtgttttggctgttagcgatgaattatagtaaaacaagaaagagttctagtaaaaaacaaaaattgcttagtactaataaatttcacaagaccattcacactatacaacaataatccttcgttgccagcagtctaatgggactgtgttataggttaatctctctttcacggactattaatttttggctcaacctcaatgtaatttatttaaattatatttcaacgcatacacgtgaatttatacatcttttcataggatttgcaattccggattctcatccgtcctaggaggttgtatatgtatattattggtaactacagcattaaacaactttaacactaagtacgatgatattatatgtacatgtacgtatgctatagattgatataagaaaaaagtaaagagagagcggatgattgttgattgaactaattaacaatagtgtattaggtaggcttgtatccgacagtcaacttaaacttcatagttgaaaccaataaaaccagaagaaaaaaaatttatatactaatcataatcagcatgatgttagacgatttgatatctaactttcttcgttatgatagagaaataatattcgcaataaatcacatataaaaaaaattactttacgtcatagattatcaacttgcctccaaacacaacaacatgatcccctacgctacaatacataatatgaaaaataaattaatcgttgattaacttaaagtcactccgttaataacgttataagcaaagcttattagtttttttgaccgtcattatcgacgaccaaacaaagaaagagtcccaacaaattatgccacgtaagtccagaacgacgcctatgaaaccaataagacaaaaattcaaaaaccaaaacatccgtgaaaactcttacgtggcggtgacatgtgggtcccttatgtctccattaactaacataagcttattgtcgactgtaccttttgtcccccgtctcggctacaaccctgtgacaaacaaagatcaagtcaaaatatctaacctaaagtactctcgtccacgtggacattgctgacgtggaacttctcccttctataaatacaggcttctcttcgccgaattatactcatcaaacgagtaaaacatttgctaatattaaacactttttcttttagaaaaaaaaacaaatatg

SEQ ID NO: 19617 - DNA, 3003 bp, Unknown; identical to SEQ ID NO: 19616
  misc_feature (1)..( 3003): 2750-1469P.txt file - cDNA_ID_1822669; gDNA_ID_1620678; Annot_ID_164309

SEQ ID NO: 19618 - DNA, 3003 bp, Unknown; identical to SEQ ID NO: 19616
  misc_feature (1)..( 3003): 2750-1469P.txt file - cDNA_ID_1822669; gDNA_ID_2926213; Annot_ID_142079

SEQ ID NO: 19619 - DNA, 3003 bp, Unknown; identical to SEQ ID NO: 19616
  misc_feature (1)..( 3003): 2750-1469P.txt file - cDNA_ID_1822669; gDNA_ID_2926213; Annot_ID_202761

SEQ ID NO: 19620 - DNA, 3003 bp, Unknown
  misc_feature (1)..( 3003): 2750-1469P.txt file - cDNA_ID_1822685; gDNA_ID_1620679; Annot_ID_48323
tcaaactgattctctcaccctatttatatgttcaagattttaggtttttttaaagtattatatatatttatttatcgtagggttgttaccatattttcgctggtttcttcgcggataccgccggcaccggaagcatagttgagtccgatgttagcttgtgcctgtgatgctccggcaaatggtggaattgggttattgaaacccgctagttcagctaaaagtaaaaatagttcaactttgttaaatatatgaactattaaataaataataatgagacaagacgcttgaattaatattaatctgataactttgaattttcttttaaaatatatttttattagtattgttgaactccacaacaatgaattttcattccaaatataattatactcttttaataccaaagtatatgtttgttttggatcggattcaagtatactaaaatatatgattaatgtaattaagtttgactgaaattttaggaattcttctcaaagttttggaaatgtttagaattttaagattttggtggtgattttagaaagaaaatataaaatgctgtattttctaaccttgaatacttttttgaaaaaaaaaaaaagaagttcatccatatccaagtgatgttagaaaagaaaatttaaaatgctgtattttctaaagttaaccttcacttctttttttgaaaaaaataaattcatgcatatacagtttaaacattatggacaactgtctttataatttttttctgtaagaacccgatcatggtcggctatatgacaatcgaataacgtaagaaaaaatggattcagctaattaaatcaagaaaaccggattgaaaacttaccgataacgtctggaatattccgaccgttgctaaaccgaccggttggaccttgaaagtaatctataccataaggtaaatagttgaccttggccttggtgttcaaggcattgttgttaccgttgtcgaagacagagtctccaaacacgaagtaacacggcgtttgctgtccatgcaccgctggtgccaccgccgcgactgcaaacacggtggccaaaataatccacaatgccttggactctccctcgaccatttttcgcaaatcgaattatacgaaaaatgaggagagaagaaaaagcttgatgagagaagaagaaaagtgggcttattgtattatatggactagatttgtaagtctgatggttagaggggattttgcttagacaagtagaaaattatgcgactatatataggatgaggcagtgagtgaatcaagggagacttggagaactatataaattgttttgcatgaattaagaggtttttcttttaatattatttatttgaggtggacgtgttggtaatattattattttttgttaagctgaagaattgtcatgtaatttacttatgtttactaaaatatatgttacaaaatacacataggttgtttttttccaaagcatacaaataggtagagaaagctttatatatatatatatatatatatatatatatatatatatatatattatttaaggtggacgtgttggtaatatatatgacggctgtaaaattttatttgtaagaaaaatatgaaaaaggtataattaataaaccatagacaaaatctttcaaaaccaaacaagtgcataacgatcccatgcaaaaagtttggttaagaattaggatatgccagattccaccaaatgcaaatgaaacctaaccatacatgctttcaatgacatcttcaaaatgatccacaaatagtttatcgttctctgcatccactaataatttttccttcactcccaataagatattgtagtgaaattactaacttgaaaatatacttgggctaaaattcaagtttgtaaatgtatcacatattttcttaacaatatgaaatcatcaaaattaaatataatatatcaaaattcgttatagtttatctctcaacatcgtaattgtagtgtatatagatgtttattttgcaacaaagttatacaagtttaccgttgaacaaagatatgtatatacattgtggccgtgtaagatttaaaagaaaaacaaaaagaagttagttaattggttaattagaaaaagggctacaaatgccgtattgagaaggttataccgtatactcaacatatgtttaattatttgactatatacaaattaaatttgaaatccgtgtctaatacggatcaataagtcaatgtctttcattattcggtaaaataataaaaacagatttgttttgaacgagttggccactttctagtaaccataatacgatatgccttttttttgggtcaacttgtaactataaactttgatagacgacttttcatattgtcttattgatgatgtaactagttctttatatttagagatggaccagatgatattacataataggtaatgtagaaacatgtattatcgaaaatatattatatgtaagtccccaaaacaatgataatatgatataataactaaccattatccaattttaacactcaaccatttataatttgttgaccaatgataacacacaagaccttttattgaggtaactgtaataatttcattttttgggggtcaaatgttataagtctaacaagagtgtttcttacaaaaagtctttacagtgttaattatccaaacaccatactaaataaactcaagttgatcacatttttaacatgttaacatctttgtagatatgaaataagagttgacttttgaaaagagtttatcaataacaatgttacttctgaactttcatcacttgtaatggcccaatgggcttttttcaatgaatccattaatagacaaaaaccaaaaaaaaaaaaaaaaagtcgccgtcgatttgtttatcaccgactcaaccaccggtagggtttaaggtttctcatacactctccttctattgccgccgtaataatcaaatcaatcttcttcttctcctctaacccaattttggaacttgaaagatg

SEQ ID NO: 19621 - DNA, 3003 bp, Unknown; identical to SEQ ID NO: 19620
  misc_feature (1)..( 3003): 2750-1469P.txt file - cDNA_ID_1822685; gDNA_ID_2926197; Annot_ID_141329

SEQ ID NO: 19622 - DNA, 3003 bp, Unknown
  misc_feature (1)..( 3003): 2750-1469P.txt file - cDNA_ID_1822689; gDNA_ID_1620679; Annot_ID_48321
ctcatccacatcacagcttccatccaccacaactccatcgatcggtatactttctccagctttaactgaaacaacggtgttgatcccaacctcatcaacatcaacttctagtccagtatccgcgatcactgccttccgtggcgctaagctcatcagtgatgacattactatgcttgcctgaaaacaattgttacttcagaacaatgatcaactgatagaattaatgaaaaccagaactgattttcacatttttgtatgactatgactgtttaaaatcatcaagaaacagaaaccctagattaagtaaccttatgagcagcactagactcaagccaatctgcaactgagaataaaaacacaattgtagcagcttctgtgaaatcctgcatacatagcgttgctatcactgttgaacaaaattaaccaaatcagattcatttacctcatcaaacaaaacataagctgatgctcagggaaaaggatttgtgttttaccagcaattagagtgagagcgttgatgtcaagcctgaaccttgtgactgaagcaacagctttagcaagaatggggaaaactccagccaccacggcaacaatagcgagccattcaagcggactataaaagtatttgaagaaggagagaactagcagtacaccagaaactattgcgaaagggcttggccattgactcttcaagcttgtttctccgtatggtctaacacttgcttctagtcttgcttgattcagagccttgactgtcaagaaatcaattttacacacaacaacaaaaaaaaagggtttaattgactttaagaaaacgtaaacctttgcctcatcaatagaccaatgattcaagacgaaagtcaaaacgtcgattgaaaaataacagtttctgttacttaccgatttgaagtggagaaatcaaaaaagtatcgtggacaacgatgacggttctagaaggaacgatgactgagaattctttaacgccgtccacttgacggagaacgttacctacgatagaaacctccgatgaacagcagattccaacgacgtcgaagtaacttgtctgtaaattcatcttctttgactcttcaccttccgccatcgttgagcttgagatctcggactaaatttcgaggagatacttttacgggatgatgtcggagggaaattaattatttggtttaggcttacattattatttataacatttgaaattttcagtctctataaggaatgttatattaattgctccacgattttttactatttccaaatgtcaatgctgagattggatacgcatttaaattttattttattaaccatgtaatttttgaaagatttacatttatttaatagaaataaatattaataaacaacaattaattagtcaattatagtagattcgattttattattgaaaaaaaacacttcaaaacctatatagttttccagatgttaaagaaaaaacctatatagttgatatattaaaatcttttttagcaaataatatttgagcagatagaatctaacaaattcttctaaatcaaattcagattttgttattaaagaaagagaaaagagcctattgggccataacatgggttcatacaattctcaatcagataacttccgaggccttataatgacttgtaatataaatggcaatttcgtgattaagtgagtatgaaagggtagacatgacaaaacctaactacagtaccgaggtagccaataatttatcttggctggggccatactctgaccgcagtttccattaatttacagaaatacccacgcttgggatatatatgtatatgtaaccataagtgtaacattttattagttttcagtcgttttccaaatttatgaatccatttacatgagacaaaccaaatccttgttggtaggtccatcctttacactattagaactgaatcatttttatttttctttcacaagaatagaatatttgtcgtaagcaaagaaacaaaagtaaggttaaaaattagtaaaacaacaaagggttgcatgtaacacaaggtttagaaggaataaaataaacaaaagttatgttagtaacgtctttagttaaaaaaaaagtttcatagatgaataaaacaaacaaaattgcatgtcccacgcagctataaaataagaaaaaaaaaaattgcatgtcctaacgccacctaataataaataaagtgaaataataagacaaaccaaaacaccattgactcattgagactgatgtcaaaaaatgagaaaaaaccaatcacattgagagttgagattttaaccaatgcaaggacaatggcaaaaccgaaaataaacgtaaaaatcgaggttgataataacataactcataaaatccgtattttcatggtgtcttcttcttcttcttcaccttcttcactcatcactactcacaaatatatttttgaccgttgttcactctcaccttcttcacacgctccacatcttcttctgattgacctttaacacctgaaaggttttgtcttctctctctatcgtccaaaaatctaaacttttctggttttattttatagatttgggtccctcagtttgtttattttacctttatttatgaacaaatgtgcaaagggtttagattttagctccttgaaggctcataacgcataaagttcttggcttcatcgttttctctcttgattaatttggcattgtatatcttatgtctgattgtgtgaaaaaaccacaaatgaaaggagtttagacacaaatcacagtttaagacaaaattatagtcttgtttctttcaaattatgcaaaaaaatcaagaatctgagacataagagaaacgtttatgtctctctcttttaatcaatgctatgttgcttttctcaactgtttcaagcgttattacattactagctaaaaatcttgatgtcttgttcttatttttgcagtttctcctcttgagctttggaattgaagctaagataagaaatttagagagaaatg

SEQ ID NO: 19623 - DNA, 2033 bp, Unknown; identical to SEQ ID NO: 8410
  misc_feature (1)..( 2033): 2750-1469P.txt file - cDNA_ID_1822689; gDNA_ID_1971791; Annot_ID_175552

SEQ ID NO: 19624 - DNA, 3003 bp, Unknown; identical to SEQ ID NO: 19622
  misc_feature (1)..( 3003): 2750-1469P.txt file - cDNA_ID_1822689; gDNA_ID_1620679; Annot_ID_164369

SEQ ID NO: 19625 - DNA, 3003 bp, Unknown; identical to SEQ ID NO: 19622
  misc_feature (1)..( 3003): 2750-1469P.txt file - cDNA_ID_1822689; gDNA_ID_2926197; Annot_ID_141327

SEQ ID NO: 19626 - DNA, 3003 bp, Unknown; identical to SEQ ID NO: 19622
  misc_feature (1)..( 3003): 2750-1469P.txt file - cDNA_ID_1822689; gDNA_ID_2926197; Annot_ID_201543

SEQ ID NO: 19627 - DNA, 3000 bp, Unknown; identical to SEQ ID NO: 4018
  misc_feature (1)..( 3000): 2750-1469P.txt file - cDNA_ID_1822697; gDNA_ID_1620679; Annot_ID_48319

SEQ ID NO: 19628 - DNA, 3000 bp, Unknown; identical to SEQ ID NO: 4018
  misc_feature (1)..( 3000): 2750-1469P.txt file - cDNA_ID_1822697; gDNA_ID_1620679; Annot_ID_164365

SEQ ID NO: 19629 - DNA, 3000 bp, Unknown; identical to SEQ ID NO: 4018
  misc_feature (1)..( 3000): 2750-1469P.txt file - cDNA_ID_1822697; gDNA_ID_2926197; Annot_ID_141325

SEQ ID NO: 19630 - DNA, 3000 bp, Unknown; identical to SEQ ID NO: 4018
  misc_feature (1)..( 3000): 2750-1469P.txt file - cDNA_ID_1822697; gDNA_ID_2926197; Annot_ID_201540

SEQ ID NO: 19631 - DNA, 3003 bp, Unknown
  misc_feature (1)..( 3003): 2750-1469P.txt file - cDNA_ID_1822701; gDNA_ID_1620679; Annot_ID_48318
ttacactcatttctacagaattttccaaagcaatgcaggtatgcaacaaatatcaaaagacctcttctcatattcgctacagttcttcataaacaaaactgaagaaatacccagaaaacaaaattcagctaatcgtagagaaagttcaaaaaggctaaacctttacattgacattaacgctctaaatttgcagacttttgaaagaaaacctgggaagctaggcccaaatcgaaaagggtaagagtgttatgaaccgtacgaagagcagagacggtggatttgagttcgttaagcaaatggttttgatctccattgcagccattgttctctgaggaagaagaagaagcttctccatttccagtgaatgaagcaatttggagcgttacgagaaaaagaaacaaaagtagcttaaaaaacgccattattggagactgcaacagaggactttgcacagtacgagagaaagagagagagagcgcgagtcgcgagagagagacagagactaacgcgtaccaagtcaaataaagggtcttactatcttttctataattacatatttgtctctttacttttgataaattctataaacggcccaaataagtttgtatagattttgatgaaaaggtgtcaattgaaaaatatcttatgcaaaacgcctaatttaggcgtatccgaaaagtcctaattagccttaatctgactcttaaaatcttaatgcaactaaaacggaaggatataaacttataatgttaaaatatatgttttaatggtccattgtgtagtatttttccttttacttcacacgtttttgttaagaatttccttcttctttttgccatatatagttgcttgtaaaaaaacaaatcttgactttttcttaaactaattattttgctgtaaatatagatttttaataaataaatgatatttaaaataattgttttcaggcaaaactattatcaatgttagatttatcttattctttttaatcaacgtggctctctgtagttaatcaataattcactgtgtaattgtcaaactgtaaatagaccatttcaatataactaagaaagaaaactttatattttcattagtttccatgtatctcaactcatttagagaaaataatatttacatatttcttactataaaataccaaaatatatctttatattttaatttaaatatatcattttaatgaattttatcttataaattttaacaaatttttcaattgctgtaaagaaagatgacctttaattaactactcactagatagtagaggcggtaaaaaaaccgtaaacgtatatttaatttgttttagtaaaatttaattataaactgtttactaaaatgcaaagtaatcaataatataaacttttcctattttatgttattgtgtcacaatgtttatagctttaaatacgatttattgtactattatatttttaatatatggtaacttaccatattctctcattatactttattgtaccgctatctattatcgtatactcttatttttaaatccgtaagaaaatttgatcgacttagtatcaatttttttataataaaaaagctaaaatcatgtaacttctaatgttcatcaccaataaggcacatagtcttgctaaatacactattttagatttataccatctacattatatgtttctactgcaattctacggcttcaacaaccccattttcatcacttcttattaaaaccacaataatttacgcacgatttgattaaaaagctttaaaaaaaaaagctatatgacattacatgacctatgtagtactaatctattcgacacaaccaataaataatgcattttaattgccccaatccccaactttcttcttcgtgacaagagtagcccacatgattttatgaaagaaaaaaaagtgtagtctaatacaaatttagttacatacgaaatcagtcgaatttaattattgatatataatcatagaaacaaagcttatattctttaacccaatcacaagcatatgacacaggggacctagacagtaatagagtatccaaatcttaaacaattcaccagtcaatattaataatacaataaaactatataataagatagtaataaataagaaataaaaataaataaataaatgaaaaacctagtttttgacgcaataataatagaagcgaaccaaacttggcctcctcttcgcctataaatacgatatagagattagcgtcaaaagagtatgtaaatcgcaaaaacaaccaaacaaggtcttcttcacacactctcatcgtcgtcacttttttttttatataacatagtctcgttctagaccgtcggattatttctattggtcaaatccaacggtcgtgatccaatttgattagaaagagtctcatcgtctctcaaccaccagattctctcgctcgctcgctccctcgtcgtcgtcctctctacgatatcgaccaacataccagatcttcttcgatcccgcctccgtcgccgttgctttcgttattttactcagccgccgtttccaactgtttttaactttttctcgccggagattgagattgggattgagatttctttagggcatttagacgatccgattaattttagagacgaggttttatcgacccccaccgacaccgttagtggtttgttctctcaatctcgatcctttgattgttataataacctaccctccattgatctatcgtctctgattcattggttttgtttgttaattcgtctgattgctatttaaattttacttcttttaaacaattttaggttgcagcgatttaaagatcgttttttttttcgtaattgaatgtgattcgtatttgtttcaatcaaatttgcattacactgtctattgattgtggtttgtgttgggtttaaattatgtctgcagaagctggtgtcgtgagaggggataagtcttttgatttgtgttattgtgggattatacactgtttatgactatacatacgagatg

SEQ ID NO: 19632 - DNA, 3003 bp, Unknown; identical to SEQ ID NO: 19631
  misc_feature (1)..( 3003): 2750-1469P.txt file - cDNA_ID_1822701; gDNA_ID_2926197; Annot_ID_141324

SEQ ID NO: 19633 - DNA, 3003 bp, Unknown; identical to SEQ ID NO: 19631
  misc_feature (1)..( 3003): 2750-1469P.txt file - cDNA_ID_1822701; gDNA_ID_2926197; Annot_ID_201539

SEQ ID NO: 19634 - DNA, 3000 bp, Unknown; identical to SEQ ID NO: 4016
  misc_feature (1)..( 3000): 2750-1469P.txt file - cDNA_ID_1822707; gDNA_ID_1620679; Annot_ID_48316

SEQ ID NO: 19635 - DNA, 3000 bp, Unknown; identical to SEQ ID NO: 4016
  misc_feature (1)..( 3000): 2750-1469P.txt file - cDNA_ID_1822707; gDNA_ID_2926197; Annot_ID_141322

SEQ ID NO: 19636 - DNA, 3000 bp, Unknown; identical to SEQ ID NO: 4015
  misc_feature (1)..( 3000): 2750-1469P.txt file - cDNA_ID_1822713; gDNA_ID_1620679; Annot_ID_48314

SEQ ID NO: 19637 - DNA, 3000 bp, Unknown; identical to SEQ ID NO: 4015
  misc_feature (1)..( 3000): 2750-1469P.txt file - cDNA_ID_1822713; gDNA_ID_2926197; Annot_ID_141320

SEQ ID NO: 19638 - DNA, 3003 bp, Unknown
  misc_feature (1)..( 3003): 2750-1469P.txt file - cDNA_ID_1822728; gDNA_ID_1620679; Annot_ID_48310
aagtaagttgtcacgatttcgcacataaacgaattctgtcccttttggaccgaaagacaaatctaaagttacttttaaaatcatcagcaacaaggttttccataatcagtgggtaaacaaaaataaaacaaagaatatttcctcttgaaaaaagttcttaaaactgtgtataaaaatttggtttttgctagtgccggcgaaaaatccatatatagcaagttcggcttaaattgttactgcatattcagatctgcataaacagataaaactcttcacatgcaaaaaaggggaaagaaaaaaaaaacaattagcgcggtaaatgatgtataaagatcaaataagtgagacgtttatttttggtaggtgtaagaggaatcaaagttttggacaagaagaagcgtcaaatgacacatgatgtgtttcgactaaacgacatatcacctgggaacaatccttcacatgtgcctttcgatgttaactttatacgaccacatacctccaattacattactacatcacaaataacttcgtattctcagttgtcactattaatcttcactacttatgtgataaatctcccgtgttctacgtactatagtttttaaacttaactgaaagtcttactacgaaatatattattacatccattttagcgaaaaaatgttgtttttatatcaagactagcatttcttcacatacgaattacatatatacatttatgtttatgatccattcaatatttttttttgtttgtatgaaaaggtcgaaacaatgttggtgaaagcattaatttcttagtttgaccgacgataaatgatctacctgtgaattgattcgaacagaagaattttggaattggagcctggtaaaatagtttgggtttttacactttcatgagttactagtaatattttttgttggtcacaaatattatactcctcataaatctaaggacaacaatttttctaatcataaatatttaatactgatttttgaatgattcaagctttaaattactttatcctctaaaatattactcaaaattatgaaaactggttattttttatttaattaaaagtctcctaagaatgtagtattttgaatgaagaaaaatttcttatccaaaaaacctaaatttttaaaaaacaccatagtgtttttgaaatccgtaatctaagacacaccatgaattattagaggagtctctagtagggaccgttttatcttaataattactccagaatttgttgatctgtaatccaaaaaagaaacacaatcaagtggtaattaactgtgttcataatgcttttggagggaagccgcgttttatgattgaaagatgaattctaatcaaacatcattactcttagaattctaatgataattctttaggtcccctcaaagattatgaaattaatatttgtttaacttttttagttgtatacttttcttttacctttcatcaattaagtcaactatcttttctctccctccttggacttttcacgtatttatttgtttcttccacctatttttccgtataagttaagtataataactcctattcattaaattattttccatttcttccaaaaccaaaagtttttacctatgatactatcaaattattgatttttttttttttcattttaacattctactactaacgtgaaataaataaattacagagaaatattccccgttcttttgtcatcattatataaactcaatattcaatttcaactagattcactttattatactcttagatttttatactttacataaacctcgtatagtgtggtaaattcccactactaatgctacatgtatgtctatattaagattattaaaaacataaatctttttaaaaagctacatatatgtgtgagagtctccattatcaacggttcattgtctgctactctgattagcattttcttaaaaaaaagtaattagaaaaagaaaacaaacgaattaaaaaaaagaacaaaaaccctaataaatctctaaaaagtccacacacactaacacactctctctccgtctctcactaaaagcttctcacttacatttctgctttcattcattaatctctgtgtttccttcttttgatctttttggcaagatctctatttttcttccaaaaaaggaaaaataaaaagatcataacttcagaatcaaagtttctctttgttcacattgttctatccatctgcacatttgattcatgtagtgactaatctcacagtctcgttctcaaatttactttatctgcttgattcgtttcgtgaatccaagtaagttttacactttttgtttttgctttttggctttattctattcaagtttcaagtttaaaggatcctcttttactaatgtagaagcatttttttttttttgttgttttggtttctgggctttgttatattgcttattccttgcttggatgatttgtgaaagtgggttaattcttctcatctttaaacttttgatgtgtgtttataattttctcaagatttgtttttttttgtctttctctgttccactgattgctcagcaacagttgctactgtagtttctgtatcgtcttcaaacagttgaatttgtttaggtatatttgtctatagagatgttgagtttaccaatctacagtgtgattgaagtttccccaagtttttatctttaagttactttggagtagcctttctttatgtgcttgaatctcttctctgctcatttgattttgagttgtcagacgtataaagtttagtcttttatcactgtgaaagatagcaacactatctcataatttctgagaagagtgtggagattaacttgtgtagtggtttttaatacaattccaattctgtgaagtgattgttgttgttgctcaatatctgttgtttttcagggatgctaatgttatacattggattttgatactgcagatttagtctgaagagaattaagcttggcgcttctttggtgagaagcaagatg

SEQ ID NO: 19639 - DNA, 3003 bp, Unknown; identical to SEQ ID NO: 19638
  misc_feature (1)..( 3003): 2750-1469P.txt file - cDNA_ID_1822728; gDNA_ID_1620679; Annot_ID_164350

SEQ ID NO: 19640 - DNA, 3003 bp, Unknown; identical to SEQ ID NO: 19638
  misc_feature (1)..( 3003): 2750-1469P.txt file - cDNA_ID_1822728; gDNA_ID_2926197; Annot_ID_141316

SEQ ID NO: 19641 - DNA, 3003 bp, Unknown; identical to SEQ ID NO: 19638
  misc_feature (1)..( 3003): 2750-1469P.txt file - cDNA_ID_1822728; gDNA_ID_2926197; Annot_ID_201527

SEQ ID NO: 19642 - DNA, 3000 bp, Unknown; identical to SEQ ID NO: 3792
  misc_feature (1)..( 3000): 2750-1469P.txt file - cDNA_ID_1822736; gDNA_ID_1620679; Annot_ID_48307

SEQ ID NO: 19643 - DNA, 3000 bp, Unknown; identical to SEQ ID NO: 3792
  misc_feature (1)..( 3000): 2750-1469P.txt file - cDNA_ID_1822736; gDNA_ID_1620679; Annot_ID_164346

SEQ ID NO: 19644 - DNA, 3000 bp, Unknown; identical to SEQ ID NO: 3792
  misc_feature (1)..( 3000): 2750-1469P.txt file - cDNA_ID_1822736; gDNA_ID_1620665; Annot_ID_163919

SEQ ID NO: 19645 - DNA, 3000 bp, Unknown; identical to SEQ ID NO: 3792
  misc_feature (1)..( 3000): 2750-1469P.txt file - cDNA_ID_1822736; gDNA_ID_2926197; Annot_ID_141313

SEQ ID NO: 19646 - DNA, 3000 bp, Unknown; identical to SEQ ID NO: 3792
  misc_feature (1)..( 3000): 2750-1469P.txt file - cDNA_ID_1822736; gDNA_ID_2926197; Annot_ID_201524

SEQ ID NO: 19647 - DNA, 3000 bp, Unknown; identical to SEQ ID NO: 4047
  misc_feature (1)..( 3000): 2750-1469P.txt file - cDNA_ID_1822744; gDNA_ID_1620680; Annot_ID_48343

SEQ ID NO: 19648 - DNA, 3003 bp, Unknown
  misc_feature (1)..( 3003): 2750-1469P.txt file - cDNA_ID_1822748; gDNA_ID_1620680; Annot_ID_48342
tcttccttcagagacaaatcaaaactctctctttatacataaactctgtggattccgatcgatgatgatgatccaagtagaagccgacgacgatgatccaagcaaaagccgatgcaacatccgtaagatttcagactgatcggagccgaaattaaagcatatcatcgtttcatagattgaatgataatctccttcaatccacggccgtcgtctaccgtccaaaacaaaatagatttcagttcaccggataatgatctagccaccgagatgctttcaccggagacaacgaggaactaagaggatggcgaaagaaaacacgaagacgctctcgtttgtggtttcaagtttcagaacaagcacgagtcgccgcctgagtatatcacgacttttaggtatattactttactaccctttttcttttttaataaagattatgattttgattttaaaaagaaaaaaaagattttatgtttttccgttctgatttttctgatttaaaactaatcacaaggttttcacaaatatttttttaaataaattgttttaatttttgtttttaatagattttttagtgttaaattttaaatatgtgtaaactattagatacattatcccgtccataatatgaggtctttaagaggtgttttaggtttaatatgttttgcacatataaatttttaacacttattctttttatttaaaattgtttttaaatttgtattttatgcactatttaatttttgttttgatttttaagtaatattttagataaaatgttttattttttaaaatatacataatatttttgtttttaagtgttaaattttaaatatgtgtaaactaattggacacaacatcccgtccatagtatgaggtcttttagaggtgttctaggttcaatatgttttacacatataaatttttaacacttatgtttttatttaaaaattaaattactactattttaaggttttcgattttttaactaatattttagataaaaatattttttatttttaaatatataatatttttgcttttaaatgttaaaatttaaatatgtgtaaactagttggacataacatcttgtccatagtaagaggtacttaagaggtgttctaggttcaataaattttatacatatataaattttaacacttatgattttatttaaaaatatatatattttttttaataccactattttaaggtttttgatttttaaagtaatattttaaatatatattatatttatgtttttaagtattaaaatttaaatactgtatgtgtaaactaattggacataacatcccgtcgatagtatgaggtccttaagaggtgttttaggttcaacatgttttacacataaataaatattgtaacacttatatttttattgatttgttttttaaaaatttgtatatttttaatacacattgtgttctaggttcatagtaaaaggtgattaaaaggtgttctaggttcaacatgttttacacatataaattttaaacacttataattttatttaaacatattttaaaatttatattttataccactattttaaggtttttgattttttaagtaaaattttatatttttaaatatataatattttaaaacaaaaatattaaaatttaaatatatgtaaactagttgaacataatattcggttcatagtatgaggtctttaaacacttaagaaaattaacttactatgttttttttatgtatttttgggttacttttatttaataaattatggggtcttccctctctcgaccaaaaaaaaaaaacattgtaaggtgagttttgagagtaacaataatattggggtatatttttaaaaatattgtagtggtaaataccgaatttccatatagtttctgtgtggcttatatttgtccttttatagggtgcaattttagagtaaagatagtatctaggtttaatgttaaagattctaataatgatggggcgttttcgtgttttctatttatttaagctccatttattattaccggctgttttctattttgtcgttcccggtaaattttgccggcgaagattgaaacttttccaaacgatgcaagcaacggcgaatcttccgacgatatggaatctgtcgcttcgtgggtcatcctctaaagtccatatagtgaaccctaggcatcgaaagtctcacgcgcttcattgtttgaggttttgagtttcgtctccttcgtgagatttctctttctgctctgttcgatccgattcttcaggttgatagtaatattagtgtagcattttacagaatttagttaatttcatgaaatcattgcttatctagagtgaacctttctcaatctttctggtttgtgtagaagaatattttgtgttgcaagaattgattttgcttctctgtaattaaactggattcttttcgattccagatcagaagggcatgaagagtttgacaattctcaggttactcttctttggtttgaagtttgctatcttctctgattttctagcagaatgtaactagtttagttcacagaaaagtcttggacaatcttctattacaaaagaagcaaaacataaggacatatggaacctctttagagaagctcaaaaaagtaaaaacaaaattggttgctatttgtttcggtttcatattctgaaagttaactcacccgattggattgtgtcgtctttgttgtgtgattagatataatgatcttaaacaaacaacgcctagctgcagttgacgagttagaacagctaaagaaagataaagaggaattgttagagaggataaaccaattggaggcagaaagtcagattgtaatcaagaaaggtctcatttttttgaatagtctctatagtttttgatgatttgtattcaagtgagcgatgtgatactagtcttttgaaccctgaagcttatcttgtaccatgttataagcagataagtcgtctctattctgggagttgcttctccgtattgattctatg

SEQ ID NO: 19649 - DNA, 3003 bp, Unknown
  misc_feature (1)..( 3003): 2750-1469P.txt file - cDNA_ID_1822752; gDNA_ID_1620366; Annot_ID_154840
gtgacttacgagtggtaataaatataatgttcagaacatgtttcctctctaattctctctgttttcccaatatttaaaatacagtttcgcaagtattgaaagtgttttaaaaagtgatcatacatagtaagagtaactcgtagagagagataagttatgggaactgactgtatcaaattagttggaccatgttttatgtccgtgatggtcggactcagaaacagagtggtgatgtgaagatgacatgtttatggtcccattttcacttttattgggtcgtgtttcacctttcaaatgaaccactagaaaattgaagcaacttttttttttcaaaccaaaggaaaaaagatgactttgttaagacctttgtcttggttttttttgcttcatcaagcgtcgctttcgcaacatgttctctctattattacatgatttcaaaacaagcaaaacatatcactgcctaattcttaactttgtgcttcagtctttccataaataatagttaactttcaaattcctaaatgtactaaaatcaactatggttgttgagctttattattcttccgtttaatcttggttcgaaagaaaaaagatatggtataatcattccattcatatacgtattactaatcatagttatctttttggtgagtaaagagatttgaatcaagattgtgtgttggtaataagaatccttatagagatgtgcatttaaggagacagaaaggaacacagcacgagacgatgcggttagagaataaacaaaacaaaaagaaacttggtaatggatacaacgtgattccatcgttaaacaactttgcttttggctttggattcttctctattttaactcttaacccaatgttatctcattatccttcatctcaatctatttttctatttacttaaatttgagttttcaagacactttttaaaaaaatgaaaaagggttagaaatagagaagagagtaagaaagaagtgtaaaatcaaataaacgaatctcattaagcacctacttcccacatctttcttaaagtttcttacataaagctcccttcacacgtgcttaccaaatcagattgtcaataattcttgctcaataatttttcgaaatttatttgaatttatctaataaaaatacattgtttgagtatgatattttgcttaagaaggttgattattctccctatcaaagtctaaaaagaagattacaaaacaattgtatggttaaattcatataaatttgtgactagtattttaatatttacatatatacaaatacttatagatgaaacgagaatgcagaaatgattatagatagatcagtgacagtgaactgtagcaaccggcaaagaaacctcgttagctggacacacgattacgatcatgcccccagtctcctctgtccagacggctgcattaataacaacgagctagagggtgttttcgtcttttcgatacttatcccaaaaccgacaatctctggtttggactcgaaggctgatttggtcaattcatagcaaccgaacgagcagtccattcaagtccaaagagctccttagtggtaaaagatgtaattacgtagatgttccatggtcaagaatgtattcagtcaaaataaatatttgaccaaaactttcggttaatttcctaccaccagcaaaattataactttttctaataattatcaatcattttcaatctcttttaattttctttttcacttttttttattaattaaagtcaattcacactatacaaaaagaaggaagtctaaatatttttttactttcatgttgcttttctaacttttatattttgctcttctcaacagattttgctggtttttgtattagaaatattattatgtttccagaaatgaattttttatatgtcgtctggattcgtatatatatattggaaagtgaaattaattcatttgatttttttctttgatatatcgaccaaatcaaataaatacgaccccattgtggcattgttaatgcaaaaaggcacaagtacaaaaaaaacataataattcactattttatttacagacacatgggcccaattcatacggcccaattaccataaacctctcttttaaagagtgggttccacagtggtaaactttttgactatccattggaatgattgcatctggaccgttcatctacattaattattgggttttttcgctttaaagcatcaattaacttattacgtataggattagattaccaataacgatctttttagcttttgtcgttttccgataaaaccatacgattaagaatatgacctcttgtatcttttgagggattttagttaatctttctacatttattttgttggatgctcatacaattatcctgtgtctctcaaaataaaacaaaaattactctatttattagtacattacacatgattatttagaaaatgtatattgtggtcatatgaaatgagaaattaaaggaaatttgtcaatacttgagaacatcaccattcaaatgtttcaagaacaacatgactccaaaacaaaataaatgaacctttccctaataatagtatattctccatcgtacaaagttctaaataatacaatattcatttcgtcaaagcatatgatgtgttggaatcagaattatctgcaaatgtttgaatttcaaatgttagtatcaggctatttttactgttttatcaaatatcgtttcttctgcaatctatcacttgattgttttatcaaatcagcactagtattattgattttgtaatttgtgtttgtctacctccaattactttttagtgttatgattagtaatgtaataaaatcacaaatctgacgtggcacctatatacaattccaaaaacaagtggaacgaatataaaacaaattcacaccttcctcatcttcttcttcgtcttcacttaccttctctctacactcacaccatctcacaaccctaatctctcccacacaagagagatagagagaaacaatg

SEQ ID NO: 19650 - DNA, 3000 bp, Unknown; identical to SEQ ID NO: 4049
  misc_feature (1)..( 3000): 2750-1469P.txt file - cDNA_ID_1822752; gDNA_ID_1620680; Annot_ID_48341

SEQ ID NO: 19651 - DNA, 3000 bp, Unknown; identical to SEQ ID NO: 4049
  misc_feature (1)..( 3000): 2750-1469P.txt file - cDNA_ID_1822752; gDNA_ID_1620680; Annot_ID_164412

SEQ ID NO: 19652 - DNA, 3000 bp, Unknown; identical to SEQ ID NO: 4038
  misc_feature (1)..( 3000): 2750-1469P.txt file - cDNA_ID_1822756; gDNA_ID_1620680; Annot_ID_48340

SEQ ID NO: 19653 - DNA, 3000 bp, Unknown; identical to SEQ ID NO: 4038
  misc_feature (1)..( 3000): 2750-1469P.txt file - cDNA_ID_1822756; gDNA_ID_1620680; Annot_ID_164408

SEQ ID NO: 19654 - DNA, 3000 bp, Unknown; identical to SEQ ID NO: 4036
  misc_feature (1)..( 3000): 2750-1469P.txt file - cDNA_ID_1822760; gDNA_ID_1620680; Annot_ID_48337

SEQ ID NO: 19655 - DNA, 3000 bp, Unknown; identical to SEQ ID NO: 4034
  misc_feature (1)..( 3000): 2750-1469P.txt file - cDNA_ID_1822764; gDNA_ID_1620680; Annot_ID_48335

SEQ ID NO: 19656 - DNA, 3003 bp, Unknown
  misc_feature (1)..( 3003): 2750-1469P.txt file - cDNA_ID_1822783; gDNA_ID_1620680; Annot_ID_48330
tgctcctattatctcatgttccattgtttgttgatttcaatttgaaatattagtttctttcttcttcccttcattccttcaacttttataccattttcctgttatctattgatttgaaagttttaatttttaagaggcggtgatgacaaaaaacatttctcgatgctgaaacttactcgagagaccaaatcactcttgtaatctttcgtgatgcttgtttttatgcgtgtctgagcctaaaccaaaaaatctttcatttatgctttgattatcatagatcccaatttatgcgtttcttttattgcttttcaatttgtaatgcgagttttgctttattttgtccagccatggaagaagcagatcagttatgtttagctgctaaatccggcgacttgaaaaaggttcaaactttaatttactccggcgccgacgttactcactttgataacgacggtttaacgccgttaatgcacgccgctaaaatcggaaacgcagagatagtaacggcgttactcgaatccggagctccatggaacgcattatctccatcaaatctctcagcaggagatttcgccatggaagcaggacatcaagaaactttcgatcttcttctcaaaaccgggatccaatcagagctaatcttaggaacaatcgcaagaaaccaaacaaagaacgaatattctaatcaagaatatcttcaagacagagttagtttcagtgaagacaagttaatggatagtgaaagcaaaggtgtgatgatggcttgggaaaaaccattaatggaagctcacgctaaagctatttgtctcaacggtggtcacattcttaacgttggtttcggtatgggacttgtcgatacagcgattcaacgatacaatccggttaaacacacgatcattgaagctcatcctgaagtttataagcgtatgattgaatctggttggggagagaaagagaatgtgaagattgtttttggaagatggcaagatgttcttgataagcttgatgataattcttttgatgggatcttttttgatacttatggtgagtattatgaagatttaagagagtttcatcagcatcttccgaggctgttgaagcctgatggtgtttattcgtatttcaatgggttttgtggaagcaacgcgttttttcatgttgtgtattgcaatttggtgactttggagattgagaatttagggtttagcactcagttgattccattgccggttaaggattgtcttggggatgaagtttgggaaggtgtcaagcaaaagtattggcagcttgatacttattatctccctgtttgtcagtttagtgactgaagaagttttatgataccagcaattttgcgatattgtaatttttcttactcataaaaagtagattttttatccatttgaaaatagtcatagtcatccaataagaagaaaagaacagtaataagtgtataacataagatcccatagtcatgtgataggaaccaagagccagactaattctgttacaaatatcttaagaaacaaaagtactaattaaaacatgttatgcagaagcttcacgttttctacatggtctaaatatgtgaagactaagtgaccctgaaacgcttccattccttgtattgcaacgctcatcatcgtctttctctcaatattgaagtagtagacgtcgaaaggcactgtttgatagcacggcgacaacataatctcatttgtacgagtcactccaacaaagcgtaaattcagggttccaatcctatgctgccaccaagcgggtaatacgtacgtatgcttcgaccattccttcttttcagcatcttgtagaacccacaactcaatactcttactacgtccatcaacaaagcaatatctttcagaaacaagtgaagctaatttaccattgtagtttataagagttccatcatgcgctgctttaatgaactcttccatgactgtaataaatctaaacttctctgacctaacatcgaagcaaacgataatgtaatcccctgaagacaaattgatcgctggataatacaacacaccattgatgcatatctcagacattccaagaatgtgaggcatggaacattcgatgattctccatgacagttctccagttcctagtgtcagaacttgatgctcatcacttttatatgacaacaataccttgaactgtttctgaatcggttcatacacgaaaaatcttgacggcccaatactcgtcttcattggtttaggtaagcttaaggtatgtccagtgctgggattacatatcactgtcactgtttcgttcatttccttgcgtttaaaacagatcaagccattgacaggacgcgaaattttatagcataaggagaaattctttagagaaatggcggacgagttctcatatggattttgaagctgaggagacgagaagaagaacaagttaccatcttttttgcagcagaataagagttgcggtcgatgcaaagatcgggtcaagaacagctctgtgaaatcttgacggcaaattacggagatccagagtttcgacacgcaacgacatgtcgctatagattttgccggtaatctcaggagtatctcgatgatgatatcaactgggatctggactgacttttctgttttattcggtgaggtcttcttctccgttctacgccgggagatggtaagacgattctccgtaacatttctccgcagtgttctcatggcggatacgccgacggttaaaaccctagagagtgagagtttatggggaagacgaaccaatttggatgagaaaatcgaaagcaattttcgtaattttgttttaatggacttggatttgaattgggctttcaaaataaatatgggctttaaactaaaaacgacgccggatacattctcggtccattattcgccacgtgtttaatttctagatgctcttgttcttattcttctcgtcttctccataagccaaattgagtttatgattttggtttctgaatcaccaatg

SEQ ID NO: 19657 - DNA, 3000 bp, Unknown; identical to SEQ ID NO: 4030
  misc_feature (1)..( 3000): 2750-1469P.txt file - cDNA_ID_1822794; gDNA_ID_1620680; Annot_ID_48326

SEQ ID NO: 19658 - DNA, 1207 bp, Unknown; identical to SEQ ID NO: 4029
  misc_feature (1)..( 1207): 2750-1469P.txt file - cDNA_ID_1822798; gDNA_ID_1620680; Annot_ID_48325

SEQ ID NO: 19659 - DNA, 3000 bp, Unknown; identical to SEQ ID NO: 4057
  misc_feature (1)..( 3000): 2750-1469P.txt file - cDNA_ID_1822810; gDNA_ID_1620681; Annot_ID_48350

SEQ ID NO: 19660 - DNA, 3000 bp, Unknown; identical to SEQ ID NO: 4057
  misc_feature (1)..( 3000): 2750-1469P.txt file - cDNA_ID_1822810; gDNA_ID_2926186; Annot_ID_140793

SEQ ID NO: 19661 - DNA, 3000 bp, Unknown; identical to SEQ ID NO: 4056
  misc_feature (1)..( 3000): 2750-1469P.txt file - cDNA_ID_1822814; gDNA_ID_1620681; Annot_ID_48349

SEQ ID NO: 19662 - DNA, 3000 bp, Unknown; identical to SEQ ID NO: 4056
  misc_feature (1)..( 3000): 2750-1469P.txt file - cDNA_ID_1822814; gDNA_ID_2926186; Annot_ID_140792

SEQ ID NO: 19663 - DNA, 3000 bp, Unknown
  misc_feature (1)..( 3000): 2750-1469P.txt file - cDNA_ID_1822817; gDNA_ID_1620681; Annot_ID_48348
ttcgcaggtagcttaaaatgtcagaatgtagctgttccaaaaactacttcccagttccaagaggtacatccatttgaaatcgatgctcatacttgttgtttcttcgatgatacaactaaattctgtatttgctttttactgaatttgcagttatctctgaaacgaagccagcttgttggcaatgccgttgttaccggtcatgttaccggatcccgcagctgcaagaatcaaggtaaagttagcattacactgaatcaatccatttcctttaacatatattctttatcccctcttgatgaaattttccattagtacgttttaaacaatttgctgtcttgaatattgcacagctattcgagctgttctatccggtgatggaaccgccttgactactgattcaaaggaggctggacttcgtggaaaactgaaaaaggtcgttctagcttacagtggaggcttagacacctctgtcattgtgccatggcttaagtatgttttcctttttcttgagtttatttctgacctctaacaagaatacgttttgaatcttcctctggttatgaaacaactagtctgaccttccttatatgtaactatttgttttctagggagaactatggttgtgaagttgtgtgcttcactgctgatgttggtcaggtacatcacaaaaatgccacatgtcaactgttttagttaagaaatgaagttttatgttgttgcaatctgcttatgtcttctcaacctctaaatactttgatgtgaagggcataaaagagttagagggtttagaacaaaaggctaaggctagtggtgcttctcagttggtcgttaaggatctcacagaggagtttgtgaaagatttcatcttcccttgtcttagagctggtgccatctatgaacgaaaatacttgcttggtacctccatggctcgacctgtcattgctaaggtaacatttcgaatggttttatatgattgacttgtgaggactacccccactatttctaatatctggatatatcttttggattacatattgtcactaatacattttctaaatgattaggccatggttgatgtagcagcagaggttggagctgatgccgttgcacatgggtgtactggaaaaggaaatgaccaggcaagtacttggaatgtcttgctaatgcgtcacattggaaaacacgcattgattcttacattacttttttgtactgattgattgaccaggttcggtttgagctcaccttcttttcattaaaccctgaacttaaagttgtggcaccatggagagaatgggaaatccaaggccgagaagatgctattgagtatgcaaagaagcataatgttcccgtcccagtgacaaagaagtccatttacagccgggacagaaacctgtggcaccttagtcatgaggtaaagtaaaagacaagtgttggttcgcatttttcttttggatacaaattgatccagtttgtcacattgctcagttcctaataatgtgtctcatgctctgatatcaaacttatgtgttttgttgaaagggtgatctattggaagatccagcaaacgagccaaagaaagatatgtacatgatgagtgtggatcctgaagatgctcctgatcagcctgagtaagttggaatttctttgagcccttgtgtttaactatgcactgtaattaccccaaggtggtttgtagtggattatagctgtgttgatagtttgaaaactaaagttgagtcagttagctacagagctgaggtttaggcagaatgagttggtgtgttcaggatttgtttatggtttgggattgggaatcagatctagaatagagagttctcgttattaaagtctctcaaaggagttaactggtttagctgctatgctatcaaatttagataccaagagtaggattttgcaatttgcatcctaacttttgatacttacacacttatacagatacatcgagatcgggatagaatctggacttccagtggcgctgaacgggaaggctctgagtccagccacacttctggccgagctaaacacaataggaggaaagcacgggattgggcggattgacatggttgagaaccgtctggttgggatgaaatcacgaggtgtgtatgaaactcctggaggcactatcctctttgcagctgtacaggaactagaatccctcactctagacagagagagtattcaggtaaaagacacattagcactgaaatatgcagagatggtctacgcaggaagatggtttgatccgcttagggagtccatggacgctttcatggagaagataaccgagacaaccacgggatctgtgacactgaagctgtacaaaggatctgtgtcggttacagggcgtcagagtcctaacagtctgtatagacaggacatatcttcgtttgaagggagtgagatctacaaccaagcggatgcagccgggtttattcgtctttacgggcttccaatgaaaattagagctatgcttaagaaaattagctagaaatggttttcattcatgtcttacttggaattgagagcctgacattagaacacatcccttattgtgatgcgtcgtcatagcttcagcttctttcgaaataattctatcatctttcttcactttggaaaaacttgagaaatttaataatgagtgcctctttcttttatgatttccattggaaagagatataaaatataaatatccattacttgaattcaacgatcttaagtttaaattatttataacgagaatttaaatgtaaatgttttttacttttttttcttatggtaaaaattccaaatttaaatgtaaaaaaagataagggtgtttaaggtaatgcgaaacttattttttttttacatacacaaaaaaaaaaaaccatcggacctgaaatctttgtaagctcttcctccttgctcaagcaaacctctttttatatatttgctctctctctctcagatccgattcaagctttccgatttgcgatg

SEQ ID NO: 19664 - DNA, 3000 bp, Unknown; identical to SEQ ID NO: 19663
  misc_feature (1)..( 3000): 2750-1469P.txt file - cDNA_ID_1822817; gDNA_ID_2926186; Annot_ID_140791

SEQ ID NO: 19665 - DNA, 3000 bp, Unknown; identical to SEQ ID NO: 4055
  misc_feature (1)..( 3000): 2750-1469P.txt file - cDNA_ID_1822821; gDNA_ID_1620681; Annot_ID_48347

SEQ ID NO: 19666 - DNA, 3000 bp, Unknown; identical to SEQ ID NO: 4055
  misc_feature (1)..( 3000): 2750-1469P.txt file - cDNA_ID_1822821; gDNA_ID_2926186; Annot_ID_140790

SEQ ID NO: 19667 - DNA, 3003 bp, Unknown
  misc_feature (1)..( 3003): 2750-1469P.txt file - cDNA_ID_1822825; gDNA_ID_1620681; Annot_ID_48346
atgtgatgcggatatatcaactaagctggctaagatttgtattgaagaaggcattgattttgatcaaggggcagttgatttcattgcttctaaatctgatggttcacttcgggatgctgagataatgcttgatcagttaagtttgctcggtaaaagaataacaacatctttggcctacaagcttgtaagtttacacttctttcttcatatttgtcttggaaacattagatagtttagaagtgaaagatcaacatttctttgattctgcagattggggttgtttctgatgatgaattgcttgatctgcttgatcttgccatgtcttctgatacttcaaacacggttataagggcgagggaacttatgagatccaaaatagatccaatgcagcttatttcacagctagctaatgtcattatggacatcattgctggaaactctcaagaaagtagttcagcaaccagacttcggtttcttacaaggcatacatgtaagcaccccagtgatgattactttgaatatcagcttcaaattaaaacctgatctcactctttatcatatactgttctactatatatagctgaagaagaaatgcagaaattgagaaatgcattgaagatactatctgatgctgagaaacacttgagagcatcgaaaaaccagacaacttggctcactgtggcacttttgcaacttagtaacaccgactcatcatcttttgcaacagatgaaaatggaagaaaccaaataaacaaaggtcctaattcataaattctcgtttcctttatttcatgcttctttttcgtgttgtcttggttactaactatatataacttacccttggtcatgtatctagacgttgagctctccagcacatcatcaggttgtcctggtgatgttattaaatcagatgccgagaagggtcaagagagaaactgtaatgaaacagttgaatctgtgtggaaaacggttacagatttgtgttgttctgattcactaaagagatttctgtggaaacgaggaaggttgacttcacttactgttgacaaaggtaacttatatttcccaaagatggtctgaaagttttactttggcttgtgtctcagataagtaaatgcatattcttttttcttttcaggtgtggcaatagctgagttagaattctacacacctcaacatgtagcaagagccgagaaatcatggaaattgattgcagactcgttccaatctgtgttaggatgcaacgttgagatccaaatgaatcttgttatctctgcgtgttctccaccaaagagtgctaaagcagcagcaagtcttttctttggacttttcagttgttctcgtagaatgcttcacaagtcgtatttgactacaagaaccgactctgactgcgcatctgaaaagcctgcagttacaaattctctgagaagttgccaaggaaatgtcttgagggctcgaagtgttcgttcttcagccaatgcatcatcgcgtatgagctgttccagtgatcaaggcgatgcaacttctgctatgtgtactccacacattcctccgggtgaaaaaaggtaaaacatggttcatatttattcatttcaaaagtaagttgttttgtgatttggctagctactcaagtatactctgcctctgactttgtgcaggccagaagatgacactgatgtgttgtgttggaagaagactcccctaggcaaggtaaacatctcgactatgcctaagaattcggtttcagatctctgtctgtacctttttggtgtttctaatttgtgatgatgatacatgtcttatagggtcagagcgagacacagaacagcaagagctcacggcttatcggccgagtccttccctgcagcactgcagctaattaagggagctcgatgagggtaatacccattttgtggaagtggaaccaataggttttagcaaacccattgtttaggacaatgtgacacaaaaatgtatagttgcaaaatgtgtttcaagaccatattttagattagcatatactaatcactcctttaacagacctgaattttactgtctttggacccttttattgactgagctcattatgttttcacaaattatctcattcattaaaacgaatcagaataaagtgaatacattagtcttcaacttttttgttacaaaaagtggataatgtttaattttttcaataaactgatttgaaattagaaacataatttggataaggttttagtaatttgggataagatattgacagagagatatttataaattatctggtttcactattttggtaggaaaactccaaaattaaatccataaccctaatcgatatctctcttggacaggccagcacatgtaacgagcaatcgtgaccgttgagacagtaacacgtggcaacagtccttatgatgagacctttgatgagaatcagcagcctccatttctgtaagctttttgttcctcccaaaattcccaaatccatcttcttctccaaacaatcttctctcaaacattactactattttccaggatagcttacgcagcttcagactcgggttcttcttttcgatctagcctccgtcctctttcttcttaccacggatctcgcctgctctttttccgtacgacggtctgctttgtggatagtttggctgacgacgaggcgatttgaacattaacagttactggtacttggagtttcaaacatttctccgatgttttggttttggcatttagtcacgggaatgattaattgattgattgctgtagaaatatgtgaagaatgacacgtagaagaatttgatgaaaccttgggatgcataggcttctgtattatggattggtgattttagatctccatttatgtcgtttcacatcagtgtcttgtggttttagctatatgctgttttggttttaggttgatatttattgtatggtatgtgtttgttaaaggaatgatttgatgatgtttcactgttagggtaattgccaaggatg

SEQ ID NO: 19668 - DNA, 3003 bp, Unknown; identical to SEQ ID NO: 19667
  misc_feature (1)..( 3003): 2750-1469P.txt file - cDNA_ID_1822825; gDNA_ID_2926186; Annot_ID_140789

SEQ ID NO: 19669 - DNA, 3003 bp, Unknown
  misc_feature (1)..( 3003): 2750-1469P.txt file - cDNA_ID_1822829; gDNA_ID_1620651; Annot_ID_47730
aaaaggatgttacccgcttttaggtctcgatgtatgattgtgagtcgtgaatcttgatggagatacagaattcctctagcaattcctcctatgatcttgtaccgtgtagtccaatccagctggctctgcattctagaatctgcacatccatatagttagaatacctaaaacatgagttccaaaaggaaatatctttcctaagctaaatcttaccaaacaagaagtaatcaaggcttttattagacacaaactcgtagacaagtattttctcttctctctccaaacaaaatccaagaagcttgaccagatttctgtgctgaagctttgccacaacaacaacttcgttcttgaactctttctcaccttgtcctgatgttttcgatagtctcttcacggcaacttgtactccattaggaagtgtgccctaaaaagattgtgaattaaacagagccatccccttatttgatcctcttatgcaagtaacaaggaaactcaatgaaccggtagtagtaccttgtaaacttgtccaaatccaccttgaccgagtttgttacacatcgaaaacttatctgttgcagcttcaataaccttgaaatcaaactgcagtgaccctgcagttgtgatgtcatcctcttctgcaaaatatttaagaattcaaatccataaaagtttaagcaacggacacatagattttggaatctttaccatcatttgcacctggtgtatcataagtcttctttgctctctttgatgcatggaagctaaaaacagctacacaaataagaactgagatagcgactggcacaacaattgctatgattatcactgtagaatttttgccttttcctgcataagtcttagattagacatgaactaaaaccaaactaactattaggtaaataaataaaacagagctctaaccaggcggaaaggaaggagttgaaaccagtggcagtggaggagccgaaaccggcggaggaagaacagttccctctatagtttccttgtaaaaggggtaaacctcgtaccttgagttacaacttgggacaagaaatcttcctccaactttgttgaaatataattctttgatggattgttgaagacacattacacaatcttcactagtcagatcaggaatgcactgaaccgatgcataaagcgactgagacgaactgaaatccgacttcttaaccgcgaatttcttgcttgtactattagccgcttcctctgcagactttttcatcagagaaagcactgcatcattaaaccggtcagattggtccgccgtaactttctgagtgttccaagtgattattgtagttgtggttacagtatccatgaatatattcctgtctgagtatccaagcatgcactcatcatactgaatcaagaactctttcccacctggacatcgactccgagtgtctttagcagcaaagatgacgcactcacggcaagattctggcgagagatctcctttgcagagataaagtccgaacaccatgtcggagttttgaccctttgtgagactatgagatcccaaagagaagtaagcattgttagaagaaagagaggtcaaaagtgtttggagatttgagaagtaaatggagtttcttgatatcctgttagtacaaacatggccaacgtaagtagggtcttgtaattgtgcagaaactctcaagcttccaatgaagaaggttagaaggaagagaaagtttaatgaggtataagcagacattatccaatttcttcacctttcttctctgttttttttttcttacttttaatgattggtttatgagtactaatgaatgaatgtgaaaccagccaagccagtcaaattttggtttttgtaaaataatacaatatcttgcaagtcaaggtcaactagacgagtaacatcaacttgtattgatgttaactaaaatgaatcaactataaaaatgttagaataaacatgtgaaagcgaaaaccagagaaaatacaattataaatttttaagttttcatgaatctgtttccggaaaaagatgaacctattggagttggatatttaataggtttgtgattattcagcaagccgcggagactttgggtcaataagacaacaccgttttacttccttaccaaagaagtaacaaacgaacagttacaagttaaaacagtaacttcccaaaccctagttgcttcagtttctagccttcactgcttcatcaaaccaatcaacactcttagtggaaggttgactctaaagattgtcgttgacttcatattttagtacttttccttctgaactttacaactgtgtataagaattttagagtcattttgggaaacaaagaactgaaacttgcctacttacatcatttcatctctctgttcctcacaaactctcttgcttctgcagaaaaccgtacttacttatcacatctctgttccaacaaaacaaactgattgtgtaagaatcagcagataagccattaattctctgcacccttttgttttcactctctagtaaataaaattctagacaagagtatcttacacttacttgtcaggcactaaaatattatgaaacaaaaatggaagtaatttaactaagaaaaatcgaagcttgaccgaaattctgcgttaagctttgctacaacaagaatctcattcttgaattccttttgtttctaataccaagttgtagtaggctagtggttcccaacttttaaggagctcccgtttatacactcattattgggctcaactggtgatatgtggatcactgatcaaataactaaattttgattcaaattcaagttaattttaacgtgggcttttcccaaataaaaatatatgttgtttaagagaaatgacaataataagaaaaagaatcatttactttgacttgttgactcttatagtcaccacaacccatcttatactacacgctagtgatcagcttataaatgggagctctatgatgtgaaactcaaatcaaggtactcaaacaatg

SEQ ID NO: 19670 - DNA, 3003 bp, Unknown; identical to SEQ ID NO: 19669
  misc_feature (1)..( 3003): 2750-1469P.txt file - cDNA_ID_1822829; gDNA_ID_1620682; Annot_ID_48384

SEQ ID NO: 19671 - DNA, 3003 bp, Unknown; identical to SEQ ID NO: 19669
  misc_feature (1)..( 3003): 2750-1469P.txt file - cDNA_ID_1822829; gDNA_ID_1620682; Annot_ID_164517

SEQ ID NO: 19672 - DNA, 3003 bp, Unknown; identical to SEQ ID NO: 19669
  misc_feature (1)..( 3003): 2750-1469P.txt file - cDNA_ID_1822829; gDNA_ID_1620651; Annot_ID_163459

SEQ ID NO: 19673 - DNA, 3003 bp, Unknown; identical to SEQ ID NO: 19669
  misc_feature (1)..( 3003): 2750-1469P.txt file - cDNA_ID_1822829; gDNA_ID_2926181; Annot_ID_140581

SEQ ID NO: 19674 - DNA, 3003 bp, Unknown; identical to SEQ ID NO: 19669
  misc_feature (1)..( 3003): 2750-1469P.txt file - cDNA_ID_1822829; gDNA_ID_2926181; Annot_ID_200292

SEQ ID NO: 19675 - DNA, 3000 bp, Unknown; identical to SEQ ID NO: 3549
  misc_feature (1)..( 3000): 2750-1469P.txt file - cDNA_ID_1822833; gDNA_ID_1620651; Annot_ID_47729

SEQ ID NO: 19676 - DNA, 3000 bp, Unknown; identical to SEQ ID NO: 3549
  misc_feature (1)..( 3000): 2750-1469P.txt file - cDNA_ID_1822833; gDNA_ID_1620682; Annot_ID_48383

SEQ ID NO: 19677 - DNA, 3000 bp, Unknown; identical to SEQ ID NO: 3549
  misc_feature (1)..( 3000): 2750-1469P.txt file - cDNA_ID_1822833; gDNA_ID_1620682; Annot_ID_164516

SEQ ID NO: 19678 - DNA, 3000 bp, Unknown; identical to SEQ ID NO: 3549
  misc_feature (1)..( 3000): 2750-1469P.txt file - cDNA_ID_1822833; gDNA_ID_1620651; Annot_ID_163458

SEQ ID NO: 19679 - DNA, 3000 bp, Unknown; identical to SEQ ID NO: 3549
  misc_feature (1)..( 3000): 2750-1469P.txt file - cDNA_ID_1822833; gDNA_ID_2926181; Annot_ID_140580

SEQ ID NO: 19680 - DNA, 3000 bp, Unknown; identical to SEQ ID NO: 3549
  misc_feature (1)..( 3000): 2750-1469P.txt file - cDNA_ID_1822833; gDNA_ID_2926181; Annot_ID_200291

SEQ ID NO: 19681 - DNA, 3000 bp, Unknown; identical to SEQ ID NO: 4086
  misc_feature (1)..( 3000): 2750-1469P.txt file - cDNA_ID_1822843; gDNA_ID_1620682; Annot_ID_48380

SEQ ID NO: 19682 - DNA, 3000 bp, Unknown; identical to SEQ ID NO: 4086
  misc_feature (1)..( 3000): 2750-1469P.txt file - cDNA_ID_1822843; gDNA_ID_2926181; Annot_ID_140577

SEQ ID NO: 19683 - DNA, 3003 bp, Unknown
  misc_feature (1)..( 3003): 2750-1469P.txt file - cDNA_ID_1822859; gDNA_ID_1620682; Annot_ID_48376
agcatcttgaaattgacgcagtcacaaaagcataattaaaaaaaaaaggatacaaagatgggtctattataccgagtatgtattgtgcatgcatgtgacgtgggtgaagggaacttctcttatagaagtattgaaaaaggagaaattttgggggattgaaaatatttgtctgtttgtctggttaggtcagaacaaatcacatcgagctgcatagtaatatttcgtttacaacacatggttgtgacctctagacaaataaactttttaacagttttcgctgttttgccttgcatgtatttcgtagtatttcaatttatatgtaactatatttcaattgaaacatctttaccatattattttcttttttgatgccaatttctttaccatgtgtttgctcttgtgttatttatgtgtgattgattgattgaccgtgtcgattacccaagcggaatcttgtaaagggatactccgtcaccgtaatacagtgacagcatatttaatttaaaataatataaagtcattgtaggatggaaaagtaatttctatgatattttcttccgaacattataaaatttattttgtcagaagtagagcagattaaagtttcgaagatggatactttcacttttttcttgtaagatattgattaggtatgattgaggctcatgatacgaaataatgtcagtgttgaactactaatttgttatgcttgaaatgcttttttataggtcagtaggtttttttattttatttttaggcatatttattctggtttagtttagttagttggtttctaaattttccttacgactaaaaaatctaatcccaaaaccaaacgaaaacaagaaataataaatcgaacaatatttttaataacaaatagaatatatatatatatatatatatatattatatcaaattattccaagatagagtttttcagttcattcctagttcctactcatatattcttaatttctattatctcaagattttatcttgtcctcatatctacgaattgtatgaaagggtttaataaccataatctattgcattgtcctatctacgtacaccataatcgcttgtgttggtggatctatagtaatctaaacaattttttatttccatggcgtgaaagtttgagccaacaactaacgatattaatcgtacaaatgagtttcatatttttttttgcaatctcatttcaaaaagtgaaaccaaaatttggatgcttctaattaaccataagattttttattaggtgcacctaatcttgttaataaattataatcttctttgattagttatgctcctatccagatttcatgcttcaactctatgattgatcaacttgcattattactgtaccataaatactttgccaacgaatgttagttgtgggggaaacaacaattccgctggtaattttgactgaattaaaaaattagagatagaatgcaaggagacacgtacgaacgagttcatacacgagaagcagttgaccagagtcaacaaacctgtaaaaagctaaagaaccaccgtccactcgcagtctactatatacgactaactaagattcatgcaggctcaagtttttgtacttgtatgacacgtggctagatcgtaacggccgtttagactgatgtctcttcgtctctccgagtctttgtcctgtctttttctcattgcatgagacataccgaagattccagtggattaattgtcggtccatttcttttttcctttttactactgacttcgagttagattctctaaagtagtacacgtgaaccataggattcgtttatgattacataaaacctttgttagtagtgtttgttcatttcttaattctggttatacatttgaaacatatgcaaatttatcactcgacttattaatcctaagttcgtaactaagttctttttggttaattagcttatatacttctcaagatttctgattctgacttatgctataaagtatatcttcgataagttgagtcgcatctctctcctcggaaaatattcttgtattttggacaaatttctcgtgtattgttttgatatttttgtggtcatgttgttttgtgaattagtatataagtagataaactacgtagttttcattcgtacaactatataaccaatcgtattcgacgaaataaatagtcagaaaatattctatttgttatgcaataatatctcactatacagtccaaaatattaacctccatataaatctgatagtaacaacaaacaattttttctctttgtcctataacatacataatacatttatgtttgaaagacaagagaagaacaaaaacaagaacccacaaatgtcaaaatagtgaaagaattggattccgacttcgatttcccattacacaaaacgacgtagcaacggacggcgctagctattacgttaagagacgaaaaacggagtagggaccaacaaaaaaacgtgatcatggatggattattaacgatagacattggattacggcgatggacccataaaactgacgtcatccgttatggggtccgtagtgtggtcctctaaaaagtattgacgctttttgtcatctctctgttctttaggactcgtcacaaattttacttcctcagattcacatgaccaaatcatgtaaccattttccaaataaaatctttacatttagatttagattcagaggaattgaattagcctcatcataatgtatgatactacatactacactagtgacacggaaattacacgacgaaaataaacaatgtgaagaataacgaaatttcccgggaaaagagagatagagagtgagacacacgcgcgagtgatgcgtgtggtagtaaatagaacactgtttgatgatactgctgcgactacttaactcttattacaaagctctctttttgttgtctctctcttgctctctctgcaaaactccggcgagaagagaacgttgtcgtttcattcgtatcaaagtcttcatcagcaatg

SEQ ID NO: 19684 - DNA, 3003 bp, Unknown; identical to SEQ ID NO: 19683
  misc_feature (1)..( 3003): 2750-1469P.txt file - cDNA_ID_1822859; gDNA_ID_2926181; Annot_ID_140573

SEQ ID NO: 19685 - DNA, 3003 bp, Unknown
  misc_feature (1)..( 3003): 2750-1469P.txt file - cDNA_ID_1822863; gDNA_ID_1620682; Annot_ID_48375
atcagggtcatcgtcatcatcatcatcatcatcctcagacagtgagctaggtgctgcgaatctacacatataaaaacaatttcttgggacattgtctaggaaacacagaagacaaactgatagactacaaaacagaacaaactaaccttccatttgaggctcgggaaccctgctgtactggaatagaaaccatttcagaagcttctctttctgaggatgaagccttccaaccttcactgcgcaacacttctcgctcagctgactgcactgtgacagattttgttacgtcatcaccagtctccattttggaggcctcaatagcagctcgaataatttgttcttctatatcattgtaatgttgcatattattttctgcagaaccaacaggtacagcatgcctactttgtccggttggagcagactgattatcatcatcacttacttcatctataatgaccgcctcttgggcagctggaccgtgagcttgagctgtctcggtcacatcctcaatagtaggagcatcattagattgacctgatggcccattgctgtctttaacctctataggtatctccctggcctcccttggatgactaacaaatgggggacgcgacataacaggatcattatcaaatagacttctcccaaagtttggatcacgaagcgggaacgggtccgttgttctagcttcagagaggactggagtcacaccatcatctatatccattgcatcatatgaattttgatctccatgagtaaagtatgcattcacagctctattgaggttcccacgatactcctgcaataatgatagcatgtaagttttggcaaacacgaggaacaccagccacacacaaaaaaaaaacttacaagttataatgatgctgagacaatagaataatgactaaaagataagaatgcacaaaggacacaataaaaagttctctaaacccaaactaaaattgtacacaagatgagttctgaaaaaaaattcattgacttcaataactaacttaaaccccacatgaatatctctaaaataccaaaaatccagaccaaaatccaaaaaagaacaaaacttttcacaactaatttcacaatgagcaggtataaactcgtttagatatcaatgaacaattaacaaaaccaataagcatgagaattctgtaagaagtccacataaaaactcaatcagataatcggataaactaaaattcaacacaattaactccaattgcgacctaaacgcatcaagatgagcttaacaacgatataacaaaagcgtagaggagatataattcgatgatccaacgaacaaccacttgagcgattcgagaaacttccaaaaatacttcaatcaaaaacaaaataacatctaaacaatagaaggaagacggaaaaaacccagggaagtgtaattgaatcacctcgagcttacgaacggcgacggcattggaagagccggtgatggtcatgaaggtgtcaatagcttcctgagtaggtgtcgccattagaaaagagaaagcttgagagaagtttttcgtcggagatttgtgtttggagctggagtgaaggaggaggcaagaattaatatatgttgtaaatcacaaaaattgcagtgaagaaaggaattggatcggtgactcttaagatttttaaagccttttttagggtctttcttcttttccattttttttaattctccttttttatttggtgtggattttcttaaactttattttctttattctttttgtatattttcggtgatattcaagatattattttcagagaacttgagataatatatggagtgtcctaatctgaataactaaataaataattattcagttgaaattggattttttttttcagagtctttatattttataaactggaattcgagtcaaattcagagtggattaaacttatctttttagtttttactagccaagaactttttgacctttttttttaacatgatattaattgttatagtgtatatacattaaaagttagataatttttaatgtacaaaaaaaaagttacataatttattttttttcacaccaattacatattttatttgtcaatttgacagtaaatatggaaataagccttaaaatgtaaaggcttttcggtccaacaacgaaaaaccaaaaccaaacccaaaactaaaatatccaaagatatcctcactttatgatcatcccaatcttccctctatatagtgcctttaaaggagctgtcatgttctctttcggccgtttgtaatataagaattgtcgtttttgtccaaaaaaaagggttggctttcagtttgtgtcccagaaacaaagtaaatctttagataaattgaaacaaaactagctttgtgactccaattaaactttgcttcctctaagaaaccttatggagagtattattctacaatgatttgaagtatactactaataattgattacatttaaattcaactataatttattgttattgttcttcaatcaacttgaactttgagtttattgggcacattacttttagaggaatgtgaatgtgaacattgaagagacgtgtattttattttcttcttgacaaataccgttggaggtataaaaacaccatcaaactcaggcccatttggcaatggcggcaacaagaatgggtattatattgaggttaatttcgtcaatcaccacttttaaatcgtgacaaattcgtctattatctctcaatcttcttcaaccttcaattacatcggcaattctacaagtggcagcatcctattagtaacaaacacacgtggcgtaagctaatgcgtcgtagtgtttataatagctggggtttgttaattatggcgtcacgagtgatttaagaagcagctgaaaaataataaacaatgagggaatgccaacgttttaaattatatttttaatttgtgaattttcatcagagtcggatcttgatgcgactgctcaaacagagtcaccggcgattacgatg

SEQ ID NO: 19686 - DNA, 3003 bp, Unknown; identical to SEQ ID NO: 19685
  misc_feature (1)..( 3003): 2750-1469P.txt file - cDNA_ID_1822863; gDNA_ID_1620682; Annot_ID_164504

SEQ ID NO: 19687 - DNA, 3003 bp, Unknown; identical to SEQ ID NO: 19685
  misc_feature (1)..( 3003): 2750-1469P.txt file - cDNA_ID_1822863; gDNA_ID_2926181; Annot_ID_140572

SEQ ID NO: 19688 - DNA, 3003 bp, Unknown; identical to SEQ ID NO: 19685
  misc_feature (1)..( 3003): 2750-1469P.txt file - cDNA_ID_1822863; gDNA_ID_2926181; Annot_ID_200280

SEQ ID NO: 19689 - DNA, 3000 bp, Unknown; identical to SEQ ID NO: 4081
  misc_feature (1)..( 3000): 2750-1469P.txt file - cDNA_ID_1822867; gDNA_ID_1620682; Annot_ID_48374

SEQ ID NO: 19690 - DNA, 3000 bp, Unknown; identical to SEQ ID NO: 4081
  misc_feature (1)..( 3000): 2750-1469P.txt file - cDNA_ID_1822867; gDNA_ID_2926181; Annot_ID_140571

SEQ ID NO: 19691 - DNA, 3003 bp, Unknown
  misc_feature (1)..( 3003): 2750-1469P.txt file - cDNA_ID_1822914; gDNA_ID_1620682; Annot_ID_48361
tagcacgccaatgtctctctcttttttagtctaaaaattgattacaatttttttttatgaattttaattaacacagaaagtgtaatcatgatcatcatcttcccatgcctctatcatcattgatccaattttctcctccactactgaacctattaattgcttttacgttgatttaaaaattttaaaacctctacgttagaacggtcatatgcttatttaacaattagatcatgtcttctataaaggtaaaagagaaatctgacaaatgaagtgtaagtgtttataatgtttgtgtcccaaaacacacatcccccacaaaagtaaaaacaccatcaaaactttctttctttcctcttatcttcacttcctcttgtaaaccctagattctcttgttcctcttatggattcattctctttttgtatcatcatcatgatacttctcttatcattccaccaatctaagtctcaattgattcaatctacacatcttcttgatctcatgatcagagattacaccattagaaactttaagctcaatttcaacacaggcgtcactcagaaaatctatctcccttctaatttctctggtatcgatattgacacggtcaagttaaggtgtgggagtttgagaagatatggcgcaaaaattggagagtttcacatcggttcaggccttacggtggagccatgtccggagagagtcatgctaattagacaaaactttggttcgaattggtcttcaatctactctactggttataacttatccggttacaattacaagctcgtgtcaccggttcttggtttgttggcttataatgctaaccctgacggtgtggccaggaacccttacgaggttaatgttgtaggtaccgatcaaaacccaatcttaatcgatttcttgatcaacaaggcaactaataacactagccctaaccctacgaagaagaactcgtcagtcttgtgtgcgtgttttacaagcaacagtaacacaacgtttagcgagcaagtctcgccgtatgtgtgtaaaggtacaagacaagggcattacgctctcgtgatgaagacagaagctcaaaaagatgatcatgaaggtggtggtagtagtggtggagtggtggcatcatcgacggaggtgaatggtggcaacggaggaggaaagttgagccgttggaaagtggcggtggggagtgtgatagggtcagggattggagcaattctgctgggaatgttagtggtggcgatgttggtgaaggggaagaagaaagcaatgagagaagaaatggagagaagagcttatgaagaagaagctcttcaggtgtcaatggtgggtcatgttagagctcctactgctcctggaactagaactcttcctagaatttccgatgataggtataataaaaacactcatttgaatagtaattatccataattatcatttgttttctgatttttcttctttttgtgttaattgagtatcttaagataaatagttttgtagaaatagtttcaatggcttcaaaatgaaatttcatccatttttttttagtttttggttaaacggctataatcgttagttttctttttactaaaagtaaagacttttacagaatggagaattttctcttttttattttctataaaatggtcagtgaaattatgcaaaaaaatttaaaaaaatcagagagtccccccaactttcatactgtaagctttatttttttcttttcattttgatttattaatctctttttccaactttttaattaaatgtatatttctgatttagtgaagaaaatatacttttatcagtattgtgactagttaacagaattttccacctacacatcaacaagcatcttctccagtaagctattgttaatgcgaagtacggaaatataaacaaatcaccaccttcattgcaacttgcaatcaatttttactcattttagtaaggttttgtttttctttttctttcagttttttgtgatttagtttaagaaaaaataaaataaaatatagatataatttgatcaatttcttatagttgacagaaaaaaaatcttataactattgtcttttgttatatttgattggattattttttgaatatttttttggtaaattttcttttatatctttgatatttaagttttggtttatactttgtatctcaattctgtaagatatgaaactaagatttttttttttctaagattttagactttagcttattaagaaaattaaaattaatttcttataactgtataagtgtatttttctaaaatttcattgaaccatttttgactagtatatatctttttggaaaaatttctagaacatctttattatttaagtttttaggtctgtacttttgtgtctcacaattctcttagatatgaaattaaaaaaccaattaaatacaaatcagatctaatttttaatatataaaatcagcatgttttggcttgatttgtccatagatctataacatttatcaactatttttatatattgtcaacgcctgccatctaagattcttctacaagatcactagagtgttttaactgcttttagtaaaaaatgccaaaaacagacattaatccataactatttaggcccatcttcaagcccattaaaccttttcctcttaatccaacgattaagattgaatcagaagcttaaacctcacggtcctcacctgaatcacaccgcttaacttcacatgtcgttttctgtttttccttagatttcccgggaaaaaggaaataattaaaaaaaattggcaaaaaggtaaaaaagttaagttaaaaaaaccaaactacaataaaaaggacaaagagatgtttcaacaacacttcaacaaaaaagccttttgttcaatctgaagaaaaaaaaagagtcaacaaaaaaaaaaaaccaatggaagaagaagatcctacagcaagcaatgtgataacgaattcgaattcttcatctatgagaaacctatcgccggcgatg

SEQ ID NO: 19692 - DNA, 3003 bp, Unknown; identical to SEQ ID NO: 19691
  misc_feature (1)..( 3003): 2750-1469P.txt file - cDNA_ID_1822914; gDNA_ID_2926181; Annot_ID_140559

SEQ ID NO: 19693 - DNA, 3003 bp, Unknown
  misc_feature (1)..( 3003): 2750-1469P.txt file - cDNA_ID_1822947; gDNA_ID_1620683; Annot_ID_48399
aatattctgcattagctgcgccgcggaatgatttttttatgaaacaaacctttttattgttatatatccaaacaatcatcattttttagtagttgttgtcagattttttcaatagaaaatgggatttagaccaactgatgattttggtcggtttttgtcgggagaaataatcgaaaaccattaaccaactcatggttccgaaaaaaaaaacccatcaaccaactcattagaagacataagttgcttttcaaaacaatatataaacattatactacgagtctgcgaacgtttatatctgaaaactttcaaacaattaacacgcctatacataactggaatcaaactaaccattttacatttacaatatcttagttatatctcttttttttttgtccaaaagagattatgtatcataacttttttcatatgtgtgttcaattaagaatttttgaataacctttaccaaaaaaaaagaaaagaattttctcaaataaaattttagtttactcagaacctctaaaaacaagctaggtacgatctagaaacatatagtacacactatttgtgtataatacataactacagtactatatggtgagaaaagaaaggaagagtcacgagaaaactgtctgtttggcaaatgagggataatggaagggaagaagaagtactcggacatgccaggctagctagctatatataaatacacacgtatataaattatcttgtgatcagtgtgtactaatgtgtgctggaatctgtacacattcttatatgtacatatgtatttgcatgcatgtggttgtcttacacatctttatgcattgtttcagcttctgtgcgtgtttgtgtatgtgtgaccacataccgttgttacttttcatagttggcgttctcttgataagtcactgttagtgtggcaatttgacaataaaatctaaaatgttattaattataacaccccaattcaatatatatatatatacacatataagaaaatgtatgtggaaagttcaaactataatccatgagataatagaaatatagatccgaattttattatggttttacagtgatctaatatattgtagacaaaaatggtttagaaaacacttgaatgcaaatgcctaaaaaggctaaaacacatgcatcaccgatcattttgctaaaatttcagttgaaaataagatgcaatactttatttttaaaaaataaaattagagatgaattttttttgtattaattttttttaataacttttgatccttaatctctttgaaaaaaacaaaacaaaacaaaacatgtataatccctttattaccgtctggtatttatatattagactgaccggattgtggtatagtcttccaaatgtccaatactttctagaccgagctaatccaaccggatgataaagtgaatagagttcatcattcaaatgtcaaatgaactatagtctatatacatagatgcatgcatataaagagtatccaaaaagagaaataatatagaagactcaaaattggaaaaagggtcccatgttcctaacaggtaggagatatctctatcatagagaaacaatggatcgtacacgtacacgtacatctcctctcaacctgattcatacccatttttccttctctactcgtccttgatttagtctcttgggacccttctccattatatctcacatgtctctcaaacttcctgccatttcacctccttacatgtcaatttgcttcgatcaccttaattatattatgggcatgttataatgttcttatcttctaatttgtttcacagctcaacaatggagaaatttgcttcggaatcagaggcattagcatatatgttggcagaggttcttgcagaaaaatctggacaaaattcaagtttcttcaaagaaaactgtgtgagaaatacatgttatctaaggatgaaccgatatccaccttgtcccaaaccatcggaggtgtacggattaatgccacacacggacagtgatttcctcacaatcttgtatcaagatcaagtcggaggactccaacttatcaaagacaatagatggatcgctgttaaacctaatcctaaagctctcattatcaatattggtgacttatttcaggtaattgagcttttattatgtcattctaccattaccattatatcattatccggagcttacaaattagtttggtattttatgttttgatatggtttggaaggatttaaacaatttgttcatacgcatgcatgatcaataattaaaaatgtggatttcttataaagataacatctaaggcaatgtattaaaaatgtctttaaattactagattgtacttatatatgtgtttggttaggcatggagcaatggcatgtacaaaagtgttgaacaccgtgtgatgacgaacccaaaggtggagagattctcaacggcttattttatgtgtccatcatacgacgccgttatagagtgttcaagtgatcgtcctgcttatagaaatttcagcttcagagaattcagacaacaagttcaagaagatgttaagaagtttggttttaaagttggccttcctaggttccttaatcacgtctactaatttatacacccaaatttttatttttcctttataatttattttaggttttatgatttatttgaattgtttttggtttgattttttccatataatttatttttcatgtttttccttaagaaatatattgttcctcattatcaaatttaattaaaatcgattagaaaaccaattttaagttacagaggaaaaaactgaactttattaattttgaattgtacattgcaaaaaaaaaaaaaaaactcaatccgataaaaagagaaaaaaaaactaatgaaaaatatttggcatttggttttattttatgttataaaaaaatgtcagaagatattagacgaagggtcacgataaataattagaaacaaaaagaattaaaaaaaaaaaaaaaaaaaagaataaagaaatg

SEQ ID NO: 19694 - DNA, 3003 bp, Unknown; identical to SEQ ID NO: 19693
  misc_feature (1)..( 3003): 2750-1469P.txt file - cDNA_ID_1822947; gDNA_ID_1620683; Annot_ID_164546

SEQ ID NO: 19695 - DNA, 3003 bp, Unknown; identical to SEQ ID NO: 19693
  misc_feature (1)..( 3003): 2750-1469P.txt file - cDNA_ID_1822947; gDNA_ID_2926177; Annot_ID_140396

SEQ ID NO: 19696 - DNA, 3003 bp, Unknown; identical to SEQ ID NO: 19693
  misc_feature (1)..( 3003): 2750-1469P.txt file - cDNA_ID_1822947; gDNA_ID_2926177; Annot_ID_199949

SEQ ID NO: 19697 - DNA, 3003 bp, Unknown
  misc_feature (1)..( 3003): 2750-1469P.txt file - cDNA_ID_1822951; gDNA_ID_1620683; Annot_ID_48398
aataaatgaaagaaaaaagaaacataacattattaattggaggcctactggagaagtcgcgagatcgaaacaggatggcccactattgagtattgactctctagagttgtcaattgaaataagttttttttttttcctttttggtgtcgacaaaaccaattaaaataatttcaagtggtccttctcaaaattttgggtaatttgactatgttagaaaattaaaattaatacaacatttgcattaaaaaggaaatgcggcagtttgaactacaatttgcagtatttataaaactaagaaaattttgtaattcgttgattcattgtatatatatactatatagtcttgttcagtcaaacaaaaagtttattcgttgacaaaaaagaagtgatctaaagattctgattagttatatatgttactgttgaaatagttaatttcttggattaagtttattattagatttatatagtattagctcaagatttgtagataatataagtttgagttaattcatataatatatgaactcagctaagctagctcatgagatttttaacaaaaaaaaaaaaagctagctcatgagatatacactaataaattgagtttaggtgagcgaatttggtcattctaacacccttctcttgaagcaatgtataattacacagaatagtgtttgtgaagtagctctatacgtcatactacacgtattatagaaaaaaactcacaaaaagatattgtaggattaagataaagcgagagaaagaacccagaaaaactaaagtcatataaagtaattatactgaatatgatctgtggactaatcggcaaagtgccttcctaggcttagctagttaaatcatcactttcttgaatcactattttctttagttatccacgtctaagaaaaaagcgtcggtaatcccttaggcacgtttccttttgggaatggatgcaagcagcaaattgctcaaagatctttatttatttttatgacaggaagattctgcataaaaacctgaaatgattttcaaagtctataaaatttctaatattattaccatttaaaagtatatgttagactcaagttgccaaaaaaaaaaaaaaaaaaaaacgttaaagacataaaatatgagaatgaagtgttgttggtgctaaataaataggaaacaaaaaaaaaaaaaaacgagttgaggaaatgcatgcattggaataaatattcattggatgataacttcaatattatatttttggtagagttttaaaagtatatttcattataacaatttaaataattttttaaacatatgcatgacggatgttttccctatatatatatatatatatatatatatatatatatatatatattctttttaataactaattcatacgtataagaaaaaaaaacaagtgaaacatattccatattgtgtcacaactcacaacatttggagctgagccagacttaacatgttgatgttccgttcacgatcttatctcttttaccttcttttcgtgaagttgaaaacaaagcaacattttttttttgttaaggaacaaagcaacatttggataaaatgttactagcaaagcaatatttataagaattctgtaacgctttgagttatccattaccattagtaaatttacacttattttagtagagaattacaatgggtcggtatgcatcctatctttatcaaagttaatgcaattaaatttgattttttttagtattaccaccatgtttgtataattcgaagtactacgtacatgcatgcattcactgcatttgtcaaagacacagacgcaaaaaaaaaaaatgtaaacggtttcaacttttgaatgttgtttggtttcgggtttgtatatatatatatatagatgggttactatttactaaatatggtaaaaagctcatgctttcgttggtgtacaacaaataataaactaattacctcagtgaaataatacacatataatataaataaataattatgtaaacatcgacagtgcatataatgagaaagcaaagtaaaagtcgtcgtggttctttttcttggaccccaagcttctcttgcttccataagttctcttattttactaccgcttttaaactaatacgtaccaaacaatgcaacataatgtttcttttattattgggtcttatccagcgaaggaaaaggtactgattagtctgattattaataattgattacaataataaagctaaatatatactgtatattattatagtagtaataacagtacaacatagaagcaagtgaaaaacatgagaaacgaaggacggtgtccagacaagcaaatattcaaacctttgaaaatgaaacaacatcatgttctccaagacagccccaacttaatttattctaataataccaaattcattaatccccattatcgtatcttgtccaccatagatatacaaatatacacattacccatatcgcatttttctaaaatctttttgtatttaatttctacatctgttacaaatatttgacaggtgaattttgatcttagagaatcaaataaaaaaataacattacgatcttaagagtacaaatactttgattagtaaactatcccatttccaactactaattagttgctactcttatttttaacccccccatatacttatttagacgttgcaaaagaatgtgatgaatatacaaatgatgactactcattaaattgtactcccaattaatggtgagtaattaacaatgtcgatgggcggcaaacaatatattttttctttcaaatatttgttttttttttaattgtcaacatggtatgctaaaaatcaaaatgttaacaaattgcactcgtatgtaaatgcatatgcatataggtggacgtgtatataaatgtaagaaatgtgtctctcctcacaacacgtattttgataaccttcacttcccataattctctctaactcatcactctttttcttcttctgcatagatcttctcatg

SEQ ID NO: 19698 - DNA, 3003 bp, Unknown
  misc_feature (1)..( 3003): 2750-1469P.txt file - cDNA_ID_1822951; gDNA_ID_1620683; Annot_ID_164545
ataacgatgtttctgaaataccctttagcttctcagtcacagccgtcgtcgaggaggtggagcttcctgtgattgacgtcagccgtttgattgatggagccgaggaggagagagagaaatgtaaggaagcgattgcgagagcttcgagggagtggggattttttcaagtgataaaccatggaatatcaatggatgtgttggagaagatgagacaagagcaaattagggtctttagagagccttttgacaagaaaagtaagtcggagaaattttccgccgggagttaccggtggggaacgccgtcagccacttctatccggcagctttcttggtcagaagcttttcatgttcccatgacagatatttctgacaacaaggactttactactctcaggtacacaaatattgttatcaattacatttttttagaattaatttacttattaaacttaattatttgaaaaaatatgtggagaattatcccaataacaagatgtaaattaaaatacaactttacctttcttttggttaagttaccttctaaacaactagtgttttgaggattagtaagtaaattttaatgacatatataatgatacaactatagtattaattaatatcaagtttttgactataagtaacactatttgcaaagaaaattaattaattagtcaaagattagacatgggagacaaacacagtttttaattcagtatatggtggttttgaagcatataatagagtgttgtcatttatatttaattaataatagttttggatattttagaaatttaatcctagaaaataaagttgttgggcattgggtcaaagatttattccccatatctcatgcgtttctatgttttccatttttaatactatttttgaatacgtctaattttgggatagcaagttggcatgtgaaatacaatgaataaataaacaatattaagacttttcaaacaaaaataaaatattatgtatttggaaaatatataagaaataaatcttaacgtagattttttttgtttgttaaagaacaatcttaagatagttaattaaactctagctaactttttttaagatacctctaatgttgttatttattctttgattcttcgtattcgtaggaacttcgtcaacttcaaattctttaacatgctagaaaatataatggacttcttagaattaatattctgcattagctgcgccgcggaatgatttttttatgaaacaaacctttttattgttatatatccaaacaatcatcattttttagtagttgttgtcagattttttcaatagaaaatgggatttagaccaactgatgattttggtcggtttttgtcgggagaaataatcgaaaaccattaaccaactcatggttccgaaaaaaaaaacccatcaaccaactcattagaagacataagttgcttttcaaaacaatatataaacattatactacgagtctgcgaacgtttatatctgaaaactttcaaacaattaacacgcctatacataactggaatcaaactaaccattttacatttacaatatcttagttatatctcttttttttttgtccaaaagagattatgtatcataacttttttcatatgtgtgttcaattaagaatttttgaataacctttaccaaaaaaaaagaaaagaattttctcaaataaaattttagtttactcagaacctctaaaaacaagctaggtacgatctagaaacatatagtacacactatttgtgtataatacataactacagtactatatggtgagaaaagaaaggaagagtcacgagaaaactgtctgtttggcaaatgagggataatggaagggaagaagaagtactcggacatgccaggctagctagctatatataaatacacacgtatataaattatcttgtgatcagtgtgtactaatgtgtgctggaatctgtacacattcttatatgtacatatgtatttgcatgcatgtggttgtcttacacatctttatgcattgtttcagcttctgtgcgtgtttgtgtatgtgtgaccacataccgttgttacttttcatagttggcgttctcttgataagtcactgttagtgtggcaatttgacaataaaatctaaaatgttattaattataacaccccaattcaatatatatatatatacacatataagaaaatgtatgtggaaagttcaaactataatccatgagataatagaaatatagatccgaattttattatggttttacagtgatctaatatattgtagacaaaaatggtttagaaaacacttgaatgcaaatgcctaaaaaggctaaaacacatgcatcaccgatcattttgctaaaatttcagttgaaaataagatgcaatactttatttttaaaaaataaaattagagatgaattttttttgtattaattttttttaataacttttgatccttaatctctttgaaaaaaacaaaacaaaacaaaacatgtataatccctttattaccgtctggtatttatatattagactgaccggattgtggtatagtcttccaaatgtccaatactttctagaccgagctaatccaaccggatgataaagtgaatagagttcatcattcaaatgtcaaatgaactatagtctatatacatagatgcatgcatataaagagtatccaaaaagagaaataatatagaagactcaaaattggaaaaagggtcccatgttcctaacaggtaggagatatctctatcatagagaaacaatggatcgtacacgtacacgtacatctcctctcaacctgattcatacccatttttccttctctactcgtccttgatttagtctcttgggacccttctccattatatctcacatgtctctcaaacttcctgccatttcacctccttacatgtcaatttgcttcgatcaccttaattatattatgggcatgttataatgttcttatcttctaatttgtttcacagctcaacaatg

SEQ ID NO: 19699 - DNA, 3003 bp, Unknown; identical to SEQ ID NO: 19697
  misc_feature (1)..( 3003): 2750-1469P.txt file - cDNA_ID_1822951; gDNA_ID_2926177; Annot_ID_140395

SEQ ID NO: 19700 - DNA, 3003 bp, Unknown; identical to SEQ ID NO: 19698
  misc_feature (1)..( 3003): 2750-1469P.txt file - cDNA_ID_1822951; gDNA_ID_2926177; Annot_ID_199948

SEQ ID NO: 19701 - DNA, 3000 bp, Unknown
  misc_feature (1)..( 3000): 2750-1469P.txt file - cDNA_ID_1822955; gDNA_ID_1620683; Annot_ID_48397
catatatcggaaacgtgccttgggcataaggaggatacttggttcattaatatacacagattggaaaggtcacatgctctatataatcttatactagtatcttttatttatagggttgtgaatcattaataaacaaattaatatcttggccgcctacacgaaatatccatttaaaacatgaatgtgagatgttctcggtcttacggctcttcttaacattcccttctatttttttagttgatgtcttagaaaaaaactttgtttcaaatcagataattataactttgaatacaaattaaattaaataaattataattagttttgacgatttctattatgcaaattaaattaaataaatttttaactagttttgatgatttactcaagggggtattaatttatttgttttcttctaattagtttcatttttgtttggtttctctctctcaaaaagataactggtcatcaaaaatgattggcaagtgtatgtgaacattaaattaggtcgaccctaaatatataataacaccatgacatttcgaaacaacttgatggatatcagaaaatccgcaagatagcattttggtagttagatagtaaactcttggtattttcaagattcaactatccacccccactattttggtacgacgtgacgagtgaacgtctagtggttatcgctctacgaaaaaacgtttctcatttaagttctaacatgaagagtcgcaaaagaaatgtccatataaaacttacgatatttgcaggttaatcagttaatcgaacctgcaagaaccaacaatagaaaagaaaaaaatgcaataaagatatgacatccaacttcaatcatttgaactaggcgtgttaaaacaagtcgatcttaacattacaccaaaaaaagaagaaaaaaattgattttatgatacattgacacaagtgagaacgaagatatggaggtggttctggtcttgaattggtccaacaagtcgtagacaataaaaatagaaaagaaaaacaaagcatgtgatgattagaataagatccagcaaaataaccgttaccctgaaaccttgtcggctcatacgtggtgatttctacgatcacatgcaatttttggcccgagttttctcgaatgcaaatatttgcatcaaacaatgttccaattgttgtttctttcccttattaaatagcatttttcttggtacttgtgaaataaattgatcagtcaaatggttggcttcttcttctgatgacttctggaagaaaattctttgaaatgttggagaccacgtgccaacaaacactgtgtaacagaaaactaacaaacacatggtctgattttccttgaccacctctgtttcagtggtataaaatcttggtagaacaaaattttgattacagaaaaacgttatgttctgtaacattttaagagtgatgttttgtagtcaatagaatttaattgctcaactaaagcaaagcaaaactgcaaaacatatttcttgttctcgtttgtaaggacgttttaatgataacagatcatttcagaacagaccttctaacatttgcataatgtttctttgaactcagtcctttagagatgttgttatactagagattcaacattcgctaaaactgtcatggagatcgaacataagatagagaactagcagtttccaaaacagactcaatgttaaggaactttagaagtcaatggaaactaaattgtagccacaataaaatgaaaatcgtgtagctactcgccttacttccatagataaaggtgtaagaaacaattttgctgcagacctagtatttcaaaacgctaaaccctaatcaatacaagtgcaatactatgtttttcactcatttacgaggcaaaagagtatcaaaactcttctttgtggatcaatttagaaatgtgttcttttgaaatagacacacgcacatgttctttataggattattatacaacaatgctcaagtctctgcggtttcttctttccttatagctttcagtctttcttgaagtttcttgctttgttcgaaatttaccttccgcttcacagctttctgcaaatatattgtaaagatatcatctctaagaggaaaactttgaaccgaaacatacttaatcgactattagtaacttattacctcttggcggaaacatcgatcaagctttactttcagctctgtacattctccaaagaatttcccaatcggatggtctatatgacacttttgaaattcctcaattatctaccaaacatatgacaaacagaaagaattagtaagtagaacaaaacatatcaaactgatttcttttgaaaggtttgctctttccaaatgcagtcatgtagcttgtttgcaaaggcttactaaagctagagattgacacacataggagttatcacataaattgcatatattttacaaaaatctctcatctcatttgcgtacagctctaatacactgttataagattgatcttattctcaaagaagcagtcacagaggttaaaactaacagaggattgaaactacaagttgagcaaactctcacctccagacacattggatgtctatgtggtgtaagtggaggatgcatctttcacttcttctgcaagaaaaaagcaaaatctgaatcgcttgtaatggatgttaaaaatcagatcttttatttctctgctaaaaacccataaggaatttacagcaaaactaagcaaaagacccttatgttgaagaagcaaaagaaggaaagatatggtttttgtatcatactaacatttcacaagtcattctaatattctaaaatttcggatctcaatttaacatggagcagaaccacatgattttcaagagcaaatcagttcgaaaatcatcgattcgagattcaaaccaaaacctaatcgaagaagaatcacgaagaagagtaaaattaccttaatttgggtatctataagctgagagagagagaattcgtttccagctcagagaatcgatg

SEQ ID NO: 19702 - DNA, 3000 bp, Unknown; identical to SEQ ID NO: 19701
  misc_feature (1)..( 3000): 2750-1469P.txt file - cDNA_ID_1822955; gDNA_ID_2926177; Annot_ID_140394

SEQ ID NO: 19703 - DNA, 3003 bp, Unknown
  misc_feature (1)..( 3003): 2750-1469P.txt file - cDNA_ID_1822959; gDNA_ID_1620683; Annot_ID_48396
atcgcacgacaatgctcttatagaagatagcatcatcaacattgcagatggtaaagtgaagcaagaggttcaaatcaagcttcagaatgttgaatctggtgaactagaactagaaatggagtggctacctcttgagcaataaataatcaactatataatagggtcattatatataaccaaacaaattttattactgtattcattattttaacattcccccttggttcttgtttgacaaatttttgaaactttgatctcattgaaaactttctttcgtactttgttgttgtaatgttcttttggcagattagatatttgtataactcatatgattatatgttttgactcatgttcttcaaaagatttcatttgaaacctaagataagacgcttataggttactaaatcaggtttcaaacccaatctcaacatttcatcatgggatctcatagctttcttcatctccttcacacgacacaacccttgaatcataattgtaaaactcttgctgttcactgaatttatctctttcatgtactcaaacactacaactgcttcttccaccatctctttttgcctcatcataagccgatcaagaaccgcgttataagcattcacatctaaacttcctttcattttctttatcttttcatgtagtaccagtgctttctctagtttcccgcttctgcagtaacgttccatcaacaatccacatgcaaaagaatcgaaataaacctccatttccataaccgaatcaagaagcttctctgcggatttccatcttcttttcctacacatagatgctaaaacttctgatagcttgtgtgtacaaggaacaaaaccgcgctttataacatctacaagcaattcctcttcttcctctgagctattatcatctctgcaaagggcatttgcgaattcgatatagcaactctcatcaagtacagtaatacctttccgacaaatcattcgatatacatcaacagcttcttttgttctcttctttcttgacagtgcttttaacatacaaccgtatgtcgaatcccacaatctcactgtttcaccattgcaggctttacggaaaagcatctcagaggcaaacgttttccccatatcgcaaagtctttcaatgattttatcattcacagccgaatcacctaaagtaacaaactttttctccaccatcaaacagagaaccttatcaatgaactcagcatctcctaatctacatgcatcatctaatacgcaaccgtaagaacaaaaactcaactctagtttcttgtcatccatctcatgaattaaactaaacacagcatcaaactctccatttctgctataacattccacaagattagtgtaaatcttgcagctttcaacacctgtttccatcaatttaaaaacactcttggatctcccttgttcgcataaaatctgagcaatcaaatcccaagtcaactcatcagagacaatcccgtttcgaaccatggcactatacaaacacaaagccactctaaactggttttctttaaccagagaaccaagaagagagttataagcactttgagaaggtgaaagtctcaatcttctcataaaaccaaacacttccaaaccattatgatgactaccctttaaggcataatactcaagcactaagctaagcgagacagacagtgaaacttcaccttcaaaccaccgatgcatttctccaacaactaaagacacagaattggtttcaaccagaggacgcaagagcatttctgctcgttccaagagacctgattcagcagcaacttcaattactcgacaatgagacttaagatccggctcgaaccgaagatgggttttggcaaaatcgaagaaatcaagagtggttttagggcattttcgagtttcacggaggatctggaggaatacaggtgaagtaagtgttgaccttgggagcttggatttaacatattggagatgagtgatccagttacgacgttgtaagagaattgaagatatttctgtggctactcggaacagagtctgttgggttttccaatcggaagcagaggatgttgatggagtcgctgaagtcgagaatcgtttgaagaatccaacacttgtgtggataagaaccatttaggtgcttcaccaattcaaaaatctgtcctcttttttctaacaaaccccaaaatcgattcttcaaccaaaattcatcctcaaagcccaaagggtttaaggaaagttgatcaagaacaacaaaagatgaaaacttgcctgaatcttagcattgacgttcagagtgtgagttatcctctgcaggtcagtgcacagaggctcagctgcgcaagcgcttcattacccggagatcttctgcctaattcagtcaacgtcattactcaatttatcttaacagtatccaaaacgcggcgtatatgtctcattatcatcgttacgtgtcgtcttttcattcgctgtaatgattcatcaccttctcttcttcataaacctcacttcttcttcttcttcttcttcttcttcttcttcttcttcttcagtttcgcaattcgattcctaaagtcagcagttttgtttcttcagtttcttctcaaaccgatacttgatcaaggtaaaatatttcttgcttctctctcgttttgaatggtatgcaatcgaaatccaattttttcctgaattttcctttcattcgtacgttgttctttgtaaattagacaaatttttgtcttctcttgatctccttcacgtttgttctgatgtgattttaaatcgatttgtaaatcaaaatttacttctgattaatcatgttaggcctgaaatttgaaaaaatgtgaggcaaactttaatctcaatgtctgataatgcaagcataacagagcaattttgttttatgtagaatctctgattgaaagggctctttaaaataagaagaagggtctaaaagatggcagaatcagaagagaatagcgttttgtttcccattttcattttgacaatgatg

SEQ ID NO: 19704 - DNA, 3003 bp, Unknown; identical to SEQ ID NO: 19703
  misc_feature (1)..( 3003): 2750-1469P.txt file - cDNA_ID_1822959; gDNA_ID_2926177; Annot_ID_140393

SEQ ID NO: 19705 - DNA, 3003 bp, Unknown
  misc_feature (1)..( 3003): 2750-1469P.txt file - cDNA_ID_1822967; gDNA_ID_1620683; Annot_ID_48394
aagtcagtggattcatctgtaattaataaccaggtaaataatgtatctcttactgtttgagcttgcaatagaaatgttccttattctctgcattaggccggtttacatttttccattacatttttggggtacaggagcttaagtttgacgctgacagtgcaacgtacttcctggactcctttcccaagaactttgacattggaaaatatacttttgtatttaaggtattgcacttctttggttttactacacccaagacttcatataaatgtatgatgacaacatgataagcttcgttttctgcagattgtgctggatgaatcagcacatgagaaagtatacataactgaagctcaaacaaaagtgcctatagctgccacaggagctattagcattgaaaatgcagaaattgctgtacttgacagtgacattggaagcgttgaatctcagaaaaagtatgtcacctgtattgttgatgaacaacttccttttttgcttattttgattgattgctaattgcttaaccatttttcttaggaaacttgtaccattattgcttacaatatatatttcaaactttttgttgttgtgcttagtgtcttctttttgtttattggttctctctgtaacatttgtaggctagatttaactaaagatggagcggtatcattatcagcaaaccaccttcaaaagctacgcctgtcattccagttaactactccacttggcaatgcgtttaagccacaccaggtttgttcattcttgatttttcgcttcatcaatggttatattctgttctattcactttcttgacttgcttacttccatgcaggcatttttcaagctgaaacatgagtcacaggtcgagcatatctttctcgtgaaaacttctggaaagaagtctgaattagttctagttaagttccttcaacttcatttaaaattgcttttgcaaaaaaagtttaatgatcaagtttggtgaaattaatgacgtcctaaatacaatattaatggttaatgttattttcttaccttcaggattttcttggattggttgagaagctctactacctctctggtaaatatgagatacagctaaccattggagatgcttctatggtaagtactttactttcaggtccaatgcagttgatgatttatgtcttctgagatttgaacagtgttattttcctttctcttttcccaggagaactctttactgagtaatattggtcacattgaactagacctaccagagcgtccagagaaggcgactcgtcctcctctacagtctactgagccttactcaagatatgggccaaaagctgaaatatcacacatattcaggattcctgaaaagcttccagcaaagcagctctcactagttttcttgggtgttatcgttctcccattcatcggtttcctgattggggtcagtctccctttgcttgtaaatagtatccgaaaaacatcatcacatttctttcactactcatatatattttttatgtttcagcttacgcggttgggagtgaacataaagagcttcccatcgtcgactggatctgcaatatccgctttacttttccactgcggaattggagctgttttgcttctatatgtgctattctggttgaaggcaagttttcataaccgattattgtttgtttgatctacagttgaatcattgcatcaaatcacaatttctttgttttgtttgtttgcattctacagttgaatcattgcatcaaatcacaatttctttgttttgtttgtttgcattctacagttggatctattcacgactctcaaggcactttctttgttgggagtgtttctgttgttcgtgggacacagaacactatctcaacttgcatcagcatcaaacaagttgaaatctgcttgaagaagaagaactcactatgaaggatctttttttggtttatgcgtattttcagttttgtagtattgcttatagattatggtgatagacaaattcaaaagaagttcagagtttacatactctctcagtttagtcttaaaaagtaatcaagagtctctttccttagcttttttgttgaaccaaatcaactaagataatgattagctcatgattagatcacatgagtttcttaattattcacactttatgagtgtttgtggaaagttaaaaggtctaacaaaattttgaaataggctggccataaaatcgaaatgaaattttatatataaaatcaaaccgaatttcattctagtcaaaatagaaataaatgctgataaaaatgtagaaattactttgggtagaaacgagtcaacgaaggaaatgtatttggtatttgacccttaacatggcaatggcaacgttacaacttttttttttttttttttttcttgcatcgttacaacttcacaaaactttacagttgattggaaaattaaattttagaagaaaaagcacgtagttgtcttttcagacaattatttgttcatcttgaatttgtgtcccaagaacatatctctctctctctctctcctcaccttggtaagaacgtccaatccaatctataaatctccttgatggaatttccgtacatattacttgttcctttctgatctcttcttcatcggttttatgtttcatcgagtttgaatatttctttgtaagtcttttcctgtcggttatgttttcgtcgttgaaatggtttcaggaattaacaaagatcagatttttggcctttttttctcttctaaatttgaatttcgattttgggaacacgaatcgatgatgctgatgatctacaaatgggtattgaaaacgatttgttcatggttattctgcggtcgtggtttccccaaaaaagtttggtttttaaatttgcaaagcagagtttgatctctcatttaacaataccatgttctaaccatattgtgcgtgatgggtgatttctttggtctgtgaaggattctctgtttgatgattgctagttctttagaagagcaatg

SEQ ID NO: 19706 - DNA, 3003 bp, Unknown; identical to SEQ ID NO: 19705
  misc_feature (1)..( 3003): 2750-1469P.txt file - cDNA_ID_1822967; gDNA_ID_2926177; Annot_ID_140391

SEQ ID NO: 19707 - DNA, 3003 bp, Unknown
  misc_feature (1)..( 3003): 2750-1469P.txt file - cDNA_ID_1822971; gDNA_ID_1620683; Annot_ID_48393
aagcttaaaaataatcaagttaaggattctgttcattgtgtcttgctctcagcctcttttattagatatgtatctattgcaggcttttacaggtcactgtggcattgtttctagtctatgctttagagaaggaactgcagaactcttttctggttcatatgatggaacattaagtatatggaatgcagaacatagaacatatatagaatcatgttttggacaccagtctgaacttctatccattgatgctctagggagggagcgtgttctcagtgttggacgcgatagaacaatgcagttatataaggtaggtattgtggtctgtttgatttgtttgtctatatctaagcacgatttttgtttcctatcaggttcccgagtctactcggttgatctatcgagcttccgaatcaaattttgagtgctgctgttttgttaatagtgatgagtttttgtccggatcagataatggaagtattgcactttggtccattttgaaaaagaaaccagtgtttatcgttaacaatgctcaccacgtgatagctgatcatgattctgttaaccataactgtacaccagcatgttcttgggtcagttcagttgctgtctgtagaggtagcgagcttgctgcatcgggagctggtaatggttgtgtgcgtttatggggtgttgaaagtggatctagtgctatacaacctttatacgagcttccacttgtaagtttgttttcctaggtcggctcttattgctatttgtgtgttgcatctgttactgacatccaatgcttatgacctttttgcagcctgggtttgtgaactctttagcttttgcaaaatctggtcggtttctgatcgctggtgttggacaggtacacattttcctttaaccagacatatatattcgtctctgtgaatgccaatcttaactgtaactttgggtatatggcaggaaccgcggctcggaagatggggttgcttaaaatctgcgcagaacggtgttgcaatacatcccttaaggctttcatgaagggatctcaatttagattgcaacttattttagaacttcagttatgtagaggtactacagctatatttttgacatggaagggaagaaagagaacatatagaggctctaattaaacaaaatcggaaagtcccattcctgctttatgcttaaaagtcttgttttattgatcaaacaacatatacaatctgatctttacgcatagaggaactttgttttagtggtattcaaaagatcctaaagaatactagaattgataaaaatttgtggtttaagaactcagatacacaaacttgattattttaccagagatttggactcaataggtctacaaaaatagctagtgaactaaggaaacatagaagccaagaggtccctagatgaagtctaatgactacgattctctctagactagctacctcagctttcaaactatgatgatccttggagaatcgtggtctttgtagctttaggactcttgccattgcactctactggaccgggtaacaagatgcagaaaatgatatggagagcttgaagaaaatacccagaaactatgcatttgaatgaagaagcacaagcagatgcaggacatcctttcctacataacattctgctgaacttccaacacaaagctcacagaggacaaacctcaactcccatattgattaaacagttgtaatcttggtgcagaactgtagattccaagatagtctgcagttcttatctaggaatatggttttggtaaggataaaaagttataccaagtttgagctgatcatgacccagtggccttcctaaaggttagaatatatgaagagacaaatcctaaatgtatgagtgtacagtgttcatacacataatactgaaaaatgaagatttgaaagaagtatgcaaacaggcaaacacgatcaaggaaagagatacaaaagaggtttaacaagattccatttacatcctagacaacttcacctctcagaaggccgatatgaaacaatataaagtagaaaaagattaaactttcaagcttcaactaatattctatcatatagtagcaactgccagtgaccattttatttcaagtagatcacaaaaataaagacaaatgtctcaaagttatatccattgatcgaaatccaatcaacacaactaataaaacaagagaaaaccaatgacgcaaagacaaattcctctaaccttaacaagatcatctcaacttctctttaccagagctcttcctagccgcagcattcataatcctctccaaatacccttcaataggtggagtaagcgtaccgtacctcgactcaccggaaacggagtcaaatcacgcactaaagccgccttcttcaaattctccggcaatgcctcaaccgcagcgttcctcatcttcatcaaactaatctccgctacacgtctcgctctatgctctctcataagcactctactatactctttcgcaagtctaatcccatcctccactgtaaccttatactttggtaactcatcttccgtaaaaatccctaacgaaatgtaatccaatcctggagtcccaatcctcatcggcgcagtagtaactcccatcgtaaaggatccacctttcttctgaaaatcaatctctttttgcctcgctttactgattagccctagcttctctcgtctcgcttctcgctctctttccttaggtctcaggtaacgaacaggacaaggagcgtttatgcattgatctgagattcttccttttcccttatccacctcatcaccacctctgccaccgccgtttccaccgccttttttgattgtgagtttgttgcgtttcaatgattggcctgtcttcagcttcgattttcctttgggggttccactagcgtaacatttctggagaagattgtaactcactgagtcaattataggttttggtctcgcgaatctgatcattttcagattctgatttcctcagagctctctctgtttgaaatg

SEQ ID NO: 19708 - DNA, 3003 bp, Unknown; identical to SEQ ID NO: 19707
  misc_feature (1)..( 3003): 2750-1469P.txt file - cDNA_ID_1822971; gDNA_ID_2926177; Annot_ID_140390

SEQ ID NO: 19709 - DNA, 3003 bp, Unknown
  misc_feature (1)..( 3003): 2750-1469P.txt file - cDNA_ID_1822980; gDNA_ID_1620683; Annot_ID_48390
ttgacgcagaaaccctaattttccggaagcgtccttgcttgttgtttcaattgcttaattgagaatctctttggaactatgaaagtcttagaatctctcgttttggtgaaagtatcccattttgcttaatttgttcctttgtttaacgttgtgaatttgcgttgtgtagaaaatgccaaaggttaaaactaaccgagtcaagtacccagaaggatgggagttgatcgagcctactcttcgagagcttgatgccaagatgagagaaggttagtttcatataaagattttgttatatctcaataacatatgcttttgcttgtttctttttcccgtgattttgctctaactatcgtgttccttgtgcagctgagactgattcacatgatggtaagagaaagtgtgaaactttatggccaatcttcaaagtttctcatcagaggagtcggtatgtatatgacctttattaccgaagggaagaaatatctaaagagctctatgaattctgcttggaccagggctatgcagatcgcagtctgattgccaaatggaaaaaggtatgtttttatatcattcttgaattaacttctgtttgtatgcctttttagttagttgtctaaggccaaattgaagcgatttggagtttctattatgtaaaatattgttgtattagtttagagagtctagtatcgccttactgcacaatgagtcttgaagctgtttctctgaaatatatgtccttagcatatgcacttacttggaatgatctcactaacgaataggttctagaattggtattgttgctttgtttggtgaagaaataagatttctggtaattatacttcgaacaaagtgcattgcctccacgatttgccaaattttggatagttctaacttctaaccatactcccacatcttaatgatggtcactcatgaatcgtttattaacaaactcctccctgtcaattctgttgcatcttctctttgtaggttatactatccagacatatacctagatttcacttttgttttctttcattgaactaagattttgtcatttatacgtgtctctatactttgtgttaagtaactctaaaaactctctgttttgtgttttgcagtcgggatacgaacgtttatgctgcttgcgctgcatacagccaagagaccacaactatggaacaacatgtgtatgccgtgttcccaaacacttgcgtgaagagaaagtggtcgaatgcgttcactgcggctgtcaaggatgcgcgagtggcgattaaattcaacatagctttattcgctatctctgactgtttgttacaatcttgtcacttgttaaatctggattatgtattattccataaaggctaaaaaccctgactaaaaatctccttgctcttacttatcaactctgggtggtattgcaaataaaaagaacgttccggtttggtatatagttgaaacttgaaagtagaaagacgtttcccggtttggtatcttactgaattaaaagagtgttttactattcccaaaagtgtcaatttctctaaattcgtgagatttgcagcaagtttatcatgacgccgtgagttatgttttggtcaaccggtgatagaacaagatattattgaagcagaaataattattaattcttgtatttatctagacgaaacttgattgcttgatccaaggaaattgttttgacttcaaaattgtattggttctcactacagttgacctgcccctatgtttccatgtggaacaagattcttcgtcttggtcatatggattagtattatttatttctaatcttatcgtgtaatgcatgtatgatgtatgttctaaacaagatgtccaccaaggtccaaaacgagaagagatgcccattacgctcgctctagatgctttgtgaaactcgatggactttcttctctttaaactcacataacatacatacatgatccaaaatccatgatcgttctttttttttttgggttcatttttcatggtttattggaagcacaaaagaaaccaaaaataggatcacagttcttggacatcgtttaatacaaaactagaggaagtaaacattaaaaaaaaaacttgaaaaattaggggaggctaaatcattttcttgacgcgcttgtaataggaggagcaattgtggtaagtggttggtgtgaattagaacccaattatcaactaagtcgagttttgtttaaaaccaataaatttcatatacaagtttgaaactgaacatataactttttctttatatatcataattttgagtataacggatataacattttacttaaatgagaaagtactattgaattatccagaagacgtgatccgatggaaaaattcgtatcacacatgatcttttctttttatggcacaccagattttgtttacatttataattcgatttcatctttttcttagaaaaaatggtcaaagaatgcagctggtgaccaactagtgaccatacaacaagaacaaaatctcatggactctatttaaggtttccataatttaatttaccgtatcacatttccagctaattacacaaaaccgtcgataaataattgtttatagaaagaaataaatacaagaaaaacgtcaaaggatagctactataagtaaggcagactttaggaacccaaaattctgttattaatttacaaaaactaaagagtttttcacttttcagtttctcttcttaccattcactctaaaaaaacagagtctttataaaaccgatctcagattctgaatctgaatcagaatctggatcaacataattttctaacaaaaaaaatggcttcgggtggtggtgacgatgggcttcgtcggcgaggctgttcatgcacaaaagacgatttcttaccggaagaatcgttccaaagcatggggaattacctaaaagcccttaaagaaacaccgagtcggttcatggatcgtattatgactcggtcactagactccgacgagattaacgagatg

SEQ ID NO: 19710 - DNA, 3003 bp, Unknown; identical to SEQ ID NO: 19709
  misc_feature (1)..( 3003): 2750-1469P.txt file - cDNA_ID_1822980; gDNA_ID_2926177; Annot_ID_140387

SEQ ID NO: 19711 - DNA, 3000 bp, Unknown; identical to SEQ ID NO: 4098
  misc_feature (1)..( 3000): 2750-1469P.txt file - cDNA_ID_1822984; gDNA_ID_1620683; Annot_ID_48388

SEQ ID NO: 19712 - DNA, 3000 bp, Unknown; identical to SEQ ID NO: 4098
  misc_feature (1)..( 3000): 2750-1469P.txt file - cDNA_ID_1822984; gDNA_ID_1620683; Annot_ID_164532

SEQ ID NO: 19713 - DNA, 3000 bp, Unknown; identical to SEQ ID NO: 4098
  misc_feature (1)..( 3000): 2750-1469P.txt file - cDNA_ID_1822984; gDNA_ID_2926177; Annot_ID_140385

SEQ ID NO: 19714 - DNA, 3000 bp, Unknown; identical to SEQ ID NO: 4098
  misc_feature (1)..( 3000): 2750-1469P.txt file - cDNA_ID_1822984; gDNA_ID_2926177; Annot_ID_199937

SEQ ID NO: 19715 - DNA, 3003 bp, Unknown
  misc_feature (1)..( 3003): 2750-1469P.txt file - cDNA_ID_1822994; gDNA_ID_1971814; Annot_ID_58202
gtgcaatcttttgtcaaagataattagctaactagtgcagttttaaacaagacttatttatggtatctaattgatttcggttttgtgtggcaaagcaggcaactctaatggaggagcaacgaaaaagattgttgcatcaatgggcctttttggtgtggttgcaagtctgttcttttaattcaactctacaaaattctgtgtaattgttcttctcatcatttttgtttgttttcaaatctgactactcgaacatttatcgaatcaacaaaccttaactttaataattccgcttcgtcaatgttggtattaaaacctggtctgcgtaatttgacagatgtgtatagattattttttaggtttgcattggttaatgtgattatcacgtcttcatacaaatgccccacccgaaatttcatttcaatatatattatggtaagccgtacgcagatgcagatcatttaaacatatttgttactacaagggtttcaatattcttatcaatttttagtaggtctaattaagatgtccagttatatacatttaatttgaattacagtggatttaatgaaacataccaaagtacatacattcaggtcaaaggcagtgagatattttattagtagataactatactagcaaaaacaacatactgaagaagcaagctgaaatatattttggtttgcgatgaagttgtaatttgaccattcacaaatgttcttaagaaaaaacaagaattgtttcataaacaaggaaaaaaaaaaaacgcatcatcattattcattagctaacagcaagaaattgaagaagcaagttgaaatcatcatgtatgcgaaaagcttggtaagaaccatcgagcagagagttcaagtaacgaacaatcgaaatcaaatttgtgcagtggctccatctcccgtgtctcgtaattgaacagaaagagatcttttgtggtcgtgtcatggctatcactgaaatatatagtatttctatggagtccctcaacttcattggcgagcacggtgatgcctagatccaaaagcattgcctcgtcgcccaaagaatcagcaagttcatatttatcaagaaatgtccctgacgaataaaacttgtagacgttgaatgactggattctagaccaatgtcttaacattctttcaaccaagaggacatctccggttactgtgactacaagttttgtctcagcaacgcaccatgaattacttaattgacgactacgaggacttaaccactcagatctatagacatgcataaaacattgaaaggcttttcgaggaatctctccagaaaaatctaggattgtgaaaagatttctgtagctaaatgagtaaagcttgtgatccttgtaaaccatgtcaagagaatctaaaataatttctggaatttgattccacaacttatctccgttcttggcataaaccacacaccaatatccaagcccccacagagctatgtactctttggttttctcgtcaatccaaaacacaggggtacgtacggtattattacctttgaataacttaacgtggttgtgatcgtcgaaagttagaaaatcatcatctatggtttggtcaacctttaccatgccaacttgttgtgattcaatagcgggaagaccgatcttctcgtaggtgaatggattcaaaatgtatagattatactttgaatcttgcatcaggagccaacttccataggttgctagacaaacactctttgcaaattcaacaccaagatcttgcgtttggtaaagttggtctttgtcctcgggattgaaaaaaatcgtgcatgaactgtttttgttgttgtttttgtctttggggaagagcatcagccaagggatctgatttttgggcacggattgtttcgaagcagagtaccaagacgaacacaccgatttggcttgtcgaaaattagcaaagctgaggcgtttgaaaactaagttcaagagatctagaggaagatccgaccaggtattagggttttggttcttctccatgaaaacgacaatatttgagatatatagagagagttctcttatcaacaaataattatttgagtgaggagatatctctaacaaaagattttataaaccgaatagatctcggaatttcatggtttgctttgttaaaatatgggcttttgtgaaattccgaaatattggccccattaattaatcagtatatattttgttcacttggatccaataaggtgcaagacatgaagagagaaaggtaacataggtgaacgattttgttccctaaataaaggttcaattcaacaatgtgattctcacgtcttatacacaaatgctccaccataaatttcatttcattatatacctattttgacaccgaaaagagtttggaataaatatacctattttcttcttaggtctgaaatgtccagtaaaatacatttgaattacaactgatttaatcatttaatgaaacagaccattagttatacatatacacgtcaacggcattgaaattgtattagtattcgcctttcttcatatatgattagaatgaatgaactgtcgaatccatatcaatgaatatttagttttgttataatcctaataaagatatgatctggattatattaatgacacatatctttgaattgtcagggccgtccagcttatattgattttcgacattctgtccttaacaacttcttcgcaaaacattccattttatgtattaatggttttattttaaattggcttccatatatatacatgaacatgccacataaaatattcattctcaaaatgcgaagaacatgggtactggcggaagaaagctgtaagtttttaggtcaactatgtaaaacatatttaataaatagtaatcaacaatctacatgccaagactcctatataagttaatgcagtgtttaagaagtcacatacgaaaaagaaagtgagataataatccaaaaaaaaaatccatatttttgccaacgtttttagacgatcaaatg

SEQ ID NO: 19716 - DNA, 3000 bp, Unknown; identical to SEQ ID NO: 8516
  misc_feature (1)..( 3000): 2750-1469P.txt file - cDNA_ID_1823020; gDNA_ID_1971814; Annot_ID_58189

SEQ ID NO: 19717 - DNA, 3000 bp, Unknown; identical to SEQ ID NO: 8516
  misc_feature (1)..( 3000): 2750-1469P.txt file - cDNA_ID_1823020; gDNA_ID_2926180; Annot_ID_140522

SEQ ID NO: 19718 - DNA, 3000 bp, Unknown; identical to SEQ ID NO: 8515
  misc_feature (1)..( 3000): 2750-1469P.txt file - cDNA_ID_1823032; gDNA_ID_1971814; Annot_ID_58186

SEQ ID NO: 19719 - DNA, 3000 bp, Unknown; identical to SEQ ID NO: 8515
  misc_feature (1)..( 3000): 2750-1469P.txt file - cDNA_ID_1823032; gDNA_ID_2926180; Annot_ID_140519

SEQ ID NO: 19720 - DNA, 3000 bp, Unknown
  misc_feature (1)..( 3000): 2750-1469P.txt file - cDNA_ID_1823076; gDNA_ID_2926149; Annot_ID_197928
aattaattatcaaaactaccttagtatttataatgcaaattctttttttttggtttagggatttagattatcctataattgttctaatttattatacgagtccaaatccttaaaagtttaaaatgcaaatggttgacacttaaaaagtcttttttaggggattttctccttttgtttttgtaataatttgcattttcaattttggtataatgaatttgtattttcaatttgaaaatttaataaaataagttatcctttactattttaatgaatacaaaaatttataaaattaaaattaaaagaaaaaatgaaatgatttttaaaagagttgtttttaagattaaaaccaaaaacaaaacctagagacgacctatatataagctttagggttttcttctctctgtacccttaaactccgttaccctaaacctcaagccgtcgtctccaaagttccccctcagagacgaaaaaatgaagaccattttgtcctcggagactatggacatccccgacggcgtcgccattaaggtaaacgccaaggtgattgaggtcgaaggtccacgaggtaaactcactcgtgacttcaagcatctgaatctcgatttccagttgattaaagaccaagtcactggaaaacgtcagcttaagattgattcttggtttggttctcgtaagacaagtgcttcgattagaactgctttaagccatgttgataatctcattgctggtgttactcaaggttttctttatagaatgagatttgtgtatgctcattttcctatcaatgcttctattgatggtaacaataagagtattgagattcgtaacttccttggtgagaagaaggttcgtgttttgtctcttgtgtgtttgatttttgtttcagttttggtgttctgttgttggatttgtgagtgatgtgttttgtgtgaattaacaggtgaggaaggttgagatgttggatggtgttaagattgttcgatctgagaaggttaaggatgagattattcttgagggaaatgatattgagcttgtttcacggtcttgtgctttgatcaatcaggtactttctttgttggttgttctgttttaaggtttatgagttatgaaatcttgtattgagaatgaaaatttggtaactttattagattggttacttggaaatgttgttgtcttggtgctaaattgtgatgaggttgttttgcatgataaagctgcagactttgtctatgtttcctcttgcttgttctgtttgaaagattaagtgttatgaaatcttgcattgaaacttaaaaatggtaaattttatcagatgggtttctaggaaatgttgttgtcatgctaatctgtgatggttttgattgtatcgtcatgttttgcttaataaagctataggctttgtctttgtttcttattacttgttctgttttaagccttaatgttatgaattcgtgcattgagaatgaaataatggtaaatgtaccagatgggtttctttaaaatgttatagatactacggaaaaatgtgtgtaatggtgtgaatcttatttgtgattggtttgagtgtgctttgcaaactaaagctgcaaactttgactttgtaaatgctctcttattgatgatggttttgatctttgaatagaaatgtcatgtgaagaagaaggatatcaggaagtttcttgatggtatctatgtgagcgagaaaggcaagatcgcagtcgaggaatgaagttcgctattgaaagttctatattagattttatatggtgaagcagtgatattatcgtagctttttgttttacatctttcttatggatttgtagttttgtttttccttttgaatcattgatgaatgcaaattcattatccgttcatgtttggtcttttatttactctcttcttacagaagttttggagacatctttttaactctattaaactgttatatgctatatgattgatagagttaaaccatattctgtgcttaaaaccatattttgacctgttccaattgattctacttaagcttgtaaaagcttagatcctaaacatttgaatgataagaagaaacaaaaactaagagaagccattaatgagattacttgaagtaaacccaagaatggtttgatttatgcaacaacaaaacttgtaaggccttagaattgatccaataagaaaccggttactagaatattgccattcagcatctttaccttgattttctccaacaagattttctccactcatctagtgatggttttgcttatactttataaggagaagaagaagagactccacacataaaaatcctaataaatggggaccaggttatgatggttttggatccataagactccaaaaactgcctttgccttcaaggtaaacactacactccataaatttgacacttccaattctataatatatgtaatgcgtggagttatttgttacatagataaatcgtttgaacatttttttttagggcgtcaatatcactaatcaacattccttttagaatacaaaaattttctctagaaaaatatagcctatttattactctatcatctcaacatggaaaaaagtaagcaaatcttgagattgattattgaatgtccattcataaatgtatatgcatatataaggttttcatttaattcaacatggcaatgtttgtttgtatacatatggtaaaacgagtttaaaggagtctatagaagaaagtgaggttgttcttggtcaatactcctattttctctctaagtaactgttcttagctcttttttctctatagaattagagacaaatctctttttttttttaccttatttttgtttatgtttctatcttgttcaataaatcttctaacattatgattcacatttgacattccttaacaaaaaatccactatgaccatctaaagaggatttgattttgcctcttttttgtttctgtctcagtctctatcttagataaagattcagtctttgcactcaagaatg

SEQ ID NO: 19721 - DNA, 3000 bp, Unknown; identical to SEQ ID NO: 19720
  misc_feature (1)..( 3000): 2750-1469P.txt file - cDNA_ID_1823076; gDNA_ID_2926149; Annot_ID_139225

SEQ ID NO: 19722 - DNA, 3000 bp, Unknown; identical to SEQ ID NO: 19720
  misc_feature (1)..( 3000): 2750-1469P.txt file - cDNA_ID_1823076; gDNA_ID_1620685; Annot_ID_48434

SEQ ID NO: 19723 - DNA, 3000 bp, Unknown; identical to SEQ ID NO: 4148
  misc_feature (1)..( 3000): 2750-1469P.txt file - cDNA_ID_1823084; gDNA_ID_1620686; Annot_ID_48465

SEQ ID NO: 19724 - DNA, 3000 bp, Unknown; identical to SEQ ID NO: 4148
  misc_feature (1)..( 3000): 2750-1469P.txt file - cDNA_ID_1823084; gDNA_ID_2926202; Annot_ID_141560

SEQ ID NO: 19725 - DNA, 3000 bp, Unknown; identical to SEQ ID NO: 4135
  misc_feature (1)..( 3000): 2750-1469P.txt file - cDNA_ID_1823104; gDNA_ID_1620686; Annot_ID_48456

SEQ ID NO: 19726 - DNA, 3000 bp, Unknown; identical to SEQ ID NO: 4135
  misc_feature (1)..( 3000): 2750-1469P.txt file - cDNA_ID_1823104; gDNA_ID_2926202; Annot_ID_141551

SEQ ID NO: 19727 - DNA, 3000 bp, Unknown; identical to SEQ ID NO: 4134
  misc_feature (1)..( 3000): 2750-1469P.txt file - cDNA_ID_1823108; gDNA_ID_1620686; Annot_ID_48455

SEQ ID NO: 19728 - DNA, 3000 bp, Unknown; identical to SEQ ID NO: 4134
  misc_feature (1)..( 3000): 2750-1469P.txt file - cDNA_ID_1823108; gDNA_ID_1620686; Annot_ID_164613

SEQ ID NO: 19729 - DNA, 3000 bp, Unknown; identical to SEQ ID NO: 4134
  misc_feature (1)..( 3000): 2750-1469P.txt file - cDNA_ID_1823108; gDNA_ID_2926202; Annot_ID_141550

SEQ ID NO: 19730 - DNA, 3000 bp, Unknown; identical to SEQ ID NO: 4134
  misc_feature (1)..( 3000): 2750-1469P.txt file - cDNA_ID_1823108; gDNA_ID_2926202; Annot_ID_201918

SEQ ID NO: 19731 - DNA, 3000 bp, Unknown; identical to SEQ ID NO: 3023
  misc_feature (1)..( 3000): 2750-1469P.txt file - cDNA_ID_1823127; gDNA_ID_1620621; Annot_ID_47029

SEQ ID NO: 19732 - DNA, 3003 bp, Unknown
  misc_feature (1)..( 3003): 2750-1469P.txt file - cDNA_ID_1823127; gDNA_ID_1620686; Annot_ID_48449
catctgaagaagctcttgtaatcggtttagcaacacgaggagtagcagcagagacggttcgagccgtggttaccacccttggaacagacggtttctgggcggcgcgtaggttaaggtccagtgaagacgcgcttctcattatcattgttagttcttgtggggaatatttcagtggaggaagagaagagagatgaaaagatatttagactgcaaaaatatcatggagtttccggttcttgtcaagccccacactattagtcaatattatcaaattgaccccaaagttttatcatttttggttacacccttgcatcattacatgttcattcaaaacgttatcgtaatacaagaatagtaagttaatctctaactttagatacgagaacgaaactaaaagctagttagcaaataaaacattttgaaagtatttgcattatcaggccaaaaacataagtagccttttctgtaaattctacgactatcttaactagatatcatttttggggattgttcccttatttatatatatcaaatcttatcggaaaacaattgttataggcttcaggaccaccataatcgaatacccctaaagaaaatatttcaatttgattggctacggaaagacgtaagtaactggatcaaagaatttgattctgtcccacaaataagttactttttgcattcttgaacttatttccacggtcatgagtcatgaccaaaccaagacatttggatttggatatatcgaataattttgctagaattgatgagaaatgactgacaagctttgatagtatatttaatgactaattgctgatgattttttacaatgacctaacaataacggaataactatggaagttttattattcaagataaaaccagttaataagtgttcacgatacaaaaaatcgattttcatcatcagtagtataaatgtggtataactaaaaaaataaagaaattgaccataaggtgatccaaatttcctaatttcatttataaaagggcaataaatatacactaaaaatgatatggaacttgaaaaaagcaattaaactgtgtttttctgctttctttatatagtataaaaatatttttttaatgaatcatatgtacaagccttcttcctcccaaacatcaacaaggaaatgcaccatctcctgtaccaatatcatcatcaatttaaaaaaaactttcctagcaacaatgatatatactagattcaaatcctgatatgaaaatgttctaagggggataaagaatcttctgctgtaagttaattaaaattaagagttatgattagcagaaaacaactaattaaccaaatcaaatcaccttaagaggtattggttgaggaaaaagcttgtttgtgctcaataagctatcatacgtcgagttccagctgaaatcatatgaattcaaagtttcattttaacattgacgaattcagtagaccaatcctatataaacataaaaatagttcgttcaatattcgtaactgtttgtggttgtcaccttattgcaggttctggaactagacattgttgtctggttaagcattcacgccattgttgtctcgtgtggttccacaaaataagtccttttatggaaggaaatgaataagtagtagtgtatcttttagtgtatagaataactgaatgagtaataaatactgcttgcttcataacataagtttttggcatccaaaacaacctaggccttagaagttagaacattcaaaagttaccatggtttacaaattcggtagagttgcttgtgctgcattggggatcaaaaggcgggtttgaagattgggactgaatcgttatattgtggtccatatcacacgtacttgtgctccagaagtcatctgatgaagcactatctttcttcactatctttccttggattttgagtccctttgatggctcatcgacttccacaactaaacgcctttctctgttgcagcatccgaaacagtttatgctctgaaagattgaacattatgtcaatcatttgttactatggtctaatatgtttgatctacttggaaagaaatcaatttggttctccgggtcgctcacattgatgagagttttgcaatttgatcgtagagattccattagccaaaaagggagagtttggaagtaagctgccgggaattggaagaaagagcaacaacgcttcttactaaattgtgttcgtaattttagcaagaatgaataacaagaacacatagctagctaatacatgacaggacaaaagcacaatgaacatgaaagagaattaaggaaactcaaaaaagattagcaaggaagtgtagtaatatgcctcatatgacaagcaaacatatgcatttaagcacaaaaggaatccatatgttataacttacaagcaagtaaggcatattatgccgcataattacatattttaccttgatttagtacaaagtctgtctctgaactgaagcacatatatacatccacatgatttaatagaatcttgaaaagaattcaaaagaaagaaaacaaaagtttaaacaccttccaacaaagggtattgttaaaaacactcgatcattattacgttgattttatatttcttctcttcttcacgttatttacagtttttttttcatgtaaaaatgatcttttcgtttgattcctatcgtaattgtaagtaaacaaaataaattttagtattattttaagatgagacttatatagatatgaatctatgtgaattattaaatttaatgataataaataaccaaaaactttaataaaataaactgttacatattgtaaaaaaaaagatttttataaatgtttatattcaaagagagaatctttattgagtacaaaaggaggaatatatgtgatagatctaattacataatctactttacataaatagaagaagatatcgtggagtgattgatatgtgattgatctagtcagatatcatgattgatccttaacaacttatatagtagttatg

SEQ ID NO: 19733 - DNA, 3003 bp, Unknown; identical to SEQ ID NO: 19732
  misc_feature (1)..( 3003): 2750-1469P.txt file - cDNA_ID_1823127; gDNA_ID_2926202; Annot_ID_141544

SEQ ID NO: 19734 - DNA, 3003 bp, Unknown
  misc_feature (1)..( 3003): 2750-1469P.txt file - cDNA_ID_1823131; gDNA_ID_1620686; Annot_ID_48447
ttatgaaaacattattaggatatatcagttttatgaaaaaaggttttccaattgttaatcccaataataaatcatttaaaaaaatttagaaagaaaatgctgagttagaaacaaaaggaaaaggaagcacaaatggagtaaaaatgtatgaaaataaaaagataagataatgaaattttgggattagatagagatgatggagggagaaagttttgagaagcagcaagaaaggaaaggtgtcactgttgtacttggtacctctatcttaccctaatcgctggaccaacttgtctcttaataaaagtggtttttgtgtctaatctgactttgcttactctctaatcactctatctctctcagtgctaatcaagataatcataccttttttagctgttaccacttttctagtaaaggaaattgtagttacttcaattatataaatttcaatagaaaacccatcaaacttaactagttgggaacatgcatggtaggatacttattttgtctaatgctttgtattttacttatattttacggtttattacatatggatacaatattttataattcaaatcaatgatggatagtattaatatttataacaagttcatatacacattcatgtacagttatggtgttatcacacaaccgaactgagtagtttattgacttgtaatagtgtcgctactttacctttttccaaaaataatgcatgtgtgaggagttgtcgacgatgatgaaaaaatgacttatgatattcttacgaaataaatctcactaaaatttgaggtttttttttttttttttgtcgtaaaatttgaggtattaacccaacatatttggatgatgcaaataaaaactttgaaagtaacaacgttaaatagcataagacattcgttttttcactaagcaaaacagtcgtgttgtacaatttaaggtaacaaaaccgtaaaaactgaaacacatatcaagagattatttgacattttcgaactgtgttacgttcttgactccagtattcacatctagacgagacgttactgtttattgtaaccaataatgtatatatgtttggtattcttatataagtttcttattgtttttttgcattgccaaagtgttttatgtgtctcagtgatcaacatcataatttgtatcaaagtcactgatatctttcttctcaaatctagtactgcataatataattttttcttagtaaatgtgctacaattttataattgttaaacttagcgtcactcatgagtcatgaaagctgatgaccaaaatcatacaggatataatatatgttgggaagaaaagagatctggagcaacacctactaagttcgctgattagttttctaatagttacttttaagtattactaataaactattacttcctctgtagtcaacgaaataagtgtagttaactttcatttgatttcttaaaatataaactttcattatttgatttaattcttttggcctaccacaagcttttgggtgtgtacatgtgggtgcatgtatttaaatatgtaacacttgtttttttatattcataaaatgggaaatgctgtacttgcttattaattactcactatttacatattccaactttgaaatattgttgattggtgaaaaaggtacttcataataatttaactaaattgtaccatcatatattcgtctaagaaaaactcaatcttttatcattgttgatttcacacacaattccaaatttgacacgagttatataacatgatacccatattcaacaaaccactagactctatatttatctttagttttaaaaatttgtcctcaatattaaaattaaggggttggttatatatatcaagaaaaataaaaagattccatgaggtggctttaatagttctgattaaaggtgttaattaattaacaagatgaataaaaggttccatttaagagtaaagtatatgataacagtgtgggggatgatattggttcaccttaataaagcgattgcaataattttatgtataactaacgaaaagtttataccgtttgattaagaaaatgagaaggtcatgtccctctctctctctctttctcttgtatttaaatcaaaagcaatctctaaccatatccaaaatcccccctaattccgggttttctttttataacaagtattaatttggacttggttcccacttatgtttcttctttttttttgccaaccacttatgtctcttttttataatcctaaacttttcatatgttttttgaaatgtcccatctagattcagttagtggattttactcaacttgtaatacgattctactacataagatgagtgaaagagttaacatgcgcttatttttaaggttgaaaatcgcaatgtacactctctagaattatagtataaaaataaaaaaaaatctaattcagatttttgattgttacaggctaacagcaaaattaatatggatttaaaagattaatactggaaaataataataattaaaagagttttaattaaaacttcccccccccccccccctcaatcccacgattaattaaaaaaggaaaccaccgaataaccgtaattactataatgacgtggcacttagatttcgaatagccgctgtaataaatattaaaaacgttttgtcattttcctttttctcttctcaaagaaaaaaataatcactctctctttttttttttttaattcacagacagaatcaaaacttgtgtagaccgagaatccatctctcacaaaccccaaaccaaaaaaaaatcaaaaaaaaaaatcaagaacaaatcgaaatctcaactctgtgaaaacctcgtccttgttcttcttctgcttctcccattccttcgatttttgcttcaatggatgtttgatttgctctctgactgcgtttggtgagcaacaagtccgtcttagtgtttatgttttgttttcttgcctgatttttcttctttcttctctatttggttgctgtctcaaatg

SEQ ID NO: 19735 - DNA, 3003 bp, Unknown; identical to SEQ ID NO: 19734
  misc_feature (1)..( 3003): 2750-1469P.txt file - cDNA_ID_1823131; gDNA_ID_2926202; Annot_ID_141542

SEQ ID NO: 19736 - DNA, 3000 bp, Unknown; identical to SEQ ID NO: 3028
  misc_feature (1)..( 3000): 2750-1469P.txt file - cDNA_ID_1823138; gDNA_ID_1620621; Annot_ID_47033

SEQ ID NO: 19737 - DNA, 263 bp, Unknown; identical to SEQ ID NO: 4129
  misc_feature (1)..( 263): 2750-1469P.txt file - cDNA_ID_1823138; gDNA_ID_1620686; Annot_ID_48445

SEQ ID NO: 19738 - DNA, 3003 bp, Unknown
  misc_feature (1)..( 3003): 2750-1469P.txt file - cDNA_ID_1823138; gDNA_ID_2926202; Annot_ID_141540
tttatagatcatttttgcttgagaattgaagttttcattttgaaacaactctacttaagtatcttattaatgaatacgtaagaacttacaacttcaatgtttcaaaatagatttaaatatataaggaatagataatgtttttgtataattcagataagttctcgaaggaatatatatatatcaagatgtatttgaaaaaaaaaattattaaaaagtcccacatatatgtatatatatatatatagatatactgaaaatcattgagacaaaaaacattcaaaatcagtagagcttataggttataagtaaaatgacttatattattataaagaaaaagacttatagaacaaggtgagaacgtagttacatgtagtatatatatagacaatggacatacaaataaatgtgtaaatattgtgtaatgtacttataaatattggaagatgcatgtttgaggaagttgcacttaaggtttagggacgttcgtagtgagactgagacctcttgcgctgtcactgtttaggccacgacgaatcagtctgatccgttactattgccttgctgtttactaatattctttattatttataattatttaattgtttttttttaatcgtttaatgctttcacagttttattttaattataatatggaatacacttggcgattcgccaactaattcctgaataatttataattgaagatttgaatgggcgtagatgattgcgggtcattaataccaagttaactcccaactacatttttttacatttgaacaatcaatatcaattattttaaattaaactatataagcatacccctccaaataagaacctatttatgatttattgtataaaaacacaacaatatctttaagaaacagttttttttttttttgttgtcaaagtagaacatgtagttttgtactctttgttgcatataataataaaccataatatagtttgagggaagagctgaaagctaaagatgaaatgtagtttagattagtaatgatctttaagaaatagttaatgtttgaaggaaagagctgaatcttataagaaattagcatatatcatttctagattcttattctataatctatattgtatttttgtgacaaaataaaataaaacactaccagtacaatatacttgaataccggtatctatatgtataaaacacggaaaaacaagacgtaaagtggtttagcacatttgtgttaataacgttggccgttgaaaaagtttcgatctctcctaagaagatttacacataaaagtcaaaccaaacccacacgtcggtcgtgaaaaagcagtaatttggtccatttcatcaaccaggggtacttttgggatttgagtattatctccgggaaagaaagtacacgggggatacgtccaagtgccagctggcatccgtacttcgtcttcccaaaataccttaacaatcaaacacctctttctttcacacttccccacgttcctttttttttattaatatattttctccttaatctctattttcaagtgccctaatctttatagtatttgtaatctgattatttttttcgccaattaacgtgggaaagtaagttttgttttggtttataacggggaaatgtaaggttaggtattattatgttgacaaaaatttaaaggtaggaactattttccttttcttacggcaaaggtggaagaaactaaagaattagaggaagcagttctgtattgaatcatcaaccgtcaaagtagacacaataccaaaccaaatatattttcacgtttgcttatccatctttgaattccacctgaatcaaaaagaaagaaagaagagttctctaaatttcgacatttcatgataagataaacacaaatttaagaaaaaaaatagttggatgcttcaattggtattcctctaacgggcccttcatttaaagcacactagataacagagtaatagttttccttttccacatgtttcatttattaccatctatataaattatattttcaggtggaaaataaatccactatctctctaccctattttagattcaactaatggcttttactagtaatgataactcaatcggtcattttggttgcacaatatctaacaccaaccaacccatattctgatttcattagacactagataacaatttttgtttagttttcaaccattacccatatttaagaatacaagaaaaatattaactaatcttaaattaatttgtttgccttaataaattattatgcacatatttgtatgatctcaacattttatgcaatctgcaatattgatcaatttagtagatcggtcgtcttcgtctttttttctttgaaaagtcaaaagtcaaaagggtttggaaaatttaagaacatgtttggttgaaaagagaaaagactcaagtggtcggatctgtccaaaagttttgtgacggtcacaagagggaaagataaaaaggaaacggatttgaaggaaacggctcagagagatttaagacactcgcagcatctctctacttctctctctctctgtttcaacccctcttgtcgtctatctccatcaaaaagaccaaaatcaaacatcattgaatgttagacagagaggcaaaaactaatcaaagtgtttctaatccctgaaaataagcccacttcttctattttcctcatttcagtttctgggttttaatcgatctccccctttctcacccttccgtctgaattccggtctgcaatcgtcggaaagttttggactttacaccaacgccaaagcgagttcttgtttctctgtttgcttctctaggaccaatcagtttccatttacagatgcgtactattcacctgtcagagctctgagatttgtctttttgcatctctctgaatatttctcttttctcagatccattgacctcatccacatacataaagtttaggtatttttaaaagggttcaattctggggtttaccggaatttcatcatctttgaagaccatg

SEQ ID NO: 19739 - DNA, 52 bp, Unknown; identical to SEQ ID NO: 4163
  misc_feature (1)..( 52): 2750-1469P.txt file - cDNA_ID_1823142; gDNA_ID_1620687; Annot_ID_48495

SEQ ID NO: 19740 - DNA, 3000 bp, Unknown
  misc_feature (1)..( 3000): 2750-1469P.txt file - cDNA_ID_1823142; gDNA_ID_2926210; Annot_ID_141925
gtcgagggaggcactatgatcgtgatgattacagagaccgtaggtcaccaagacgcgactattcacctcgtgatgaaagaaggtctagaagagatcggtcttactctcctcatggaagaagcccagagagaagatcagagagaaggtctgagaggtcagagagaaggtatgaaccccgtggctcgagatgacctgttttcatccttttgacaaaggattcaaaaacttctctgttgatttaggttgtgtaattgatcatccttaaaatagcacaaagattctgtcaggcaacgctttgggtttcatttattttctgttgttaacgtgttattctgtcggaactctctgaagtgaaaactaaaaactgtaatagcttctctgttatgtctctactctacttgtttttgaatgaatcagaatatcttatgtgattagaatctttagattgttcgcaattttttgttaaacaaaaaggtggagataccaaattaaagcttgaaagttgaaacttaactaaaaacaaaaccccaagttgtgaccagagacaaaaataatcaatcgtatatacttgtttaattatcgaatactaacacaaacctcatcaagaattggcgtatttgtgccaacaaagcaacataagaatacatcttctagctatataaaacctagaacgtctctccttcaccatggctaaacatcctttattcctcctctccattgattctctgcaacattcttcttcccttttcctctttctcctcatctttgtcgccgatgagcattgccccataattgttctcttctctttgattacttcgtttcttcacacttttacgttattgctctttttgtgctctacggagagatgatttttcgttataaaagacaaatggaagaagaagaagaagaagcaatattaaagggaccaaatgtgaaaagagtggagaggaaaaataaaatgaaaaaagactataaatagaggagtggtggagcaatgatgatgcgatgacgttcaacatcattaagttctttcatttatttacgtattcgtaaagaaaatatattatttcattttgcatatgtacttacgcgattaaacaattccacattactacgctttatcattgttacttaaatcgtttattagtggaataattgtctttgtgtctaataccataaaagatagtactaaagtcttcatatgactagatcatcccttccgttttttaacgttaattcgtatgttacatttcaaatcatttattgtggcttattaaagatatactataatgtaaggatcggagaactaatggtgatcatgtaatgaaagacaaaacattgtcacatatattgtaattatttttggttttcgttattaattaattgttagtatcttccggattttgattcataaaccaaccaaaaacgcgtctcaggtggttttagcgtacccgacgttgcaactggcttatctttttcctacacgtgtcttcctctggttggtattatatcatacgtgtaaaatggacttttaccttaattaaccgcatcttatggtcatcaattcatttcttaagctacttttttaatttatttgtatgacttttcttatcgttacttatttgattaaacctttcttacgccatttttttttctcgacaagtatgttgcatgaattcatattggagaaaaattaaagatcaaataggattgaaattgtttggtaaaccgcatccaaaaccgcaccgcaacagtgctgtaacagtatcaaaatctctacatatacatatgtatctatgtattttcgttactatttgaaccgcactgcactttttccgcaccgcaaaatgcagtcaccattcggaccctaagtttagttataagaagggcttcttcgtaaacgcaaaagcaacgtacgtcagcatgaactggtggaagagaataaagtatctggaagaagagaaggcagtagtgaccaatcattggtacttgattggtttacgccacgtcatcacactttcctttcacagctgtataatattcccctcttcttgttttttcttgacaaaaagaataaaaatcatttttttcattttcttatttttatttcggctgatcatttttccagtttctggatacattttatgattttaattaccgaaccagatatgggatatggttataagcgtcgtcatatggatattgttgtcgccattttcattttgtctttaactttgcgaacgttgcccacttgccactttatttacttgtgttaaagtgtgtaaaataccaacaccaagcaaatatgggccacaaggcccgacaaaaatgatctgttgcgttaggattgaaatttgaaaggcctattatcatttaggctcactcgtacctcgtacgtattgctattgcctattggttgtaacaagatcaacttttatgtaattaccaatattaaacttatagtgttatacaacaaatagtgaaataaaaacaaacatgtccattaatatgtcatcatatttgtatcataagtagcaaaacataaaaaaaaatatatataaaaaagtcatcaccatccaccatcatctccttttctttttgcttcataaacatgaaaaccaccatacatttatctcgaagccaaaaaagcaaaactgtccattatccatttaaagcattacaataactaaaaaaataagagtattctcgtgacccacactcatatggaccctacataatgacgtggatgagtcctacgtgttacacaacgaaacgttcatgtcctccctggctttcaacccaaactcatacattacaccctctctctctcttctcttcaatttccgtcttctcactctctaatcttttcgcctttagttgaatctctgggatcattctacctttttgtggatttaggatcgaagaagagatcactcctactgttgaattctggttttacttgagagagtttttcaattctgatctgctgttttgcgaatg

SEQ ID NO: 19741 - DNA, 3003 bp, Unknown
  misc_feature (1)..( 3003): 2750-1469P.txt file - cDNA_ID_1823154; gDNA_ID_1620687; Annot_ID_48490
gtgctttagttagagtgatgcaagagacgagtgtaatgacttgtttcgtcttacgctcggtcttctcgttcttgtcgtcgcctaaagggttaaagactaagaatcatcatcaccacaaaggttgggggattgttatgaagcttgtgaagaaaggaatagaacatcatcaccaggagaaaagagattacgagacgggattttcttgtctcgtgcttgaagctatggaatctgagcttgggaagctcgttgtgatgatgacaagggaagatcaagaagaagagaaaaagattagtgaagaagtatctgagagggttcaatgtgcattggttagatccgaaggtgtagaggcagccatggaagagcttgaagagggacttgaaggattgttcaaggtaatgatacaagctagagtctctcttcttaacatcctctccacttaaaatggatcagattcgaatttcttggtctggattggaaataagttagttgctacttgaccagtcgattggttttaaaatcttggtttggtttttgtttgtttgttcttgtatgttgtgagagagagtttaaacatgcgtccatgttttagaggatgtgtgtttgttgtaagtgtgtaacccgttcaggtgtgaaaaactcttgtaaagttttatgtacgtaagcatctttattgcacaaataaaagaggtgtcttttaacaatattttaaaaaatttaaacaacaaaatattaatagttaaatatgaaaggtctttaattttaagacatctttttcaaaaatgtttccacaaagacacttaagacacagtgtctaaaatttaaggacacacaaacattataatgttatatacttttatatatattaattttattcgtgggaagaccctctctaatgatgtgggatggagatgacctaaatatctattattttaccacgtagaacgataaatttaaggagagaaagacgaaatgcaaaagcactaactttaatgtttagaataggataaattactgaatagtattattttttcgtaagaaaagcaatttagctatatagcatagcgttgaagtaaataattaatcaaatgtcacaattttctcaaaatgaaaaaccaaaaagaaatgggctaaaattaaagaggcaaaagtaatcatattaaaatgtcatccaaaaattacataaacaaacaaaatcatccattgatatcgagaatgtcatgaattttgctggtagacttttgacaaacctttcttagaattgataatgacaggaacttttgttaaatgacccaacttaacattttattttcttattttccttagaaaattagtcgataaatctttcactttcttttgaaataatgaaccattaaaaatagaattcagtggctaaaaatgggattgagagtgagcgccacatacggtggcagtacttcgaaagaatttatttgtcttagtttgattcacacaattctcacttaagtaggaaaccatattaaacactagtacttttacaatttagttggaggcgttaggacaaacgcaataacagcctgtaccaaaacataattctttgcattttggcgtacaaaaactaagctcattttgcttaatcgatagtggagcttcatgatgcacagatgcttcactagtggttagagattgaagattaggacaaacgcaataacaacttgtagcaaaacataactctttgcattctggcgtacaaaaaccaactccattttgtttaaccaatattgaagctttaagattcagagaagttttttcagataagagacgtttcgcctcagcaatctgaactgtcacggataccatcactacaagatataaatgtagtaaacattagtaacacaatacaattctttataaccatatcattatactacaaaaacattaattttaccagtaaaagctaaaaggatgatgaaagcagacttggatgaaaattttcccatcgtcgtagaaagattatgtttcttcttgataacttttttagacttactagaaagagttggtgaagaaaacgatgtgatatagacaatgttgtataacgttttttataggacagagaaagtgtactaatttaggaagattaatatcaaattgttgctttgtggtgaaaattaaaatgatatcgataatgagataagataagatcaaatctcctaatatggtcgacaatccaattgacaattgttacctaataagatttctactattaatgagaagatcttcaaattattcgctgtattgataaaagtttttaaaaagttagtttgactcaaaagaagcccattaccaaagcccatctaagcccattatgtaatcaatcaacaagccacggtgttgcttaggatgctgctcgttgggtttttggcaacgtgtgtaagatacaacggctatattttgacatggtccaagtccagctatcataagtcggtgtgttcttgtgggacctctaaaagagcgttactttcctaatttcagcggaccgttacatacacactcgcacacactagccttcgtcttcttctacatctctttcttcttctgtgtcagagacgctgtggtgaaaagaaaatgacggcggccgaagtagcttctgcgcagaccaagaagctcatgaagtttagtctttctctcttccgtcgtggctttaactcctctaaatggtactcaattttatttgatttgatgcttcttagattcctaaattcactcaatctgctacactgcgaagaaaaatcttgtattgaatgttttttccgtgtttgattttgggaagttggaaaaagttaggtttttttagtgtgttgatgcttcttagttctgggtattctcagtttcttaattttgtagaaaaaaacaaaaactttgatctgtgtttgagaaatttccgatctgggcttttctaagatgtaagtatctgattaaagtctgtttttttttcaatcggcaaaaagcaaaacggcggcgaagatg

SEQ ID NO: 19742 - DNA, 3003 bp, Unknown; identical to SEQ ID NO: 19741
  misc_feature (1)..( 3003): 2750-1469P.txt file - cDNA_ID_1823154; gDNA_ID_2926209; Annot_ID_141920

SEQ ID NO: 19743 - DNA, 3003 bp, Unknown
  misc_feature (1)..( 3003): 2750-1469P.txt file - cDNA_ID_1823186; gDNA_ID_1620687; Annot_ID_48479
ggtatgaaatgattttagagtctttattgtttcattctctttgaattaattcttgaaaggttttgtgtataatactgtttcttttgtaattctagataaatattttcattctatatatatttttttaaagtctatgtttacagagttgatattggtaaaaagtttgagaaagtttcatacaaaaagaggataatgatgtcgtttttcaaagattggtgaacatttgatggctctgagaagaatattttattgccaattgctattttcagatttaattatagtgggatttggacaaagtattatcttcatttcaatcatttagatcctgacaaaggtttccttttatgatcttacacattcatttttcctctgcattatttgcatgcactggaagttgtatgttttttgtttactattcattttgatgttgaatatttatataaatttatttgtactttttcacattgttgcagattaaaatggtgttaagaaataaaagttaatattaggtcctttaacaagatcttccttttcttcattgttgcaaaacattactaattcaaagaatcaacataatgtgttagataaatatatcaaatatgaaatatgaaaataataactatactatgtgttatagtaaattattaaatagtatgaaaaaatctttcacttgggtttgtcctcttcctcttcatcttttggtggagatttattaagatcgaacttggcaatacatccagattcagtcgcttcctctacttgctccacaggttccacattcaaatcaatacctgaacctctcccaccttcagatcctggcgcatcaccaccaccactgccagaaaaatcaccggaacttcttcctcctaccgctacaccaccagaacttcctcctccgacagtggcaatagtaaaagcagatcttagcccgggaatcacaaacctttcagcccccgcagagaatgtaggaggaggaagaaacccttgatagtttctatctctatgagccctcatatgcccaaacactgccttccacgaaccgaaacctcttccacagatatgacaaaccggtggtcctttcggtggatgagtcaattcctttgctttcttcttcggctttttcgcttctccttcacccaaaccatccccttcgtcatcggtttgcgtagatatccttggtctactctttttcttcccaccactcccacttccctcattcattcctttcataaccgcttcctctgccgcagccaaaatcaaccccgccgcaagaaccgcttgctcattcaaacgcgctttttctgcatcttcctcaacgacactactactctctccaaatattctactgctgatattcaaagcagggaggccgagaacaatttctctcatattggtttcttcatcgctccattgctcatcagattcctctttctcttcctcagtaacatccactttcgttttctctgggttcggattactcatactattttcgcactttagtctagggattgatgtttcaaaacgacattgaattagcccttatataaagttttctctgaaccatggcggttatgacagttaattcctctcccgccttttcgtttgaagatttgcatccgtcgtttgtgattggtccgtcctaaactctgatattacgtaaatttgggcttaatatcgtataaagcccattactagcccataagttattcgtacttggtaggttggttcaagagtttttcttgttttctgtttgtaatcgtttctcgtgcgtttttggtcatcgagattgcaagagtcgttgcaactgcactaatactattatgcatgtgacatccgacaatgacgtgacttgtaaacttttgttttgacatattttttctttatttattattacaataacattatcattttttttttttgggtggaaacattatcatttttattagccattctttatttattctatatgtttttactatttaaaatttaaacattgatgtataccggtaaacatagttttcaatgtcagaaggaagctcttgaagctatgtaataaatcacaaatacaacaaattgcaacaccaaaaaaaactaatgtaaccattgatgtgtgatatatgatatagcgaagccgcaactgtcttaaatattattttgaataatatctacacactagactctaactaaacgtttaacagttttctaaaaatgcagatataaaaagttatctaaaatatttcacatatttgaataagaaattagaaacacaatcaccttttgaccattctaaggaaattcaattacaataactatgaccagaatcatctagcctaatttttgatattctctaaattaaatatttttaaaaagcttgaccaaaaaaaaagaaatggcaagaacacttactacagagtcagcataattctcggtaacaataattcttaggaaagagagcaattcttagctctgtagtaaaacacagattaataagctaagattaagattaaagaatcaatatgttgactttaagatcttagagccgcgccttacggaggctctggctagtggtaacgagccttctttgtctgaaaaaggcaacaaaaaaaacacaaaaaaggaataataaatttgaaatgagaaagagagagccaccacacacaccacatggccaaaaaagttaccgttgggtttagacagacttagaaacaaatcgtttccttcatgatccaacggtcatcttaatcacctagccgttgctatttccttcaataataaaaaaaaataaaataaaaaaaggtagcaactttaattttaattgatttgatttaatttctctctctcgcttatttcatccccttctctgactcctactgattcattcaattgcatcagacgtatacacagagtcacagagagaagagagatccttcttcgtttgatgctcttcttcttcttctagattcttctccaggagcactatcaaatcgagtaaaataaacaatg

SEQ ID NO: 19744 - DNA, 3003 bp, Unknown; identical to SEQ ID NO: 19743
  misc_feature (1)..( 3003): 2750-1469P.txt file - cDNA_ID_1823186; gDNA_ID_1620687; Annot_ID_164653

SEQ ID NO: 19745 - DNA, 3003 bp, Unknown; identical to SEQ ID NO: 19743
  misc_feature (1)..( 3003): 2750-1469P.txt file - cDNA_ID_1823186; gDNA_ID_2926209; Annot_ID_141910

SEQ ID NO: 19746 - DNA, 3003 bp, Unknown; identical to SEQ ID NO: 19743
  misc_feature (1)..( 3003): 2750-1469P.txt file - cDNA_ID_1823186; gDNA_ID_2926209; Annot_ID_202493

SEQ ID NO: 19747 - DNA, 3003 bp, Unknown
  misc_feature (1)..( 3003): 2750-1469P.txt file - cDNA_ID_1823222; gDNA_ID_1971819; Annot_ID_58295
cttcttgtgaatctgtaatgttccttttcgttctttctcagtcagctggaaaatgaagcgaagcaaatgatgcagaccagcctatttgtagccagtgttcttggttttggacctctttcttctttttctttttgtttctacacataaattttattttaggtttgtcttgtgacattactcgcagcagtcgcagcctttgtacaaaaactaaacaaaaagcctttttgggatattgtagtacccttttgtcgttgtctcttctttgttttacatgcatctctggacaatgtagatattgagagtaaatcagaagtcaacgttcgtgtattaatttttaacatttctatttcagtgaacatactctttttaaagcttactcttattaccaagtagcaacacaacttggtcaaagactcaaaagtacatgaaatcatcatacaatccaacacttgagaacaagtggcacatacacagaaactaatatgggacgttattgggcaagtttcttatgacattactcttcactccgatcttggtacgcattgtctcgcctctcttgctcatctccttgcgcactttcatcctcaaagtctcctctttcgacggtactgtcttcagacccaggctcttgtacctgagaatttaccatttgttggaataaccttagtttaccttgccgattatctgattggatagactcggatgattaacgggtttggagaaaacaaaccttgaagataaagaggcaattatctggttgctgtcttgagaagttgggcgtggcttctgtctgtagtaacgcatgaattcacgggacccgagagttttagacgttgttgtgttctcggacttctccgtgatcaagagctcagaaccaccaacgagttctacagtattgtctgtttcaccagatacaacaatttgctttccagcttcatcaacatagctgctcaattcatatattccaaagaaaggtgcggattaagatttggcatagaacgaggaatacaggcgagaacaagaataatcagagatagaagagagttgaaacctgctgctgtagtcataaaactcttctagctcagcatcttcttcatcatcaccatcaccataatgcagtttgcaatgactctttgcttccatatgttttcttacagcttctaagctgctgaatggacggcacagctcattgcagtacagacacatgaagtctctcttgacctaaatgatgagcaatgtataagtaaacaggagtaagaatttcaaagcttgacaacaacgaacactgaatggtaaattgatgagtccaaaccttaagaccaaggtaagtgagaagcccttcaggatccttgagatactcaatatcgggaataaagaaaccatgatgcttatgcatgtgaagcatacagctctctaaggtcttatgttttttgtcacacatcaaacagcaggttggatccagctcatacttatctgcatcaccatcatcatccatatcttcagcagatccagactcattcacattcaacttagacaaagaatcagaggcttcttcagcagccaattcctcgtcagaatcaacctccacccattcatcttcactatcatcatcaatggaacccctgtgttgaacacggcgaggaagttgcctgataatcgctatatcctcctctccgttgattgatgtcccttgtgaaacccgcaaaacatggctacgcgactgaagatgctgctcatgagccttggaactcctgtaacctttagcacagattgcacaagtataaagcataggtgcttcatttgatttattcttctcctgagcaagagcagattgtctagcctcaaacaaggcttctgtaactccaggaactccagccacctaacataaaaaattacagaaatacaaagattcaaatgcctagaagtaaccaaatctatgattattgaaatccttgttccttagtagaataagcttcaaaacaaattttcatataaactctacgattccataaccttaactaaacaatttcgatagcaaaatggaaaagctgtttctcagaaactttcatctcatcaccgacgcaagattttcccgagaaacagataggcttgagttcaaattcgatagagaaagcagaagaaatgaaaccttgcgcttgagattgtagcggtgccaatcggatttgtaatgaaggttacgttcttcttcgtccttgaactccatgttacacgcgttacatgttaaaccaggcatcttctctccttcaatatcgatcgattctagaaatggaaactggagaagaaaagaaaatcagagaaaagatagttgggaggataagatttgttgttgatatgtgtagagcaacgacggctcgtaaatggatcggcgatcgtgtttgtctctaaaaaagcgtcgattgatgatgattgattgccatcaaaatgaaaaggaaggcgccccgcccattttagatccgatcgggttggaactgacccgttcctgacccgatacaagagtagcccatttggcccattcttttagcctttttgtaacactgacacagttgacgaattaagtattactgtatgagtaaccaaaaaacatttttctaatattgtttttaaaataactacttacaacttgattaattacttcgtttaatcatgtaacttttttttcttccaaattctaatctctctattaaattactgcatttataagatctaaacatcatgtgatatgttcaaaatatgaaaagagaagaatataatacatgattttactacgattaattttttttaatcgcaatgttttgtttttgcctaattttattagtggaagaaattttaaccgcaggcctgtaatttaggaaactaactattcacccccaattaaaaaaaaaaacaagaagacgacaaataacgagaaattaccaatttttcctcaacactttcattatttcctacaacgaacttctccctcctcctctcactttcaccatg

SEQ ID NO: 19748 - DNA, 3003 bp, Unknown; identical to SEQ ID NO: 19747
  misc_feature (1)..( 3003): 2750-1469P.txt file - cDNA_ID_1823222; gDNA_ID_2926200; Annot_ID_141454

SEQ ID NO: 19749 - DNA, 3000 bp, Unknown; identical to SEQ ID NO: 8585
  misc_feature (1)..( 3000): 2750-1469P.txt file - cDNA_ID_1823226; gDNA_ID_1971819; Annot_ID_58294

SEQ ID NO: 19750 - DNA, 3000 bp, Unknown; identical to SEQ ID NO: 8585
  misc_feature (1)..( 3000): 2750-1469P.txt file - cDNA_ID_1823226; gDNA_ID_2926200; Annot_ID_141453

SEQ ID NO: 19751 - DNA, 3003 bp, Unknown
  misc_feature (1)..( 3003): 2750-1469P.txt file - cDNA_ID_1823237; gDNA_ID_1971819; Annot_ID_58291
ggatgaggaggaaaattctcgtccatcttccaagcagcgaggttgtgtcttcgtacggatcacttgagaagatcttgaagaatcttgggtgggagaggtactacagtggagacaataccgatcatctgctccagttccacaagagaacttcgatcgatctcatctctctccctcgtgacttctccaagtttaactctattcacatgtatgatatcgtcgtcaagaaccctaacgtcttccatgtccgtgacatgtagtagtcaatcatccaaaacaatggttcaatatcattctccgatcatcgccgctggtgatatatctatcatgtatatatatatgcaggtttttattttgtcgttgggtgtttttgtttttggtttattttgtttttaatgcatttaatgtacgtgttttccgttcgacgtcgatcgattggggtgggttcaagctagagccattctaataacttttatcattttgtgattttaatgaaattgtatcatgttgtcaagttctcttattatggagtggatcaaaaaatatatacagtacatcaaatttcgaatgttatatgatgaaatatcataatttggtctatgatttgcatttaaataatatgatgcgtggaatttatgtaaataatttaatcaaatatactcatggaatgcaaatatacctaacatgtgaagaaaatttgttctgtcaaaaattactattatatacagcttaattagcaatttaaacaaaaactactatatatacaagggccgatagattatacaaattttcatgaaaataaaaaataaatgtgttgtttttaaaaccccaataattatcacaaataaaaactacagttgcgtttttgtattttttcaaacaacagtctactagacgtaatttttttgataataatacataacttcaattgattgatcatccatcacatatttgagtatcgatgaagtaacatgggagattaataagttagaaactttaaagtcataatcatattatctaatcgtttaagtttttttttttttgaaaccgtctggctaaaaaaacagatatgtatacaaattaaaaccatatagatagatagatatagggtaaagatactggaatacaaatgatcaattttcaagtacgaccaaaatctaaagaaggaaagtcaaaaggtgtccaattagagaagggcccccaaatgtttgggaaagacaacggataaaatgatgggcgcacgtgacattcgctacttttttacccaactttcacacgtgtcgattccctattgctcattttcccactttgtcatagattcatatgatgggcgcacgtgacacataaaatactttttaagacgcaatgtgtgggcacgtgtcgattccccattgcccattacccccacttcgtcacttccttatcgatgtcgaacaaaactttctttttcccaaataaattcgcaccatattcgggacctctttttttttttttttttttgggattttattatatagtttgtatgattttggttttctttttcttttactcgcattatgggtctaagattctggagtgcttgatttctcaagtaatatgcaggtttaatttctgcccaaagattttcagatatccgatagtccaaaatcgtttatattggtttactaagttttctttaaacattcgatattagtaaagagacgtgactaagattttggctatatcaatagaaaatgaaaaagaagttttgggcctataaacgctgactatacacacatgcttctattagagtggttcttattgtaaattggagtatcaaactatgtagattgtgtctgtcgaagctcgcaagggttagaaaaatgattgtctcgtccagataaaagcattttcttacacaagacacgaaaatgtttgcgatcaaaacttcaaatgattaagcattttataatttaatttggataacggatacatttttccaggcaaaggtaacgattatgtttggaaaatctgaatcaagatgacatcatcgtgaacataattacattttaagacggagcagaacaacgagacaaactacgaatacattgaaaaaacatatgcagatcctgctgatttatgacaagaaattaactagtttttataatcacacatggaagtactatgactactacttctacatcatttttatagtaaaagtaggagatcaaattacatgagatggtaatggatcaaagcttaccaagttaacatgcatgaagtgatttatacgtgctattgagtatcagccatactcccgtttaaagtccagtaagctacctagcgttttatgcctcaattttgtgaaagttttatggcgtgatacttctacataatacgatgcaaaagagaattaacaatgtttgtgataaagtgtagctctagccatgaagaaaaactcatgaatggaagcaaagtaaagaagtcctgctaagtaatcgtttttttaggacaagagattcattaccatctcatgtcgccacccacactttgtaattgtagtggatcggatggtataacaactaagaatacgaacctatatataaaacgtatgttttcattagtgtattgttataaaacttatacatagatttgagtattcaattaccacacgaatatgtattgtttagttgcgaacaacgttgcacctttcgtggccacacaagactttccccgatcgcagcttcttctctgcttggcgccaaatactatcacgtatcttaacaaaccaacaaaaaaaaactgcgggatgtagaaagaaacaacaaaaagttttgggtcgatttgctacagaattacatttattgtggtctttttgaagataaagttcttttagttcttgtggttggtagtcaatttatttcattttcggaaattaatatttattttagttttttcgtccaacgtaaacgtatccactctttcgcttcttctttcttctgatcatcctcccgtagctgattcatg

SEQ ID NO: 19752 - DNA, 3003 bp, Unknown; identical to SEQ ID NO: 19751
  misc_feature (1)..( 3003): 2750-1469P.txt file - cDNA_ID_1823237; gDNA_ID_2926199; Annot_ID_141450

SEQ ID NO: 19753 - DNA, 3003 bp, Unknown
  misc_feature (1)..( 3003): 2750-1469P.txt file - cDNA_ID_1823245; gDNA_ID_1971819; Annot_ID_58288
tacccacggcttaaaaaagtctttacacagagacttgaggttcaatataaccaattctttagacaaaagattggattgggttatgtttggtggatggtaaatggtacccacggcttcaaactttagtctttagattgagacttgagactgaacattgatccttcttggtaccctcggcttgaaaatatctagacatatggatcatgttcggtttcttgtttcactttttagacaatgatcaagttactcacggcttaaaacagtctttagacagagacatggggttcgaagtaaccaatcctttaaacaaaaaattggattgggttatgtttggtggaaagaagatggtacccacggcttccaacttagtctttagactgagactagagactgaacattgatccttcttggtaccctcggcttgaaaatatctagacatatggatcatgttcggtttcttgtgtcagtttttagacaaaaatcatattacccacggcttaaaaaagtctttacacagagacttgaggttcaaaataaccaattctttagacaaaagattggattggcttatgtttggtggaaggaagatggtacccacggcttcaaactttggtattaagattaagacttgagagtgaacattgatccttcttgttagccacgactttaaaatctctagacatatggatcatgttcggtttcttgtttcagtctttagacaaagatcaagttacccacggcttaagaaagtcttaagacagagacttgaggttcgaagtaaccaatcctttagacaaaagattggattgggttatgtttggtgcacggaaaatggtacccacggcttcaaacttagtctgagacttgagattcgacattgatccttcttggtacacacggcttgaaaatcactagacaaatggatcatgttcagtttcttgtttcaatctttagataaagaaacactcacggcttaaaacattataagtcattagacagagacttataattttaaacaatggaaatttggataataaacttacaagacgatgttaaactaaccggattttggatcccatcattgatcgttagcgattccaaaaattcagcttgtcttcccatcgttaagtagatttataatacaagtttctgttgatccttcttggtaccctcgacttgaaactcactacacatatggatcatgttcggtgtcttgtttcaatctttagacaaaagaatacccacggcttaaaacattatgtctttagacagagactcgaggttcgaaagtaaccaatcttttgtcaaaaagattggatttggttatgtttggtgcaaggaaaatggtacccacggctttaaactttagtctttcgagtgaactgaaacttgagattccaacattgattcttttggtacccacggcttgaatatctttagacatatggatcatgttcggtctcttgtgtcagtctttagacaaagatcaagttacccacggcttaaaatagtcagagacttgaggttcgaagtaaccaatcctttagacaaaagattggattggattggcttatgttttggttgatgaaaaatggtacccacgacttcaaactttagattgagacttgagattagaacattgatccttctttggtacccacagttcaaaaatctctagacatatggatcatgttcggtttcttgtttcagtgtttagacagagttggataataatggacgatgttgggttatgtttggataataaatttacaagaccagattttaaacaatggaaatttggataataaatttacaagacgatgttgaataaccggttttggatcccgtcattgatagttagcgattccacaaattcaacttgtttttacatcgttatgtagatttagaatacaagtttgtgttgaaaaaaaatatatacaagtttcttatttttttagaaaagattcccaaatttttccatacgtttagcatgctaccaaccttgtaagagggttcgtcgttgtgtgagattagtgtaatttgttatgggatcaggatcaaccaatcaagatttcaccaacttgctaatatgtgaaagacagacaaatagagtaacagtgaagactgaagatgatggttgtgatgtgatgaacaagttctaaaatatttaggtccaaaagatcttcccatggagcttggttgtgaaagtgctaactgagatttctccaacatgcacacattgttgcaaaagcttccccctgcattttattatacaaacaaacaaacaaaaatgtcaccataatggatgaatgtttgttcaccatgagtatgcgacttattaacatattacattttagcattactacatccaaatacttcaactatcatcatatattggaaatttggattgatggcttgagtcataaaaacctacaaaaggattggacgatacttttagtaaaatctcttaaaattgtccgcagtgaccaaaatgctaaaaagctagaaggatatacagacttttatcttactttatgtatcagaaaatcaatatttcttaataaatatgataaagtgtttcagtttattttgagtttagaaaaagccaaatgaattggaatcaaaataatgtaggtaaaaaagagaagtggaattaaaataaaatcattctatccaatcaaaacggtaagtagttgtgcgttttagaggcaaaacaccacagcgtttcgaagcacgtggatgtgtcgtgtgatacagcagtagcgcactattgggcattgagaatacataatcataacccctgcaatctaacggtcaaccttttaataacccttgtaggttaaatctctaccgtttattcgaattacttttccaaggtaagaaaaaagcaaacacaaaagggaatatcaaacaacaaaaaagtaagaaagagcggtaagacagagacggagaagaaggagaagaagattgttaagacgaaaccctgttgctgtccgtacaatg

SEQ ID NO: 19754 - DNA, 3003 bp, Unknown; identical to SEQ ID NO: 19753
  misc_feature (1)..( 3003): 2750-1469P.txt file - cDNA_ID_1823245; gDNA_ID_2926199; Annot_ID_141447

SEQ ID NO: 19755 - DNA, 3003 bp, Unknown; identical to SEQ ID NO: 16662
  misc_feature (1)..( 3003): 2750-1469P.txt file - cDNA_ID_1823252; gDNA_ID_1971819; Annot_ID_58286

SEQ ID NO: 19756 - DNA, 3003 bp, Unknown; identical to SEQ ID NO: 16662
  misc_feature (1)..( 3003): 2750-1469P.txt file - cDNA_ID_1823252; gDNA_ID_2926199; Annot_ID_141445

SEQ ID NO: 19757 - DNA, 3003 bp, Unknown
  misc_feature (1)..( 3003): 2750-1469P.txt file - cDNA_ID_1823257; gDNA_ID_1971819; Annot_ID_58283
aaatcaggtcttttttttaataataataacaaagtaagtttgttttctgagtagagaagtgtaatctttgtgtgtttcgaactttgttgtcttgtgtgttgtcctaacgagtgcctacttgtgcaccttttgaagaagattaaagctaaaacaaagtttataaactaacgtaagatcgaacaacatacgtcacatttcaacaaaatgcaaaaccttagagaaaacttgataacattcctaattccttcaccgtgggagcaaataactgaaatgtgtatcgagcttgtatttggaagatccatggacaagtaggtattgggcttgtatttggaagggccatgaggacaaatatgtattgggcttttatttggaaggtccatgaggacaaatagatattgggctttcacgttttttatctgtcgcctaacaaaacaaaaaaaaaaagtaaaaccaaaaaaaagaaaggagagaggccgacttggggtataagccagagttcttcttctttttcaagcttcttcttctcatcagtcatcaccggaatctaatttatactcgcaaaactcagcgattcgtttcgtttctgacaagtttccaattctacagcaatggatctcaatctcgatgcacctcactccatgggaacgaccatcatcggcgtcacttacaatggaggtgtcgtcctcggagccgactcacgtaccagcaccggtgagatttccccccttctctacttttctagggttttagttcctcttcgttgggtttgtatttgagttttgttttcgtttcaatcggaacaaagaataatcctaatcgattgttctatttgggtaatttagagaaagctgttaaatttgggatctgttgtaaattactcgcgcaggtatgtacgtagcgaatcgagcttctgataagattacacaactgacagataatgtctacgtctgccgctctggatcggtaataatctctcttagggatttcatttttgtttttgtttgacctgttctgctgtggaaactgtttagcttgctagacttcttattgaatctcttttgcttactgggtttcttactcgaatgtttgttgttcttgatttacttgcaaatgggatattgattacaacaagctctcttcttgttccttttgcaggctgctgattctcaagttgtatctgactatgtccgctacttccttcaccagcatacgtgagtgtcttgattgacgaagctgcatgacttgatacttatgctatcttatatatccggatgatttaataattcgttttcttatgatttgcagaattcagcatggacaacccgcaactgttaaggtttctgccaaccttatcaggatgctcgcatataataacaaggtacaagtttgcttttaagcttgccgtttggtttggttgttttaccagcaatttagactaagagtagtgaggaatgtggatgttgttccattttcttgtagagaaaacatacccatactcgactcaatcacggataacttttgtttggaagtttgaccctgggaaatatgacagtttgcttatgtttttattgctttattatgactaaagctgaaaattttggggcatagagattgatgttacatgtcaaacctaggatgctagtatttatgaatctcttgttgttcgtagtgttactgttatggttgttctctagtctaaagtacgaacactattaatggaaatgtagaaagtctctgttgtaatgctactgtatgtagtgctcaagaagtatctcagttttctatactccaaatcatatccagtttgttattgtatggtgattccttgttttgattacatggattgttaactgaaacattgtatgtctttgttgagcagaacatgctccaaactggtctcatcgttggaggatgggataaatatgagggtgggaagatctacgggatcccactcggtggaactgtagtcgagcaaccgtttgccattggaggtaaaaactatattgttatgagtcttatgatatttaggttttaacaaagatgtattcgattaattggtctttgctatttactaacttgaatggtccctttgcttctgttaacaactaatggaattgtgtgtgtttgtgtaggctctggttcgagctatctctacgggttcttcgaccaggcttggaaagataacatgaccaaagaagaagcagaggtaacgcggttcacatcactgtatctgcatatgcaaaaatctcacaaaccccatttgtataactggtcgttgctattgtatttacgcttgtgtatttatattgcagcaacttgttgtgaaggcggtttcactagccatcgcccgtgatggagccagtggtggtgtcgtacggactgtcatagtaagatctttctctgaccagaagctcgctgaagcgaaacttatgtaacctccttaatggtacttaattggcaaactgtttttgatgtttttgaacagatcaactcagagggagtgacgagaaacttttaccctggagataagttgcagctttggcacgaagaattggagccccaaaactcactcttagacattctgaacgctgctggtcctgaaccaatggccatgtgatctgcaaacaacgatcattatcttactctgttgggcaaacattttagatatttcattacagtttccagtgtctttaagactttaaactctgtttgaggttctgttgtaatgaatgacccgatctttctgttttaaacggatatcgtgtttcttatggctatggttttaattcctctgttctcgaatcgatccagtagaaatgttagccatcttctccgaaattgattttcagttcttttttagtgaccaagagtttatggtgaaaaaacatcgttcaaaatagtaatcacaaccttttatatgcttgacacgtggcgggacaagggacacttgaacttctactcagtcgcaggaactggacggagtaggagagacaaagaaggatg

SEQ ID NO: 19758 - DNA, 3003 bp, Unknown; identical to SEQ ID NO: 19757
  misc_feature (1)..( 3003): 2750-1469P.txt file - cDNA_ID_1823257; gDNA_ID_1971819; Annot_ID_176077

SEQ ID NO: 19759 - DNA, 3003 bp, Unknown; identical to SEQ ID NO: 19757
  misc_feature (1)..( 3003): 2750-1469P.txt file - cDNA_ID_1823257; gDNA_ID_2926199; Annot_ID_141442

SEQ ID NO: 19760 - DNA, 3003 bp, Unknown; identical to SEQ ID NO: 19757
  misc_feature (1)..( 3003): 2750-1469P.txt file - cDNA_ID_1823257; gDNA_ID_2926199; Annot_ID_201729

SEQ ID NO: 19761 - DNA, 3003 bp, Unknown
  misc_feature (1)..( 3003): 2750-1469P.txt file - cDNA_ID_1823261; gDNA_ID_1971819; Annot_ID_58281
aagagcaatataatcatagtgtagctcacggtagcaaagtgttctacatatatttcaactataactacaccgacaattttcgtcattctgtatcttgaagaagtgaataagtctgtctatgcactatttgttcttaagattccttaaaggcctagtttcatttagtaatggggcaagaaaaggatagtgtatagtgtacctaattcagcagagagatcaacaacgtcttgcgcttcagggtcactatcagattcagtcccagctttttcatcttggatcatcacaaccgcattgatggcttcaaaaagctcgatatcgatatcccccgggagattaagtaacttcctcttgtcactactcagggaccaataggaacgaccagtgcctcggtactgagattcccacttcttgatctgattgtaatcagacatcaaagaatcccatttcctcctgcattggtttagatttctgctaacatccaaagcgttgcagttctctgtgatcattgtccatttctggaagctagataaagcattcgaacaatcggcttcaaccgcagcgatctcattcacgaggactagacaatctttgactgcccattctggagcaacttgagaccgtgttctccgtgaacctgaagttccttcctccatccaaaaaggcttaaactgcaatttggtttaccaacctcgttaatatcatcatcatcagtaaagacattacaacataactgtgatttgaaactctaataaaacctattgtcaatgaacaataaccaaagaggtgcatcttcatgtttctgagttttgtataaatctgagaatggtaagcgatattgaaattcaggaactaaagtacacagataaactccacaaaaaatgcagctagatttttcaacattgaagaataataactcggtaccaaacaaatcagatacaaaattcaaacaagaatccagacgaacacgactggagaattccaaactggagaaagaagaaagaagaaagaagacaactttgagcataaaaaattaccagatcgccggaaactgcttctggaaaacgacacgtcgacgccaggcaagtcactttgaagtttgctccaagacgatgaggaaccgagtgaagccgaagcaaattttattgatgttatctgtcaacaggcccaaacgtttttttattgaattcggcccaaacctattttttttgtttaaatggcccaaactataattagatattgattttgaagagaaaaataatttgttgttctttgtcaaattaatagtataaatttttagacaaaaatctttactatgagtcaagcgaacccactttaacatgtagtattttactgaacatttccaaattacaagacctcatcatccaatatagaatacactcactcgcctgatgagtgatccaatcctcaaaaagcatagtaacaattataataatgcatttattccaatttgatatttgaaataaacaaagatatttttgtggagattcatctagtttttgctttctagaaatattttttatggtataattcgagaagaagcgattagtcgtgggaaacatttgatagtttagtcttatttttatgtaccagtgacgtcggtgatggcaatgtatgtatatggctttgtgtaacaaatacattctgacgtttgtgtttttgtgactgtgtctttgtttgcctcaaaattcaaattttaacactttttaaataagccaataaaaaaaaaaaggaaaacacttttttgtctttagctaccaaggtagacaaattatttgaaacttggaatattttaggaatgtgtttggcttcaaaaatagtgagatgaacaaataaattctagattttggatatatgagtttccataagaaacaaaacaaatatttcaatttatgaattagattaaaaatttcttaacatgagataccttgtttagagaacaaagatatttcttttagaaacaagcgtcttcaccggccagtcacgtgacgaatggaaaacggaacagacaaaaaatctgcagaacacaaaaaaaaaaaaaaaacatgcgtggcatgaacaatacggttcggtctccatctctctctctataaatgctcttcttcccacacatcgcctcctcctcattaagatacatctcgagaagcagagcagagagaaagagattccgagagagagagagaaggagggagagaaggagcttagtggtctcattaccattaccagctccatacgaaccgaaacgacgccgttcgctcaacccttttctctgcaatctctcttcctcccacgagtttctcagcttttctcggatcatctaattaagagaggagatcttgtctcacggtgggattgatttttctcttcacgaagatcgtgttccagggtaaagttttgatttttattcatcttactcattttggttaaagtagcttctgttctcagcgattttctctgtctcgtgtttatgtttattgtagttcaggaaatgttcttactgttctgtttgattatatgattattgcaccaaatctggctagaaaaagtcaatacctttttcccttctttctagaatttgggaacactgtttactagatttttgtctttgttccaaaagtttgttcattcatgtcatttacgggttataactgcaccaccattgctatggaacgcataacctacctagaaaatcttccttgcttttcaaaataaagaaagggagaagatttgattcttttatgaactctgagctgtcctgaagagaacccaatatttgagcttatctgtttacatttaaagaggaagtgacaatagaaacgctggtccatcgtgatttgtcttacttgtttagctcttgtcttgtctttactacatggtgcctttttctggcatttaccatccacaaaatcatgatttgtgtctaaatcttagattttgtctttttttttgtgtgtgtgtatgtacagcaattaactgcagaaaatg

SEQ ID NO: 19762 - DNA, 3003 bp, Unknown; identical to SEQ ID NO: 19761
  misc_feature (1)..( 3003): 2750-1469P.txt file - cDNA_ID_1823261; gDNA_ID_2926199; Annot_ID_141440

SEQ ID NO: 19763 - DNA, 3000 bp, Unknown; identical to SEQ ID NO: 8576
  misc_feature (1)..( 3000): 2750-1469P.txt file - cDNA_ID_1823269; gDNA_ID_1971819; Annot_ID_58279

SEQ ID NO: 19764 - DNA, 3000 bp, Unknown; identical to SEQ ID NO: 8576
  misc_feature (1)..( 3000): 2750-1469P.txt file - cDNA_ID_1823269; gDNA_ID_2926199; Annot_ID_141438

SEQ ID NO: 19765 - DNA, 3000 bp, Unknown; identical to SEQ ID NO: 8567
  misc_feature (1)..( 3000): 2750-1469P.txt file - cDNA_ID_1823275; gDNA_ID_1971819; Annot_ID_58277

SEQ ID NO: 19766 - DNA, 3000 bp, Unknown; identical to SEQ ID NO: 8567
  misc_feature (1)..( 3000): 2750-1469P.txt file - cDNA_ID_1823275; gDNA_ID_2926199; Annot_ID_141436

SEQ ID NO: 19767 - DNA, 3003 bp, Unknown
  misc_feature (1)..( 3003): 2750-1469P.txt file - cDNA_ID_1823290; gDNA_ID_1971819; Annot_ID_58273
aaacagactgaactagccattaaaagatgagaactggagaatctcatctggttgtagctcttgcactcatggatgtgtgataattcgtacttctgtgtttcctgtaagatgtataaacatcatcgtactgagttggttcgttgggatcagctgttgccccaagtcccaatctcccagatccactctttttatcggtgcttccatccgcatatgttcctgtctcggggtccacctgtagattgggaggtggaggaatgcaggcacctcctttccgctgtggactatcccgctcataattatcatagtcgtcctgtgattcagatcccatgggaccttcacttgggttgacctcacctatctctttgaagaacttagatactctctcgagtacttcagattgaggcgtatcagaaggtggtatgaccgttgggatatcaagagggctcaatggagagtaaggcacaccactaccaatctgcatctttctgaccatcccagggatcaaaccaggaggaaagagaggataaggaggcggcttctcaccagcaggtggttgggttggtggtggaacagaagcgttaagcggtatggaaccgggaaaggcaccaggaggcatcacatttgggataaattgttgggttgcgaccggattagtcagatgctctaaattcattgtgctagagacattactgtttggtggctgttgcagcattcctgtaagttcataaagataaaaagttgttggtatattgtcaagtctaaaccgaattcttcttatacataggtggagttatagtttctgtctttctcacggaagagcaggagtacctggacgttgtaaggcatgtgctgctataatgggagaatgagaaaaggtatttgcaggtggtccacttttcatctctttctcaagagaggagatggtgtcttgatcaaaaacctccttagaagcccaaaactgcaaaatcttctccaaacgtgactggttttcttccttgttttgtggaaagtggtaaatcctccccagcatggaacccaaaataggtctgaaagcaagagcttcattgtcaaactcgtgcaagtttgtccttcgttgtaaactgtatttaaggaagcaataaacatgagaaaatattagggcagaagaatctaatgttgcaacccaaaattttgaaagcacagactgagactcctaataatatagaatgaacgaaaaactagtctatgccgaagtcctctagaatgatgtaaagagcgatcagggatgaagtttagatacctgtcgaagagaatgtcattagctagataaactatgtgcatctgcctatcagaatcatccattgcaaagaccctgtctctaagtgcctctgctaaagctggtgcaaagggagatctctgcatgaaccaaatcttagcacttttaatagactctttcgtgccattaaggttgcccaagacaccatttagttccattgcaacatcagcagggagtggaccagaaagacctcggaacgcatgagttgactgatcaaaatcaggacgagcatggggcgcaaaaggatgaggctgcggaagatgctgttggagctggtggtggtcatggaatggtgggaaaggaggttggcggattggtggcacagccaatgcaccaggtacattgttcattgaaggactcatcatgggatttggcggatgatgtatcataggcattgaagatgacgggaatggaggatcaaagggtcctccagggggatgcatagagagaaagtgcttatagcggtaataaccatgaccttcacccccaaacagaaacgcataatcaggattatccttctgtctatctcgcatcatagcctcaaactcaggaccgttcttaaccgaatactcaacaagcttatcaatccgtttctgcagctctggatcagctggaggaggaggaggaggagcagaatcatacggtccagggaatggcggaggaaggtgatgtggaggtaagtgaggaaggaaagcctgaggttgctgttgaccaaacatctgtgggtgaggaggatgaggaagatgctgcggttgctgctgctgatgcataggatgctggtaagggaactgctgcatagaaggatgaggaggaatgaaaccagaagcattcattggtgatggatactgaggatgttgcggatgaaatccgaattgtggttgttgttgctgttgaaagttaggaccttgttgctgctgttgctgagcataaggtaacccagaagaagcagcataatcgtgctgtcttcgatccatgtatataaactctgtaacacttgtgttgtatagattcagctaagtgttcctgagaagattgtaaaaacaaaagctttcgaaattgggccatataattcaatacgagagaagtaattcccagaaggtaatcaatatctacgcaaagagaaacaccgaaactatacacagtgtaaattgaagagtttaacaaaaaagcgacatcgcttaagaatctgactacacgaccctaacagcaagaaaatcgagagagcgagacacaatacctagttcaatcacttactaacaaagaagaacgcaactttctgagaagaaaatagttgaatcggatggagcagaagctaaacgcacctgaagaagaaggactgaaggagagacctttactctgctgctaggatccggaagttttaattgggccacgaaaaaccgacccaaaagttttaattgggccacgaaaacccgacccgaaatctattttgactaataagagttgaccgggtaatttggcggatctacttgatcctgatttatacccgacccgagttagaaggcactaagcagataaaccccagagactgagtaaacccttaagaatttctttaccagacatctccgccattaacaagatctctcttcttctactcgatttatgataagctacggattcactcgtcggatgatttgaaagtttctgaatcaaacagagtattctcaatg

SEQ ID NO: 19768 - DNA, 3003 bp, Unknown; identical to SEQ ID NO: 19767
  misc_feature (1)..( 3003): 2750-1469P.txt file - cDNA_ID_1823290; gDNA_ID_2926199; Annot_ID_141432

SEQ ID NO: 19769 - DNA, 3000 bp, Unknown; identical to SEQ ID NO: 8565
  misc_feature (1)..( 3000): 2750-1469P.txt file - cDNA_ID_1823294; gDNA_ID_1971819; Annot_ID_58272

SEQ ID NO: 19770 - DNA, 3000 bp, Unknown; identical to SEQ ID NO: 8565
  misc_feature (1)..( 3000): 2750-1469P.txt file - cDNA_ID_1823294; gDNA_ID_1971819; Annot_ID_176068

SEQ ID NO: 19771 - DNA, 3000 bp, Unknown; identical to SEQ ID NO: 8565
  misc_feature (1)..( 3000): 2750-1469P.txt file - cDNA_ID_1823294; gDNA_ID_2926199; Annot_ID_141431

SEQ ID NO: 19772 - DNA, 3000 bp, Unknown; identical to SEQ ID NO: 8565
  misc_feature (1)..( 3000): 2750-1469P.txt file - cDNA_ID_1823294; gDNA_ID_2926199; Annot_ID_201720

SEQ ID NO: 19773 - DNA, 3000 bp, Unknown; identical to SEQ ID NO: 4186
  misc_feature (1)..( 3000): 2750-1469P.txt file - cDNA_ID_1823302; gDNA_ID_1620689; Annot_ID_48547

SEQ ID NO: 19774 - DNA, 3000 bp, Unknown; identical to SEQ ID NO: 4186
  misc_feature (1)..( 3000): 2750-1469P.txt file - cDNA_ID_1823302; gDNA_ID_1620724; Annot_ID_165885

SEQ ID NO: 19775 - DNA, 3000 bp, Unknown; identical to SEQ ID NO: 4186
  misc_feature (1)..( 3000): 2750-1469P.txt file - cDNA_ID_1823302; gDNA_ID_1620689; Annot_ID_164723

SEQ ID NO: 19776 - DNA, 3000 bp, Unknown; identical to SEQ ID NO: 4186
  misc_feature (1)..( 3000): 2750-1469P.txt file - cDNA_ID_1823302; gDNA_ID_2926184; Annot_ID_140692

SEQ ID NO: 19777 - DNA, 3000 bp, Unknown; identical to SEQ ID NO: 4186
  misc_feature (1)..( 3000): 2750-1469P.txt file - cDNA_ID_1823302; gDNA_ID_2926184; Annot_ID_200473

SEQ ID NO: 19778 - DNA, 3000 bp, Unknown; identical to SEQ ID NO: 4191
  misc_feature (1)..( 3000): 2750-1469P.txt file - cDNA_ID_1823332; gDNA_ID_1620689; Annot_ID_48536

SEQ ID NO: 19779 - DNA, 3000 bp, Unknown; identical to SEQ ID NO: 4191
  misc_feature (1)..( 3000): 2750-1469P.txt file - cDNA_ID_1823332; gDNA_ID_1620689; Annot_ID_164701

SEQ ID NO: 19780 - skipped

SEQ ID NO: 19781 - DNA, 3000 bp, Unknown; identical to SEQ ID NO: 4191
  misc_feature (1)..( 3000): 2750-1469P.txt file - cDNA_ID_1823332; gDNA_ID_2926184; Annot_ID_200460

SEQ ID NO: 19782 - DNA, 3000 bp, Unknown; identical to SEQ ID NO: 4180
  misc_feature (1)..( 3000): 2750-1469P.txt file - cDNA_ID_1823340; gDNA_ID_1620689; Annot_ID_48530

SEQ ID NO: 19783 - DNA, 3000 bp, Unknown; identical to SEQ ID NO: 4180
  misc_feature (1)..( 3000): 2750-1469P.txt file - cDNA_ID_1823340; gDNA_ID_2926182; Annot_ID_140630

SEQ ID NO: 19784 - DNA, 3000 bp, Unknown
  misc_feature (1)..( 3000): 2750-1469P.txt file - cDNA_ID_1823356; gDNA_ID_1620689; Annot_ID_48520
cgtatattaatagaacgatattgtcatattgatgatctcacaagaatacaaatagaaccgacttctttgaattcttcttctaacgtgtgaaataagcatacgtgcggtgtgtgtaaatacgcagtcacatatatgtccatcatggacgacgctccatatacatagcatttccaaattcaattaccgagaggtaacaccaaataaatcatacgatatcataaatatatatggaaatgaatttagatttgcaagagtgatcaaatcacaagcaacaaataatgaaatctaacgatcttatatatacgatgatatatatgatgtacaatgatgtgattactatattattaatttctgataagaatagatttgattaaatatggtatcacttaatatatgattaccgaaattttaaataatgaatttaatttcaacaagctacatccgaattatattcgtgacatcatgcgtagggttccacttgcactagttaatttgtatatattgttcgtatacgtatataaagttataaacaactcttatattatatgtacatgtaccgttaagcatgggatcactatatatagattgaccatttcaattttatctttctaataattggtccatattcaacaataaaaataagaacaaaaatgaaaccatgcatataccatctgcggtgaaaagtaacaaacatacactaaaaagaatccgtgatagattaatgctgcacttgttgttgttatggcatctcgtaataagttaaccaaacaagttttttccctgttagttttatcagtataaaggaattgtgtgtttacaactgaatacgttctcatattaatataggttggtccctttaattttgaaataattttaagttataacttctaaccaacaataaaaattgaaaacataaattatcacagcaacaagggatatctttattacatctttttattttcttatttttgaagaattaaacagtcatcactaatgaatttcctctgaagtcttaaggcaactctgatccgaaggtacaaataaactgttgaaattcaaattctaatactttagtatacacatatgttgagtaacttgatataattttggtattaacttttaattaaagttagttccgtacaaaggaatgctgtgtcgtacgtctcgatgcacgaattcatttttgtatataacgtggtgataagatgacattatcatactcaatataatttttggtcgactagagttattgttgtttatatacagattattgattttgattattcaatactaaagtctaaagccaataaaattatcgttattcatcttctgttaaattgctttggatttgaatatttgatgtgacatgtctccgtacgcgttttcgtgtcattactaattaatggattatatatttgttaaccaaattattgagggtaagagaaaataaactattgaaactttttttggttaaataacgtacaatatacggaaaggattgcataattacgatactaacagaaactactaatatttaaaaatatttgtgaccactcaatttaacttttacaactaaatttgctttaaacgatatgaccaagaatatgaacttactaaaccatcataaactgataaaatcgttggcgttttgattcgacctatacacttatgtcgatttcggttgtaaaaagtgattattacaagaaaatttgatgtaatggaaactaaatgaatcatagtggtagtggcagatgggttgccaactggtgatggtgaaagcggcaatagatcaatggatcaatgatattatcataaatattgttaaaataaaattcctgttttttggttaaatacatagattaaatgcccaaaaaatgaaattaatgatgtgaacaaaatgaaatgatacgatgagttgatatgaagtgtataaaacgataacctttcaaaatctggtccataatctcaagttctcaattaaccacttgtgtgtataggttgtgccctaaatattgtgcccatcccctattaacaatggcgtttgcatgcctaagttaattgggctgcttaaagactttgagaacacggtaatatagccacaccagttgtctgcattggaagccaaattatcaaaaaaaattcgcctaaactaactgactcttcaaactatccaagtgttgtcagaaacttttattccaatacattgttaaattttggcatataatattgaaatcctcgagatctcgaaagaatgtagtaatttagagagttgaatcatgctaattattgataagaaaataatcttaactcctagtgacatatataaatatgattcatgagacagattcactaatggcttcctctttctttgtaatgcctcgaactgtccatataaacctatgagtttgctatgcaattgcaagcattttgatccaaaggccgccaaaacgtcttaatgttttctcacacacattcagacgttttgacggcctcatgtgtcacatcaccaactatattggttatacaatgttctaagagatttagagaattgtgttgaagtgatataaatttagaacttgttgccaaatgagcaaatcgaaaaatgaagaactatgacgagttttaaagtattccggcaaagtctaaccactctttatgacttctcagtgatcttagctcctttagggaagttagcatgatcataatctcaaaataattggctaaacctcaaccaaccggtccataaaacggatgaatcgatttttcgtctcaaaggtaaccttgaatctaaccaaataaaatcaaaccaatctcccaaaagccgacataagagaagcaaaacccaaggatcaaaccaggtaaaaatgagaattagacaggataaattaaaccggatgatttcccggtttattctgtccactggtttatttagttgaatttcttcgtcaacgtcattcttcttccttaaaccctaatcaaaaatctcttcttcgagctatg

SEQ ID NO: 19785 - DNA, 3003 bp, Unknown
  misc_feature (1)..( 3003): 2750-1469P.txt file - cDNA_ID_1823360; gDNA_ID_1971816; Annot_ID_58244
ataacgcttagtaaacagctcggaattggatgaggtcggtctctattgaaagataagcctcggggctcagttgacacttagatcgcctcgtgatgccttttagatcgccgggaatttgattccgaggtcaacagatcggatatagctcgatctgtattttatcagtcttctgcagataaacggcagtatctccgagaaaacagaccctaacgaagtgagctggggcttgttaaaaagaggagcctcagcctatgcaatgtgcttttcaagatcatcactaagacgatggtagagcgtctgaaacctttaatgacaaatctgattggtccggctcaagctagttttatccccgggagagtaagtacggataatatagtgttcgttcaagaagcagtccattccatgagaagaaaaaaaggggtaaagggctggatgcttttgaagttggatttggagaaggcttatgataggatccgatgggattatctggaggatacacttatttctgcggggttccccgaagtttgggtaagatggataatgtgctgtgtgtcgggcccggagatgagtttgttgtggaatggagagagaacagactccttcaagccgttacaaggtcgacattcgagccgtgctggtccgtcactggagcaacttgagaggtttgcctcgaaaaaccaagctgatctggagacatgttcaggtcttcatccccaagctcgatgacgttcaaagcattgacttcgtcggacgcccttttggttaactccttaaggctgctgagttcggatgccgcaatcttcgcgcctctctgcatcagaatacctactatctcctcagcacctttggcctgattctcagcatccacctttggcccgacgaggtcctcttgctccttgagataagcctttactctatcaagacgagcttgggctttctttgtagtacgggcgaccttagaagctcgatcattccgcagtctgttgcactcccgctccccgtgctccttcgcagcaaccaacgcgacttgaagatcgctgatctctttctgaagagcagcttccggagatcgcccggagcacgtttggtgcaaggagggttgctcctgaagtgggtcgtgcggatgcttctaaacgaccgcgggtaagcgaccatagatggggctttcgttacgacgatatggctgctccctttacttctaattctgttgcttgtgctgagcttcttcgtgaaattggtcgtggctcgggtattccttcgatgcccttagacttgaaggaggagaaagttttcgccggagcggccaggaagtcgatcgaggtatgctcaccttctgggtttgattccaattttttctttgaattgcattcgcttgacacgctctttgtccaggcgatcgccgaatgggatcgtttgacttatttgtacgagcgttgtgttcggagcctttccgtagaggctactaacgcgaaagatgcccatgaggctttggccgttgaaaaggaaaaagtagctcaggcgctggccgacctggcaaggtctcaagacgacgccaaggagatgaagaggaaatatgacgagttagctggtcgcgctctttcggagatgaagaggcttcgagaacgtcgacttgaatatgctgaatttgtccggagatcggcccttgataagatggcggagctcgttcagaagcgattggatcgtattaaagctcatattgacgatacgaaggcggcagaaccaaagtttcttgaattcaaccaagtatctgggaatatcaagactctcgaggcgttggtcgaaggtggcgaagtggagatgaagtcggatgacagatgttaagattggtagcggatgcagaggaattggaggccgaggtgaaagcttttggtatcaccgatcttatggacggcgacttcgatgttcgtactttatttgccgagctgagtcctgataatcgtaattccgttccaccgccgactgaaggggaagatctcgcggatggacgaggtgagtgcgaaggccaagctggtgaaagaatcgttggtcaaactgaagttcgagacgagatcgcggatgctagagactgatattccaggaggctaagccaaagggaagaagcggagctcagatgcctaaagagatcccaatatggcaaaacaaaaaatattctaaaaactgaataatcaacgaattttatattatgtgaccaaaaaatgaaaacagaaactatgtaacaatcatcaaatacagtgttttcagcatttatttttttctaaattttccagcaacatacaaacataacgttactactagacataaaaatactccctctgttccaagttatttgatggtttggatttttttatttgttccataagattgatgttttgtaaaaattaaatatgattattaatcttgtttgttgccaatagtgaaaggagagaggtaatagtaatattattaaactattaaaatagtaattaaaattaaatagaaaagttactttttcttaatttatgtgcgaaacttaaaacatcaaacttacagagagagtaatatataacatgatatgagatgaaactgtacggtgtcgttgcataattacataaactagttataaactcacacactgccttcatttcaggtcgagacagaacttattgtgtgatttaaatcagacaaaccttcgaactttgactttttcatcgcctcctgtcccttcgccgcaaaatactagtctaaacgctcaactcctctctcctgtcttataaacttttttttttagaaaatgagatgatcaatcgaattttgttgtgtgtgacctcaaactgacaacttccagtaattgtaatattaccaattttttttatcaaaaagatgaacttcactttagagcaatagcaatccctcgagtctcccctatataaagattccaactccttaacgattcatctaatgaaaaaacacacacaccaaaaatatcagatatctcaaacaatg

SEQ ID NO: 19786 - DNA, 3003 bp, Unknown
  misc_feature (1)..( 3003): 2750-1469P.txt file - cDNA_ID_1823360; gDNA_ID_1971816; Annot_ID_58245
tgttccagtgtcgcggcgactcctactggtccaagtgccccccttgcattagcaccgccgtctctggggtaattgtgacttcaatattataaattagcagtcatatagttacatgtaaaaattacgatgagcacacacgtcggttaattttttctgtcaaatcttaaatatgtgggcaatgatcctgatactttatataaatgattgaattgagacaaaactgatagacattaaaggctagttaaaaaatactgattaaacaatgcaatattgttcttgatatatatatgtacgtatatgtatgtgacagcttcgtaggagatgtccaagaaataagggagcaataatatggtatgaccaatgtcttttaaagatatcttcagttgcctccttcaataagatagattatgagaacgatttctatttgtccaacccaaacaacatgagtgatcgggggttgttcaacaaggagacgtcggctctcctggagaagctggcatataaagcctccgatagaaacaacttggatggtaaacaattggtgttgtacgcagcaggggagaagagaattgggacaaagaaggtgtatgcaatggtgcagtgtacgaaagacttaatatttacaaagtgctttgagtgtttggaagggattttgaggaagtttccacagtgttgtgacggtaaacgaggagggagagttttcggtacgagctgtaactttaggtatgagttatatccttttcttagaaactaacagcaacaacagtacaatgagagctccatattaaatgaaagggttctagagataaacagtcttataatatacactgtgttgcattttagtacgtgaacttgagcgaataaatgtactttcctctttgtgatttttgttttttttttgtgaacttgagttattaagaggaaatcttcaagtaaagaatttatctaatagtatatacatcccacatagaataccaaatagctcagctcatacaaactctctcataatgagagaaaaaaatcctgaaataagggtaagaaaaactcttatgcctcaaggttttagtaaatctcataattttggccgaaccacaaaaagagacgtgcgaaacaaaatagtagaaaattgatttcccgaatcgacaaacatggactaaactatatgtatgatacataactggtcgtacttacaatgatgatacttggtttcacgaagacgagggagcctggagatgaatgatggtgataaggccatgtgtcatcaccaaaaggagggttgctcctgaagttttcgccggagcggccaggaagtcgatcgaggtatgctcaccttctgggtttgattccaattttttctttgaattgcattcgcttgacacgctctttgtccaggcgatcgccgaatgggatcgtttgacttatttgtacgagcgttgtgttcggagcctttccgtagaggctactaacgcgaaagatgcccatgaggctttggccgttgaaaaggaaaaagtagctcaggcgctggccgacctggcaaggtctcaagacgacgccaaggagatgaagaggaaatatgacgagttagctggtcgcgctctttcggagatgaagaggcttcgagaacgtcgacttgaatatgctgaatttgtccggagatcggcccttgataagatggcggagctcgttcagaagcgattggatcgtattaaagctcatattgacgatacgaaggcggcagaaccaaagtttcttgaattcaaccaagtatctgggaatatcaagactctcgaggcgttggtcgaaggtggcgaagtggagatgaagtcggatgacagatgttaagattggtagcggatgcagaggaattggaggccgaggtgaaagcttttggtatcaccgatcttatggacggcgacttcgatgttcgtactttatttgccgagctgagtcctgataatcgtaattccgttccaccgccgactgaaggggaagatctcgcggatggacgaggtgagtgcgaaggccaagctggtgaaagaatcgttggtcaaactgaagttcgagacgagatcgcggatgctagagactgatattccaggaggctaagccaaagggaagaagcggagctcagatgcctaaagagatcccaatatggcaaaacaaaaaatattctaaaaactgaataatcaacgaattttatattatgtgaccaaaaaatgaaaacagaaactatgtaacaatcatcaaatacagtgttttcagcatttatttttttctaaattttccagcaacatacaaacataacgttactactagacataaaaatactccctctgttccaagttatttgatggtttggatttttttatttgttccataagattgatgttttgtaaaaattaaatatgattattaatcttgtttgttgccaatagtgaaaggagagaggtaatagtaatattattaaactattaaaatagtaattaaaattaaatagaaaagttactttttcttaatttatgtgcgaaacttaaaacatcaaacttacagagagagtaatatataacatgatatgagatgaaactgtacggtgtcgttgcataattacataaactagttataaactcacacactgccttcatttcaggtcgagacagaacttattgtgtgatttaaatcagacaaaccttcgaactttgactttttcatcgcctcctgtcccttcgccgcaaaatactagtctaaacgctcaactcctctctcctgtcttataaacttttttttttagaaaatgagatgatcaatcgaattttgttgtgtgtgacctcaaactgacaacttccagtaattgtaatattaccaattttttttatcaaaaagatgaacttcactttagagcaatagcaatccctcgagtctcccctatataaagattccaactccttaacgattcatctaatgaaaaaacacacacaccaaaaatatcagatatctcaaacaatg

SEQ ID NO: 19787 - DNA, 3003 bp, Unknown; identical to SEQ ID NO: 19786
  misc_feature (1)..( 3003): 2750-1469P.txt file - cDNA_ID_1823360; gDNA_ID_1971816; Annot_ID_58246

SEQ ID NO: 19788 - DNA, 3003 bp, Unknown; identical to SEQ ID NO: 19786
  misc_feature (1)..( 3003): 2750-1469P.txt file - cDNA_ID_1823360; gDNA_ID_1971816; Annot_ID_58247

SEQ ID NO: 19789 - DNA, 3003 bp, Unknown; identical to SEQ ID NO: 19786
  misc_feature (1)..( 3003): 2750-1469P.txt file - cDNA_ID_1823360; gDNA_ID_1971816; Annot_ID_58248

SEQ ID NO: 19790 - DNA, 3003 bp, Unknown; identical to SEQ ID NO: 19786
  misc_feature (1)..( 3003): 2750-1469P.txt file - cDNA_ID_1823360; gDNA_ID_1971816; Annot_ID_58249

SEQ ID NO: 19791 - DNA, 3003 bp, Unknown; identical to SEQ ID NO: 19786
  misc_feature (1)..( 3003): 2750-1469P.txt file - cDNA_ID_1823360; gDNA_ID_1971816; Annot_ID_58250

SEQ ID NO: 19792 - DNA, 3003 bp, Unknown; identical to SEQ ID NO: 19786
  misc_feature (1)..( 3003): 2750-1469P.txt file - cDNA_ID_1823360; gDNA_ID_1971816; Annot_ID_58251

SEQ ID NO: 19793 - DNA, 3003 bp, Unknown; identical to SEQ ID NO: 19786
  misc_feature (1)..( 3003): 2750-1469P.txt file - cDNA_ID_1823360; gDNA_ID_1971816; Annot_ID_58252

SEQ ID NO: 19794 - DNA, 3003 bp, Unknown; identical to SEQ ID NO: 19786
  misc_feature (1)..( 3003): 2750-1469P.txt file - cDNA_ID_1823360; gDNA_ID_1971816; Annot_ID_58253

SEQ ID NO: 19795 - DNA, 3003 bp, Unknown
  misc_feature (1)..( 3003): 2750-1469P.txt file - cDNA_ID_1823360; gDNA_ID_1971816; Annot_ID_58254
ggtcgcgctctttcggagatgaagaggcttcgagaacgtcgacttgaatatgctgaatttgtccggagatcggcccttgataagatggcggagctcgttcagaagcgattggatcgtattaaagctcatattgacgatacgaaggcggcagaaccaaagtttcttgaattcaaccaagtatctgggaatatcaagactctcgaggcgttggtcgaaggtggcgaagtggagatgaagtcggatgacagatgttaagattggtagcggatgcagaggaattggaggccgaggtgaaagcttttggtatcaccgatcttatggacggcgacttcgatgttcgtactttatttgccgagctgagtcctgataatcgtaattccgttccaccgccgactgaaggggaagatctcgcggatggacgaggtgagtgcgaaggccaagctggtgaaagaatcgttggtcaaactgaagttcgagacgagatcgcggatgctagagactgatattccaggaggctaagccaaagggaagaagcggagctcagatgcctaaagagatcccaatatggcaaaacaaaaaatattctaaaaactgaataatcaacgaattttatattatgtgaccaaaaaatgaaaacagaaactatgtaacaatcatcaaatacagtgttttcagcatttatttttgggaaatttactagagtaacccatattttatacataatgacccaaaaggaatgctaaaaatatgagttatttgagtaataattatacctaaattatccttgttttcctttgcagagaaaaacaatattacagaaatgccattactatttaattccagcaaggcaataaaaccacatttatttacgaaaatgccatcgtcgtttttggtaaatctgtggctcttgttgcgacggatttgttatcgatcacagatttgttggtcaaccacagattttttacaacagacttgttttgtaccacagactttactttgttatgttacgccagattttttttttttcgcagattttttaaccgtgactgatttgtttcatatagtctccacagattttatttaaatttcaaaagtaagaatgttgaaaccaaatctgtcactgatttgttttccggaccacagatttttctttatggtggcaacagattttctatttgcacccaaaaatctgttgtgttataacagatttgttaacctcgaaaaatgttatataggcatgacagagttgttttgtgtaatcacagatttaattaacttgttaacaaatctggtgttttacaacagatttttgttaaaaaataaaattactacacagtcacatagtgataacagatttgtttttagtgatgacagttttgtttttcagtgtcaaagcataacagatttactcatgtcaatgttatggccgatttgtttatgactagaataacctttttagtaataacagactttttatggcagatttatttttaaaatttcgaaattttttgttatatgagatttattagctagccctcaattaaattatttccggtctgattgtatgttaaatccggtttgactgaattttttttttttttgaaaaagaaataacgttacgacagacttttattaatgtcggcagatttttacataatattgtcatatttgaattttaatgaattttattagtcatgataaattctccaagggttttcataaccgttttttttcttcttctattcctaccatcaaatcaattatttgtgaattgatacatgtcaaaatattattggtaagctaaaacaagtcaatttatcaaaattaaattgtttttctttagtatttttaaaatcaaaaacgaaatatgtgaagaagattcttctttatctaaattttgttcaaaattattcttttaaaaaaagtttgttctcacgttaactggattttcgtttttgttttaattatataatataggttttggttttcttttttatccacgatttcttttttgattttataattctgttgaaaaataatttggttttgctgatttgtcaaaattttattggtggagtgacttgtgttttaaaatataaaagatttgttttattttttattttttgttttaatttgattacaattaatcattaaggttatttcgtctttttaccaaagatatgggttactacagtttttgaaaccaaacgtgtgtcatttaagttatttatgttaagagttgagtcaatctaagcaaatcttactttatttttttctaaattttccagcaacatacaaacataacgttactactagacataaaaatactccctctgttccaagttatttgatggtttggatttttttatttgttccataagattgatgttttgtaaaaattaaatatgattattaatcttgtttgttgccaatagtgaaaggagagaggtaatagtaatattattaaactattaaaatagtaattaaaattaaatagaaaagttactttttcttaatttatgtgcgaaacttaaaacatcaaacttacagagagagtaatatataacatgatatgagatgaaactgtacggtgtcgttgcataattacataaactagttataaactcacacactgccttcatttcaggtcgagacagaacttattgtgtgatttaaatcagacaaaccttcgaactttgactttttcatcgcctcctgtcccttcgccgcaaaatactagtctaaacgctcaactcctctctcctgtcttataaacttttttttttagaaaatgagatgatcaatcgaattttgttgtgtgtgacctcaaactgacaacttccagtaattgtaatattaccaattttttttatcaaaaagatgaacttcactttagagcaatagcaatccctcgagtctcccctatataaagattccaactccttaacgattcatctaatgaaaaaacacacacaccaaaaatatcagatatctcaaacaatg

SEQ ID NO: 19796 - DNA, 3003 bp, Unknown; identical to SEQ ID NO: 19786
  misc_feature (1)..( 3003): 2750-1469P.txt file - cDNA_ID_1823360; gDNA_ID_1971816; Annot_ID_58255

SEQ ID NO: 19797 - DNA, 3003 bp, Unknown; identical to SEQ ID NO: 19786
  misc_feature (1)..( 3003): 2750-1469P.txt file - cDNA_ID_1823360; gDNA_ID_1971816; Annot_ID_58256

SEQ ID NO: 19798 - DNA, 3003 bp, Unknown
  misc_feature (1)..( 3003): 2750-1469P.txt file - cDNA_ID_1823360; gDNA_ID_1971816; Annot_ID_175991
tttatttgccgagctgagtcctgataatcgtaattccgttccaccgccgactgaaggggaagatctcgcggatggacgaggtgagtgcgaaggccaagctggtgaaagaatcgttggtcaaactgaagttcgagacgagatcgcggatgctagagactgatattccaggaggctaagccaaagggaagaagcggagctcagatgcctaaagagatcccaatatggcaaaacaaaaaatattctaaaaactgaataatcaacgaattttatattatgtgaccaaaaaatgaaaacagaaactatgtaacaatcatcaaatacagtgttttcagcatttatttttttctaaattttccagcaacatacaaacataacgttactactagacataaaaatactccctctgttccaagttatttgatggtttggatttttttatttgttccataagattgatgttttgtaaaaattaaatatgattattaatcttgtttgttgccaatagtgaaaggagagaggtaatagtaatattattaaactattaaaatagtaattaaaattaaatagaaaagttactttttcttaatttatgtgcgaaacttaaaacatcaaacttacagagagagtaatatataacatgatatgagatgaaactgtacggtgtcgttgcataattacataaactagttataaactcacacactgccttcatttcaggtcgagacagaacttattgtgtgatttaaatcagacaaaccttcgaactttgactttttcatcgcctcctgtcccttcgccgcaaaatactagtctaaacgctcaactcctctctcctgtcttataaacttttttttttagaaaatgagatgatcaatcgaattttgttgtgtgtgacctcaaactgacaacttccagtaattgtaatattaccaattttttttatcaaaaagatgaacttcactttagagcaatagcaatccctcgagtctcccctatataaagattccaactccttaacgattcatctaatgaaaaaacacacacaccaaaaatatcagatatctcaaacaatgtcttcagtttttggatctgtccatatcttggccatgatagccatacaactcctccttacacacagtgtttcatctctgaaccttaccaatgcgtatctgcaccacaaatgcagcaacactcaaggaaaatataagcaggggagcgcgttcgagaaaaatctcaacttagtcctcagtaccatcacctcgattggaaattttcgtgacggtttccgctacaccgaagaaggtgaggatcccaataacgtctttgtcatgttccagtgtcgcggcgactcctactggtccaagtgccccccttgcattagcaccgccgtctctggggtaattgtgacttcaatattataaattagcagtcatatagttacatgtaaaaattacgatgagcacacacgtcggttaattttttctgtcaaatcttaaatatgtgggcaatgatcctgatactttatataaatgattgaattgagacaaaactgatagacattaaaggctagttaaaaaatactgattaaacaatgcaatattgttcttgatatatatatgtacgtatatgtatgtgacagcttcgtaggagatgtccaagaaataagggagcaataatatggtatgaccaatgtcttttaaagatatcttcagttgcctccttcaataagatagattatgagaacgatttctatttgtccaacccaaacaacatgagtgatcgggggttgttcaacaaggagacgtcggctctcctggagaagctggcatataaagcctccgatagaaacaacttggatggtaaacaattggtgttgtacgcagcaggggagaagagaattgggacaaagaaggtgtatgcaatggtgcagtgtacgaaagacttaatatttacaaagtgctttgagtgtttggaagggattttgaggaagtttccacagtgttgtgacggtaaacgaggagggagagttttcggtacgagctgtaactttaggtatgagttatatccttttcttagaaactaacagcaacaacagtacaatgagagctccatattaaatgaaagggttctagagataaacagtcttataatatacactgtgttgcattttagtacgtgaacttgagcgaataaatgtactttcctctttgtgatttttgttttttttttgtgaacttgagttattaagaggaaatcttcaagtaaagaatttatctaatagtatatacatcccacatagaataccaaatagctcagctcatacaaactctctcataatgagagaaaaaaatcctgaaataagggtaagaaaaactcttatgcctcaaggttttagtaaatctcataattttggccgaaccacaaaaagagacgtgcgaaacaaaatagtagaaaattgatttcccgaatcgacaaacatggactaaactatatgtatgatacataactggtcgtacttacaatgatgatacttggtttcacgaagacgagggagcctggagatgaatgatggtgataaggccatgtgtcatcaccaaaaggagggttgctcctgaagttttcgccggagcggccaggaagtcgatcgaggtatgctcaccttctgggtttgattccaattttttctttgaattgcattcgcttgacacgctctttgtccaggcgatcgccgaatgggatcgtttgacttatttgtacgagcgttgtgttcggagcctttccgtagaggctactaacgcgaaagatgcccatgaggctttggccgttgaaaaggaaaaagtagctcaggcgctggccgacctggcaaggtctcaagacgacgccaaggagatgaagaggaaatatgacgagttagctggtcgcgctctttcggagatgaagaggcttcgagaacgtcgacttgaatatgctgaatttgtccggagatcggcccttgataagatg

SEQ ID NO: 19799 - DNA, 3003 bp, Unknown; identical to SEQ ID NO: 19798
  misc_feature (1)..( 3003): 2750-1469P.txt file - cDNA_ID_1823360; gDNA_ID_1971816; Annot_ID_175993

SEQ ID NO: 19800 - DNA, 3003 bp, Unknown; identical to SEQ ID NO: 19798
  misc_feature (1)..( 3003): 2750-1469P.txt file - cDNA_ID_1823360; gDNA_ID_1971816; Annot_ID_175995

SEQ ID NO: 19801 - DNA, 3003 bp, Unknown; identical to SEQ ID NO: 19798
  misc_feature (1)..( 3003): 2750-1469P.txt file - cDNA_ID_1823360; gDNA_ID_1971816; Annot_ID_175997

SEQ ID NO: 19802 - DNA, 3003 bp, Unknown; identical to SEQ ID NO: 19798
  misc_feature (1)..( 3003): 2750-1469P.txt file - cDNA_ID_1823360; gDNA_ID_1971816; Annot_ID_175999

SEQ ID NO: 19803 - DNA, 3003 bp, Unknown; identical to SEQ ID NO: 19798
  misc_feature (1)..( 3003): 2750-1469P.txt file - cDNA_ID_1823360; gDNA_ID_1971816; Annot_ID_176001

SEQ ID NO: 19804 - DNA, 3003 bp, Unknown; identical to SEQ ID NO: 19798
  misc_feature (1)..( 3003): 2750-1469P.txt file - cDNA_ID_1823360; gDNA_ID_1971816; Annot_ID_176003

SEQ ID NO: 19805 - DNA, 3003 bp, Unknown; identical to SEQ ID NO: 19798
  misc_feature (1)..( 3003): 2750-1469P.txt file - cDNA_ID_1823360; gDNA_ID_1971816; Annot_ID_176005

SEQ ID NO: 19806 - DNA, 3003 bp, Unknown; identical to SEQ ID NO: 19798
  misc_feature (1)..( 3003): 2750-1469P.txt file - cDNA_ID_1823360; gDNA_ID_1971816; Annot_ID_176007

SEQ ID NO: 19807 - DNA, 3003 bp, Unknown; identical to SEQ ID NO: 19798
  misc_feature (1)..( 3003): 2750-1469P.txt file - cDNA_ID_1823360; gDNA_ID_1971816; Annot_ID_176009

SEQ ID NO: 19808 - DNA, 3003 bp, Unknown
  misc_feature (1)..( 3003): 2750-1469P.txt file - cDNA_ID_1823360; gDNA_ID_1971816; Annot_ID_176011
tctcacgttaactggattttcgtttttgttttaattatataatataggttttggttttcttttttatccacgatttcttttttgattttataattctgttgaaaaataatttggttttgctgatttgtcaaaattttattggtggagtgacttgtgttttaaaatataaaagatttgttttattttttattttttgttttaatttgattacaattaatcattaaggttatttcgtctttttaccaaagatatgggttactacagtttttgaaaccaaacgtgtgtcatttaagttatttatgttaagagttgagtcaatctaagcaaatcttactttatttttttctaaattttccagcaacatacaaacataacgttactactagacataaaaatactccctctgttccaagttatttgatggtttggatttttttatttgttccataagattgatgttttgtaaaaattaaatatgattattaatcttgtttgttgccaatagtgaaaggagagaggtaatagtaatattattaaactattaaaatagtaattaaaattaaatagaaaagttactttttcttaatttatgtgcgaaacttaaaacatcaaacttacagagagagtaatatataacatgatatgagatgaaactgtacggtgtcgttgcataattacataaactagttataaactcacacactgccttcatttcaggtcgagacagaacttattgtgtgatttaaatcagacaaaccttcgaactttgactttttcatcgcctcctgtcccttcgccgcaaaatactagtctaaacgctcaactcctctctcctgtcttataaacttttttttttagaaaatgagatgatcaatcgaattttgttgtgtgtgacctcaaactgacaacttccagtaattgtaatattaccaattttttttatcaaaaagatgaacttcactttagagcaatagcaatccctcgagtctcccctatataaagattccaactccttaacgattcatctaatgaaaaaacacacacaccaaaaatatcagatatctcaaacaatgtcttcagtttttggatctgtccatatcttggccatgatagccatacaactcctccttacacacagtgtttcatctctgaaccttaccaatgcgtatctgcaccacaaatgcagcaacactcaaggaaaatataagcaggggagcgcgttcgagaaaaatctcaacttagtcctcagtaccatcacctcgattggaaattttcgtgacggtttccgctacaccgaagaaggtgaggatcccaataacgtctttgtcatgttccagtgtcgcggcgactcctactggtccaagtgccccccttgcattagcaccgccgtctctggggtaattgtgacttcaatattataaattagcagtcatatagttacatgtaaaaattacgatgagcacacacgtcggttaattttttctgtcaaatcttaaatatgtgggcaatgatcctgatactttatataaatgattgaattgagacaaaactgatagacattaaaggctagttaaaaaatactgattaaacaatgcaatattgttcttgatatatatatgtacgtatatgtatgtgacagcttcgtaggagatgtccaagaaataagggagcaataatatggtatgaccaatgtcttttaaagatatcttcagttgcctccttcaataagatagattatgagaacgatttctatttgtccaacccaaacaacatgagtgatcgggggttgttcaacaaggagacgtcggctctcctggagaagctggcatataaagcctccgatagaaacaacttggatggtaaacaattggtgttgtacgcagcaggggagaagagaattgggacaaagaaggtgtatgcaatggtgcagtgtacgaaagacttaatatttacaaagtgctttgagtgtttggaagggattttgaggaagtttccacagtgttgtgacggtaaacgaggagggagagttttcggtacgagctgtaactttaggtatgagttatatccttttcttagaaactaacagcaacaacagtacaatgagagctccatattaaatgaaagggttctagagataaacagtcttataatatacactgtgttgcattttagtacgtgaacttgagcgaataaatgtactttcctctttgtgatttttgttttttttttgtgaacttgagttattaagaggaaatcttcaagtaaagaatttatctaatagtatatacatcccacatagaataccaaatagctcagctcatacaaactctctcataatgagagaaaaaaatcctgaaataagggtaagaaaaactcttatgcctcaaggttttagtaaatctcataattttggccgaaccacaaaaagagacgtgcgaaacaaaatagtagaaaattgatttcccgaatcgacaaacatggactaaactatatgtatgatacataactggtcgtacttacaatgatgatacttggtttcacgaagacgagggagcctggagatgaatgatggtgataaggccatgtgtcatcaccaaaaggagggttgctcctgaagttttcgccggagcggccaggaagtcgatcgaggtatgctcaccttctgggtttgattccaattttttctttgaattgcattcgcttgacacgctctttgtccaggcgatcgccgaatgggatcgtttgacttatttgtacgagcgttgtgttcggagcctttccgtagaggctactaacgcgaaagatgcccatgaggctttggccgttgaaaaggaaaaagtagctcaggcgctggccgacctggcaaggtctcaagacgacgccaaggagatgaagaggaaatatgacgagttagctggtcgcgctctttcggagatgaagaggcttcgagaacgtcgacttgaatatgctgaatttgtccggagatcggcccttgataagatg

SEQ ID NO: 19809 - DNA, 3003 bp, Unknown; identical to SEQ ID NO: 19798
  misc_feature (1)..( 3003): 2750-1469P.txt file - cDNA_ID_1823360; gDNA_ID_1971816; Annot_ID_176013

SEQ ID NO: 19810 - DNA, 3003 bp, Unknown; identical to SEQ ID NO: 19785
  misc_feature (1)..( 3003): 2750-1469P.txt file - cDNA_ID_1823360; gDNA_ID_2926176; Annot_ID_140331

SEQ ID NO: 19811 - DNA, 3003 bp, Unknown; identical to SEQ ID NO: 19786
  misc_feature (1)..( 3003): 2750-1469P.txt file - cDNA_ID_1823360; gDNA_ID_2926176; Annot_ID_140332

SEQ ID NO: 19812 - DNA, 3003 bp, Unknown; identical to SEQ ID NO: 19786
  misc_feature (1)..( 3003): 2750-1469P.txt file - cDNA_ID_1823360; gDNA_ID_2926176; Annot_ID_140333

SEQ ID NO: 19813 - DNA, 3003 bp, Unknown; identical to SEQ ID NO: 19786
  misc_feature (1)..( 3003): 2750-1469P.txt file - cDNA_ID_1823360; gDNA_ID_2926176; Annot_ID_140334

SEQ ID NO: 19814 - DNA, 3003 bp, Unknown; identical to SEQ ID NO: 19786
  misc_feature (1)..( 3003): 2750-1469P.txt file - cDNA_ID_1823360; gDNA_ID_2926176; Annot_ID_140335

SEQ ID NO: 19815 - DNA, 3003 bp, Unknown; identical to SEQ ID NO: 19786
  misc_feature (1)..( 3003): 2750-1469P.txt file - cDNA_ID_1823360; gDNA_ID_2926176; Annot_ID_140336

SEQ ID NO: 19816 - DNA, 3003 bp, Unknown; identical to SEQ ID NO: 19786
  misc_feature (1)..( 3003): 2750-1469P.txt file - cDNA_ID_1823360; gDNA_ID_2926176; Annot_ID_140337

SEQ ID NO: 19817 - DNA, 3003 bp, Unknown; identical to SEQ ID NO: 19786
  misc_feature (1)..( 3003): 2750-1469P.txt file - cDNA_ID_1823360; gDNA_ID_2926176; Annot_ID_140338

SEQ ID NO: 19818 - DNA, 3003 bp, Unknown; identical to SEQ ID NO: 19786
  misc_feature (1)..( 3003): 2750-1469P.txt file - cDNA_ID_1823360; gDNA_ID_2926176; Annot_ID_140339

SEQ ID NO: 19819 - DNA, 3003 bp, Unknown; identical to SEQ ID NO: 19786
  misc_feature (1)..( 3003): 2750-1469P.txt file - cDNA_ID_1823360; gDNA_ID_2926176; Annot_ID_140340

SEQ ID NO: 19820 - DNA, 3003 bp, Unknown; identical to SEQ ID NO: 19795
  misc_feature (1)..( 3003): 2750-1469P.txt file - cDNA_ID_1823360; gDNA_ID_2926176; Annot_ID_140341

SEQ ID NO: 19821 - DNA, 3003 bp, Unknown; identical to SEQ ID NO: 19786
  misc_feature (1)..( 3003): 2750-1469P.txt file - cDNA_ID_1823360; gDNA_ID_2926176; Annot_ID_140342

SEQ ID NO: 19822 - DNA, 3003 bp, Unknown; identical to SEQ ID NO: 19798
  misc_feature (1)..( 3003): 2750-1469P.txt file - cDNA_ID_1823360; gDNA_ID_2926176; Annot_ID_199850

SEQ ID NO: 19823 - DNA, 3003 bp, Unknown; identical to SEQ ID NO: 19798
  misc_feature (1)..( 3003): 2750-1469P.txt file - cDNA_ID_1823360; gDNA_ID_2926176; Annot_ID_199852

SEQ ID NO: 19824 - DNA, 3003 bp, Unknown; identical to SEQ ID NO: 19798
  misc_feature (1)..( 3003): 2750-1469P.txt file - cDNA_ID_1823360; gDNA_ID_2926176; Annot_ID_199854

SEQ ID NO: 19825 - DNA, 3003 bp, Unknown; identical to SEQ ID NO: 19798
  misc_feature (1)..( 3003): 2750-1469P.txt file - cDNA_ID_1823360; gDNA_ID_2926176; Annot_ID_199856

SEQ ID NO: 19826 - DNA, 3003 bp, Unknown; identical to SEQ ID NO: 19798
  misc_feature (1)..( 3003): 2750-1469P.txt file - cDNA_ID_1823360; gDNA_ID_2926176; Annot_ID_199858

SEQ ID NO: 19827 - DNA, 3003 bp, Unknown; identical to SEQ ID NO: 19798
  misc_feature (1)..( 3003): 2750-1469P.txt file - cDNA_ID_1823360; gDNA_ID_2926176; Annot_ID_199860

SEQ ID NO: 19828 - DNA, 3003 bp, Unknown; identical to SEQ ID NO: 19798
  misc_feature (1)..( 3003): 2750-1469P.txt file - cDNA_ID_1823360; gDNA_ID_2926176; Annot_ID_199862

SEQ ID NO: 19829 - DNA, 3003 bp, Unknown; identical to SEQ ID NO: 19798
  misc_feature (1)..( 3003): 2750-1469P.txt file - cDNA_ID_1823360; gDNA_ID_2926176; Annot_ID_199864

SEQ ID NO: 19830 - DNA, 3003 bp, Unknown; identical to SEQ ID NO: 19798
  misc_feature (1)..( 3003): 2750-1469P.txt file - cDNA_ID_1823360; gDNA_ID_2926176; Annot_ID_199866

SEQ ID NO: 19831 - DNA, 3003 bp, Unknown; identical to SEQ ID NO: 19798
  misc_feature (1)..( 3003): 2750-1469P.txt file - cDNA_ID_1823360; gDNA_ID_2926176; Annot_ID_199868

SEQ ID NO: 19832 - DNA, 3003 bp, Unknown; identical to SEQ ID NO: 19808
  misc_feature (1)..( 3003): 2750-1469P.txt file - cDNA_ID_1823360; gDNA_ID_2926176; Annot_ID_199870

SEQ ID NO: 19833 - DNA, 3003 bp, Unknown; identical to SEQ ID NO: 19798
  misc_feature (1)..( 3003): 2750-1469P.txt file - cDNA_ID_1823360; gDNA_ID_2926176; Annot_ID_199872

SEQ ID NO: 19834 - DNA, 3003 bp, Unknown
  misc_feature (1)..( 3003): 2750-1469P.txt file - cDNA_ID_1823372; gDNA_ID_1620621; Annot_ID_47041
ttatttaataagctttattgaaataatgaactttcctaaagaataaaattaattttgtaaacaattaataaataatctgtgttgctatgaatgaattacagcttggacgcggatgaagatcgtatatggctggtagatgttaagatttattattaaggaggagcaagaagagtgaaggcactgcgtcatttgctgtttttactgtgctattttctatgataattatgtttgatagaagaatttgatatttttttatttatttcttgtcaataaaccttaaacatattaactgaaaattctacgattttttaattaatcatagtttatttgctttctacattgttatattaataagattatatatatatatataaatgaattcaaattaaatatttttcctttttcttttgtcattgtagattttattaaaaacatgttggtggaattacataaaattagaatatttttttatttgtttatttcattaatattgttgacaaaaatagttaattaagtaattttataagtttctatcttaaattaatgtcagattcagcagttaccatttgaattctaaattattcaacgagattccacaaaaaatcacaaaaacaaatagtgagattcagcggttaccatttacacaaattgttgaattcattaaagttagagtcaccgtgtttagtacttggttcattaattatatagttctatagaggatcatgaaagttatgtataatctaatgcatatatgtaattagtgaaaacaccaaaaaaaacagaaaatatggtttagagggattgacatggcataaaaagcaatgttggatcgctgaattattttttcttggttcggtaggactcggtccaatgttggatttgcgaatcgctgaaataaagagttttggttcggtgggacttggtattggttgggctaattcagcgtgaataaaaaggcccaaacgtatttaaatattgggccgggtctgtgggaaaaaggcccaaacgtaaaccgaatcgtagattgaaatgaccggtctagtttcagtcttgttcgcgagcgtcgagagaaatcgagaggaaaccctaatttggcgagtggaggagcaagatgatgaggaacattggatctgcgtgtgcgaaggtaataggaaatatcggaattgattctcatgtttcaacggaggttttgttgcgtctcttatcttcctcaaaatatcctcaggaaccttccatatcgtaaaaacaacacaatgtaattagtgaaacaacaactagaaatagaatcatgtacatttatgaatcttaaagaaacagaacgtaccgcaaaagctgaccggagagttctatcgtcgaaacccaataaaaggtctctaacactcgagtaggctccaagacatggatcgtttaaacacttccccacattaaagattgcgtaaaccctaagtttctcgtttctatcgatgattaataagaaacgttgatctgtgttgcgatggatgaattacagcttggacgcggagggagatcgtatacggctggtagatgtgaagattcatcactgatgaggagcaagaagagtgaaggcactgcgtcatttgctgtttttactgtgctaatggctggctttgcgggacatttttggtacagaggaaaaggttaatttttcgtttacaaaattagaagatcacggttgctgtttgtatcttcttcctctcacaatcctttgttttatatatacacatatatgccagctactctagaacgcttagccctctccagagctattgatgaaaagagtaaaaagattcgtcttcttaaacgagaagtggaggcgatcgaactaaaggtaagaacactcttcgtttactagcccattagtaattctcctttgaaactgtacattttagcttttgggtaacacaaatctttgacgatgaagacaaattttggaaaacaaaatgtaattcgtttctcttcgtctcaggttcgctgaatatgtgatgagatcaaggagatcaagatcagtttgaagtcagaatatatatatatctttgttatctcgttgtgtacaattaattctctataaccaagtatggttttaagttttgttacttaaaaaagtgataataattatcattacgtgttggctgctccacatcttacatgcttgtgaatggttaaaaaaaatgatcactttgtactgaacctcgctttactgtcatctggctccaaagggtttctcattctcaatcttaagccctctaactttcttcccattgataacgacaaggccatcctcggggatgttgggatcccattattgcacagacaacaggtgacaacaagagcacatagaactcgaattcgaactacaattaggtaacaagtgagttagcaaagatacagatcataacccaatattcgaattacaagcttttggtgatcaattctgttggtgcaggaattagcacctccgacaataccaatttaaaccaaggaataacgtgaataaaatcgagaattcgattgaaccggggaatcccggctagcccgttaatgggcctaagtcatgagctcgtcagaagatttgggtcgacaatcgagatcgccataggcggcttctcaggtcgtgtaaagggaaaacttccatttaaggaggatctcatgaagaatggaagtaatgaagatttagacctaggataattagaagtttatcatattttgatacgttcaacccattgtataaatagggggggtcaaagtccccaaggatcatctttaaccgaatacaagagactacaattatagagcaaaccccagctttttattcaagcaactttgttctctccctttgattatttgtgagctaagagaggagtgaatttgtctaaatcccttagtacaaattcattgtttgattacagaatcaacaattggcgcgccaggtaggggggaatataaacaaattttctctaccctcctttaatcaaagcaagcatg

SEQ ID NO: 19835 - DNA, 3000 bp, Unknown
  misc_feature (1)..( 3000): 2750-1469P.txt file - cDNA_ID_1823372; gDNA_ID_2926201; Annot_ID_141532
tttaataagctttattgaaataatgaactttcctaaagaataaaattaattttgtaaacaattaataaataatctgtgttgctatgaatgaattacagcttggacgcggatgaagatcgtatatggctggtagatgttaagatttattattaaggaggagcaagaagagtgaaggcactgcgtcatttgctgtttttactgtgctattttctatgataattatgtttgatagaagaatttgatatttttttatttatttcttgtcaataaaccttaaacatattaactgaaaattctacgattttttaattaatcatagtttatttgctttctacattgttatattaataagattatatatatatatataaatgaattcaaattaaatatttttcctttttcttttgtcattgtagattttattaaaaacatgttggtggaattacataaaattagaatatttttttatttgtttatttcattaatattgttgacaaaaatagttaattaagtaattttataagtttctatcttaaattaatgtcagattcagcagttaccatttgaattctaaattattcaacgagattccacaaaaaatcacaaaaacaaatagtgagattcagcggttaccatttacacaaattgttgaattcattaaagttagagtcaccgtgtttagtacttggttcattaattatatagttctatagaggatcatgaaagttatgtataatctaatgcatatatgtaattagtgaaaacaccaaaaaaaacagaaaatatggtttagagggattgacatggcataaaaagcaatgttggatcgctgaattattttttcttggttcggtaggactcggtccaatgttggatttgcgaatcgctgaaataaagagttttggttcggtgggacttggtattggttgggctaattcagcgtgaataaaaaggcccaaacgtatttaaatattgggccgggtctgtgggaaaaaggcccaaacgtaaaccgaatcgtagattgaaatgaccggtctagtttcagtcttgttcgcgagcgtcgagagaaatcgagaggaaaccctaatttggcgagtggaggagcaagatgatgaggaacattggatctgcgtgtgcgaaggtaataggaaatatcggaattgattctcatgtttcaacggaggttttgttgcgtctcttatcttcctcaaaatatcctcaggaaccttccatatcgtaaaaacaacacaatgtaattagtgaaacaacaactagaaatagaatcatgtacatttatgaatcttaaagaaacagaacgtaccgcaaaagctgaccggagagttctatcgtcgaaacccaataaaaggtctctaacactcgagtaggctccaagacatggatcgtttaaacacttccccacattaaagattgcgtaaaccctaagtttctcgtttctatcgatgattaataagaaacgttgatctgtgttgcgatggatgaattacagcttggacgcggagggagatcgtatacggctggtagatgtgaagattcatcactgatgaggagcaagaagagtgaaggcactgcgtcatttgctgtttttactgtgctaatggctggctttgcgggacatttttggtacagaggaaaaggttaatttttcgtttacaaaattagaagatcacggttgctgtttgtatcttcttcctctcacaatcctttgttttatatatacacatatatgccagctactctagaacgcttagccctctccagagctattgatgaaaagagtaaaaagattcgtcttcttaaacgagaagtggaggcgatcgaactaaaggtaagaacactcttcgtttactagcccattagtaattctcctttgaaactgtacattttagcttttgggtaacacaaatctttgacgatgaagacaaattttggaaaacaaaatgtaattcgtttctcttcgtctcaggttcgctgaatatgtgatgagatcaaggagatcaagatcagtttgaagtcagaatatatatatatctttgttatctcgttgtgtacaattaattctctataaccaagtatggttttaagttttgttacttaaaaaagtgataataattatcattacgtgttggctgctccacatcttacatgcttgtgaatggttaaaaaaaatgatcactttgtactgaacctcgctttactgtcatctggctccaaagggtttctcattctcaatcttaagccctctaactttcttcccattgataacgacaaggccatcctcggggatgttgggatcccattattgcacagacaacaggtgacaacaagagcacatagaactcgaattcgaactacaattaggtaacaagtgagttagcaaagatacagatcataacccaatattcgaattacaagcttttggtgatcaattctgttggtgcaggaattagcacctccgacaataccaatttaaaccaaggaataacgtgaataaaatcgagaattcgattgaaccggggaatcccggctagcccgttaatgggcctaagtcatgagctcgtcagaagatttgggtcgacaatcgagatcgccataggcggcttctcaggtcgtgtaaagggaaaacttccatttaaggaggatctcatgaagaatggaagtaatgaagatttagacctaggataattagaagtttatcatattttgatacgttcaacccattgtataaatagggggggtcaaagtccccaaggatcatctttaaccgaatacaagagactacaattatagagcaaaccccagctttttattcaagcaactttgttctctccctttgattatttgtgagctaagagaggagtgaatttgtctaaatcccttagtacaaattcattgtttgattacagaatcaacaattggcgcgccaggtaggggggaatataaacaaattttctctaccctcctttaatcaaagcaagcatg

SEQ ID NO: 19836 - DNA, 3000 bp, Unknown
  misc_feature (1)..( 3000): 2750-1469P.txt file - cDNA_ID_1823398; gDNA_ID_1971816; Annot_ID_58232
cggtatattcgttgtacaagctgcaggaaacacaggtccttctcctaagagcatgtcctccttcagtccatggattttcactgttggtgctgcttctcacgatcgagactactctaactcgatagtcctaggcaacaatgtatctattccaggcgtaggacttgcacgtaagtcttaattcagtttcaaaccatcagctagtttttgcttatctgtaatttctgttttgttttcttctagttcgtacagatgaaggcaagaagtacacaatgatctctgctcttgatgcgttgaagaacaaaagttcagtagtagacaaagacatgtatgtaggtgaatgccaagactatggcagcttcgataaagatgttatccgtgggaatctactgatatgtagctactctatccgtttcgtcctcgggctttccactattaaacaagctttagctgttgccaagaatctatctgcaaagggtgttgtgttctacatggacccttatgttcttggttttcagattaatcctacaccgatggacatgcccgggatcataattccatccgcagaagattccaaggtgagaatataactagaaacatatcacttcttttcttgattcttcttgaagagcaatctaataacgacatgttaattcatatataggttttactcaagtactataactcttctcttgtaagagatggaacaaccaaggagattgttagatttggagcagttgcagccattgcaggtggacaaaatgctaacttcagtaacagagctcctaagattatgtactactcagcaagaggacctgatccacaagacagcctttttaacgacgccgacattttgaaaccaaatcttgtagctcctggaaattccatttggggcgcttggagttccgctgccactgaatccactgagtttgaaggtatacaaagcatgacattgatatagttgatgacattcccatttaaactgttgtgttccttttgctcattttaggagaaagttttgcgatgatgtctggtacgagtatggctgctcctcatgtagctggtgtggctgcattggtcaagcagaaattcagaaagtttagtccttcagctattgcatctgcactttcaacaacctctgttctatttgacaataaaggcgaggcgataatggctcaacgtgcttatgctaatcctgatcaaaccatatctcctgctaccccatttgatatggggaatggctttgtgaatgcaaccgcagctttggatcctggcctaatctttgatactagtgagttaaacacttaacataaccttggcagttttctacattttcaaattaccaaatgtagacaccattttaacggtctttctatgcaggttttgaagactatatgtcatttctttgtggcatcaatggatcagctccagtggtattcaactacaccggcacaaattgcttgcggaacaatgcaacaatcagcggatctgaccttaatttgccatccatcactgtatcgaagcttaacaacactcgaacggtccaaagactaatgacaaacattgctggaaatgagacctatactgtcagtttgattactccttttgatgttttgataaatgtatctcctactcaattctctatagccagtggagagacaaagctacttagtgtaatcctcacagcaaagaggaacagctctatttctagttttggagggatcaagctgctaggaaacgcgggacacattgttcgtattccggtgtctgtcacagtgaaaatcgcctcgaaacaatgaagctggtaatatatacacagagcttggtagataagagaaactgtattcatttcatttttccatgtaaatgtcacatagcatttataatacatggtacattttatttgatacaatatgtaaaactagaggaaagattccacagtcattaaaacacaataaggttctagtagaaaacatattgattcattacgcattgcctccatctctgtttcctttgcttggcgcagaaggcaccttctcggtttcctcttcctcagcagcagcagctccagaagacggtgttgaagttacaggaacggaaggattcgtaggtgtacccattgggaaaggagcatacttgtggaaaggccatccctggaatggtagtctatacctgaaaaaaccggctattgcagactttgttgcaggctcatcaatatgtgtcatggaggatgatgaatcaaccttcgggaattcagaaaaaagcattgccggagaatgaacatgttctttcccatgcttcttccctattgctgctgatgctgctgcgagtttcgggctgcgagagcagagcacaagtggggaactgacgaatgtgagaaagattagacagagataaactcttgaaattgacattgtagctgattttggagtgtttaacaagagatggttcttctttttgttttgaagttgtttgtttgttcgatgatgtttggagtcaaatggtgttgtaatttatagagtggagattgtagagtttggagaatgtgtaggagattcaacgttggatttctacttcttacctaaaatcatagtttcagaatcatgcttattgtcatgagcttgacttgtgaagatgaaccagaacatgcttattagtataacgtttgtatttttatatagaaagttgttaactttcatctaaattatgagaattagaatctcacaaagaacagaatcgtggaaatggtgtaatttgaaacataacaaaagtatggtttggtttgtttgaataagaatgtttcaaggagttaaaataaaatatttgattttattatatatctggaagataaagtccaataatttcaataataaaattaactaaaaatagaagatttgcaaattcctttgatcagatagtgaaaacgattctctctatattgccgatcgatctccaagtttgctaaatcgccgggaactttactgaaatttggagctagtcatg

SEQ ID NO: 19837 - DNA, 3000 bp, Unknown; identical to SEQ ID NO: 19836
  misc_feature (1)..( 3000): 2750-1469P.txt file - cDNA_ID_1823398; gDNA_ID_2926176; Annot_ID_140319

SEQ ID NO: 19838 - DNA, 3003 bp, Unknown
  misc_feature (1)..( 3003): 2750-1469P.txt file - cDNA_ID_1823402; gDNA_ID_1971816; Annot_ID_58231
aataatttggcattcttttgctccatggaacttgaccttctcttctgtttgttgacttctaaaactccatcggcccttgtggcattgttaatgtatgtatgaatataatctgatacaccaaccaatcattaagatttgggtttgaaatctgtctcttccgtggatgagatatgctacatgtcacaagaactggtcttagctttggtagataagacttgtcttagagcaagtcttgaaatctggaaatctattttgcagtaatcttgtcacaacaaccataacctaatcagtcagtaccctccaagaacattaaagttagatgatccgacaaaacctctcaacaagaccaaactctttccatataaatactctttaacactgacacaaagtttcatcactttctcttgatcactcactgcatcaacaatggccagagagaagattgtggtggctggtggtaccacaaagagctggaaactactcttggggctgagaatatttgcattcatggctactttagctgcagccattgtaatgtcactaaacaaagagacaaagaccttggttgtggccaccattggtactgttcctattaaagccactttaaccgctaagtttcagcacacaccggcttttgtgtaagcgagtaaaaccctatacgaaatcgattcgatacatattgaaagcaaaatgtttttgagttattaacattgattcttggttttacaggttctttgttatagctaatgtaatggtgagcttccacaacttgttgatgattgtggttcagattttcagccggaaactggagtacaaaggtcttcgtctcctctctatcgccattcttgacatggtataaacattggttttcaaatcaatttactggtttgatttcaattgaattagtttgaacgtttggaaaaaaagctaaacggtttcttgataatctaaaaaaacgttggaaaaaaagctaaacgcaacactagtatctgcggctgcaaacgcggcggtgttcgtggcagagctagggaagaacggaaacaagcacgccaagtggaacaaagtctgcgacaggttcaccacttactgtgatcacggcgcaggagcaatcatcgcagcattcgccggagtcattctaatgctcctcgtgtccgccgtctctatttcccgcctcttaatcaattctaaaaacttctccaccaccgccaccacaacctccgtcgtctaaaacatcgtggccaaaaattcagcaacatgtgtgtgaccattttatagatgttgtggcttactttgtgtgtttgtctctcaagtcactagcaaattgtgtaatgcactcctttgttctatcactttcacatttgtattcaagttttcatttctctcttatctttttatataattctaaaatgacaaaaaaaaattcacaaagtatatagtacattgaaacaatgagaaaaatctacaatagatgattagataagaccaattcaagataatttataccttttatttctcaactacttcttctatttatggaaatataattctaatcaattgttagttttttacattaaaatgaattatatcaaccgactaaaaaacaaatcagtattagttctatcgcattgtagttcccatacaacttaatttttgtgttgtaaataatgatcctactgtctctaataaatgtgaatcaataatcataactattgaaatccttttctttttggttagtaaaaatgaagtgtaaatagtataactgtttaatttagttcagatatacaaatcaacaaaactacttaatttgaagattaattcagtttttttttttttttaattttctgtttataaaactactgaattttatttggtataaatggattgaagattttattacaaaacaaaatcacatttggcggcttcttctttttatgttctaaacccttttcttagatcggactccaagaaatctacttgctttaatcgttaacctaataaattcttctctaagttttttttttcttaactcatcaaagaaggaaagaaaaaaaaaaacctctttcacagatatttaaccaaaaggttttagatttatactatacgttacaaataaaattcgagagtcaaattcaatcttgggaaaagcttttgttccgaatcttggccccttcacgaaggtacacttatcatctcactctctatttccagacacaaatctatatgcgttctgggtttttttagggtttcgaaaacggcactgcatttcatcaagtaagggtttgttttttatttaacagatctttgttcttccttaggtcacgggttaaaagtatcgatctttgtgaacttaatctcactgtaaatggatcagcttgcatctctagcagagtctgtggctatggaggtttctcatctttatccttttgcttctttgatttgtgttttttgctttctcctccatttgtaacctctaatttgcatgtttgctagattcaattagcactgttgcagtttctgaatgtggaattgtgtttatttcttgcaggaagattctgagaaacaatcgattaaaggagagagtagtcttgaacctgactctactccttctagtcctaaagtaagttaattgggtttctagcaaagtattggttgggtaaagaggttgatggcttatctatgtgctaaacccgtttgagtctgaaaatccaatcaattctagttttaattaagttcgtggcttttgcttatcagtatcttccttcaaagatctcatctttctgagagtcgttcttattgtatttgttttagattaagcaaaatctatttacttgggtcttaagaatttagcaatctcatctggatcttattagattgtttgttgtgttagctatctgattgtccaagagcagatgaatctgattcatgaatgatatcgttttgttgcgtatttgaagataactgctaggtggaatccatcagaagcttgcaggcctttggttgatg

SEQ ID NO: 19839 - DNA, 3003 bp, Unknown; identical to SEQ ID NO: 19838
  misc_feature (1)..( 3003): 2750-1469P.txt file - cDNA_ID_1823402; gDNA_ID_2926176; Annot_ID_140318

SEQ ID NO: 19840 - DNA, 684 bp, Unknown; identical to SEQ ID NO: 4248
  misc_feature (1)..( 684): 2750-1469P.txt file - cDNA_ID_1823409; gDNA_ID_1620691; Annot_ID_48619

SEQ ID NO: 19841 - DNA, 3000 bp, Unknown
  misc_feature (1)..( 3000): 2750-1469P.txt file - cDNA_ID_1823409; gDNA_ID_2926159; Annot_ID_139655
aatttctttagaaatcttcccagcctctgtcccagaaataaaacttgcgtttttcgcctttttccccattacttcaagcctcacctgtaacaaaacaacaaagtacacacctttaaagccaattcaatgtatactaaagttatcaatcaagaaactttaccttagtgcttgctcctttaggccaaccaatacctaaattgttactactattagtcgaaagaagatcataaatctcctcattataaacctcaagaacagtaacttgaacaaaagtaacaccatcttgatcagaatctcccaatatatctctcaaagaacgatacacaatcccaggctctttcccacaaccaaacatagtatgactctttccagcaccagtaggtccatacatcataatcgtgcatttattcccaactttcactcctttaatcctctcttctataaacttcttgtagaactcttcaagaccttcttgctccgagaaagaaacaccgtcgagtgtgaagtctctgtacccaacatcagctctgactcgtaccgtttgattatctgtgttgacttgtaagatcgaaggtgatttctctttccggtcagggtaatctcggatccggccgattacttcaactggatgctccggtggagatggatctttagatccgtctgggtttggggtttttgagtggaaattgagacgttgttttgtttgtggagttctgattaaggtgtattgagtttgatttgatcttgaagaagatggtgtcggtgccattgttgaagaagtttcgaaagagtgaaattgaaattgagattcagagagcgttagagagagagaaaataaaaaaggggattagggtttgtgagtgattcacgaggtttgaagtttgaaacaaagaaacaaacataaccgttgtgttgtatctctaaacggctagtttttgtccacgggccactgattattaacaatttttattttcggcaactagaatatatttactttcttttaaaaaagggaagtgagatgggcctgactttttgattaagttaatgggctttttgtgtttatagaggcccaatgtttgtagtattagggttttctcaaatgtctctcttataagctctgttactttaggtttttattaaaggttttgcggcagtggaagacgacggcacgagcttcaccgaagagcgaaaatggtgactctcttctctttctttatttctgctaaatttctccttggttactattgaagaacgagattattgattatagatctgctgtgtgatttttcttcttctttaagttgtttatttctgattttgcatcttaaatcgagaattattagagtctaattgtgatttttagaatctgttatgttgcattctgtgttgtaaattcgaagattcagttcacttcgtctctgtgaagagttttagctccaatctaccagagattcaaaatgatatagtgttatgtatcttcatttgtgttgctgcaattctgttctgatttttaggagaattaagaaggatttgtacttcagggacttgtaggattcacaaaatggttatcaatattgactagttgagtagtcagatcgtatggtagcaattaattctgaatgatttaggagaagcaggaaattttattaacaagttttagggtttgttctgaagggcgtatttagattcacttctatgatcgtaattaattctgtatgctgttgaaactgtatcttgtggtagttttaaacttggttttctgtaggtgaacattccgaaaactaagaacacttactgcaagaacaaggagtgcaagaagcataccttgcacaaggtgacgcagtataagaaaggtaaagatagccttgctgcccaaggaaagcgtcgttatgatcgtaaacaatctggttatggaggtcagaccaagcccgtcttccacaagaaggtatactcgcttttccttgtcttgatctctaattactgtcttctatgtgagaaccaatttaggatttcagaattgactctgtgaaatatgtcttataggaatgatttgttaattggaccttgctcattatttgtctttctttggaacaggctaagacaactaagaagattgtgctgaggcttcaatgccaaagctgcaagcatttctcgcaacgcccgattaaggtaatgtctgcgacattctttacctttgttaatcactctttagtctcagttctgtttcttacactttgtgtgtggtttttgcagaggtgcaagcactttgagatcggtggagacaagaagggaaagggaacatctctcttttaagttgttgtttcatctatctacttttttttgttttgtttggtacctgtcctgcttcaatactgtgatatactttgaatctaccagaaatggtcctggtttttaatttaaataggacttggtcttatggatgtcttttaatttggttaaccaatctttcttcattaggctgcccttgagtattctctataacttgcgacaaagtagacataacactctttaagttctaaaaaccactttctattttcggatctcgaaaaatcatttatcgttttgtgctgcaaatcagtgttatatatgagcttggcaaattaaaatgacatatacgtatagaaatgaattgataatactaaatattatttgttttcttcttttaacttcagccatactaactttcactaaatttcttaagagcatacagaagtttctcctcggtatattggtggttctatattccccgcaacgtgaatggaaaatgaaggttctattttggctatatgataatcatgccattagctgacccgaaactaatgtgttacaataaaaccaaattatataaatagaagaacatgtttcctggctccttattgcacaaaagagaacatgaacaactctttttatattaccatgatagtcctatgtgttttggcctttgtgttagttttaattgagagctgtgcgggcaaaatg

SEQ ID NO: 19842 - DNA, 3003 bp, Unknown
  misc_feature (1)..( 3003): 2750-1469P.txt file - cDNA_ID_1823413; gDNA_ID_1620691; Annot_ID_48618
cgtttgccatgttgtagatcatttagacacaggagagtcagctaaatagacaacaaacccgaccaaagaatatttcattcggttcttagcaactattctcctctccactggtaaagaaaaaggggctcacaagataagtaaatcctcaattgcttacaaaattcagttctatagtaaacacttccatacagtttcatgcaacactggaaatgaaaacgctcttattaagtagttcaacaaatgaaagacttaaaggaaccttgtgacagcacccattgaacgaccccataagccaatcagggagacattcccatccgtgcgcaaatactcaaccacagccttcagatcatctttctgcaaccaccaacgtcacgtttaacagtaataaaagaagtgactgctctcacaattcaggattatgacttatgaaggcagcgactgtgagggaaggaaaaatcattgacaacctaatcaaggacactcaaaggcacctaagtctaccatgaaatagagcatcaaaaactctaaatcatttggaaatctttcttcagaaagataacaataccttcatagaccaaatgaagcatcataggtgtattggttatagtgggatagaattccaataaaccacgagacattcaatctaacaaatatcaatcgagaagcagatatattgacttaagacagcttgtttactccaaacaacgataagtttaggccataacagctgaagggaagaagaggaatattttgagaaaagatcaaaggaggacatacttcgttccaacccaaagtgacatgctccccgccagagagaccggatcccgaaaagtcaagcgtgaaaatcgtgatgtttgaaggaagtaatacgatcgcagcttcactggcatcagctctacatccactgaataagaatgaatccattaatgaatagtatactaaaagaaacattaagctattatgataattggaaaactttagtaatgttggcaaccatatcagttgtttcatttcaatgcatggttgtcatagtatcctaccagctattgcatcgattgaaggatgagttaactagtttatttcaccagtacagctcaaatcacgttttattaaaataaaagttacgattacctgttgccatggcagtatattacacaaggtagaggcctatcttcaggacgctcaactggcatgtaatgactacactgaaggatatctcctctgatgtttttaacctgtcacaatataagttcttctatagtcttaggtgaacaaagcacaactaaaaccttgagatcctaaaggcagtccaaggctggaaaataaggaactcacgctgatcaacagtgaacaactgatgaaatctacattgacattgaatcacaacatgtttgcttggattctctagtcaggagttcacaacaacaacagaagaaaaaaagctttacctctaaatctttcctctggtaccatctccctttaagcaagaactcttgttccaagagatcatgttctggattgtattcagctctacatcaaaacaccagttatattcaaccgtagatgaaacaaactaattaaaacaaattggatttgaaagaggaacagggttttcttgaggaaatgcaaccctaaatcctagtatatattacttcatctatataaaaatccaaaatcaactcaagaacaagaaccaaaatttcaaaactcaaatctaaaaatctaaactttgtgtgaaacccaattctacaacctagtaaagagaaatagaaagatgaaactgaaaactaaattccagaatcagtaagtaatttttttcaattttctgagagaatcatcaccttggaggtcgaatgacgaagttaacaagctgctccattagaaaaaaatcaaacaaatcaccttcttcttcttctcattcttccatatttctcacaaatagtcaaaaatcgaataaaacctaaccaacgaaagagattcagatagaacaagaaatgtaactaaaaaaaccctaaatcaaaagatcgagctgttccagaagaaagacagtgagatcgaagaaagaaaaacacagagaaagagaagaaaataaagcaaagtaatagaaaaacggctttttcgttgttgaagcctgaaactgtttttatatttaaaaatatataaacaaactttataaattagccccacatttttgccgctttttacatttaacgtcttcacatttcattatggaaattaattaattggtattgtcatgtataatcattaatcattattactaattccaaagttttttcagtgaaagctgacattgaccaaagtctcttaaaaaatttcgaaaaaaaactcaaaaattcaattaaggttttttagtggagatcgtgcacgttaattgtcgtttataggctattgttttaattattttaaaatatatacgaggtaattaagagattaattaaacttaaacatatgaggttaattattacaagtactaataaagctgtaatgtggagtttggaattttcgacaacaaagtgcacatctggcacagagattgtcacagcacgaaagatttttttgtcgttcttgtaggatttgctggcacgtgtggaatagaaaacacacgagtgaaaccatcgtcggtctttgtagcccattatttatacttctattgggctggacttaagcccataagtaagcatctctgttacaagaaaacgggaaacagatctgaaccgttaataatattagaaaggatctagaccgttgatttatttatctgctgacagattcgtaccttcgcgaatatcaataccaaaccaatagaaatattcgttcgctgtcttcttcctcttcctcctctcaaatcggctacagccattggaaaagctaaagccttttcgtaatttctggaagtttctgcagtcggttttcacggtttcgtagattgaggtggatttgtgattctgggtcagaagtaagatagtggaatataaattcatg

SEQ ID NO: 19843 - DNA, 3003 bp, Unknown; identical to SEQ ID NO: 19842
  misc_feature (1)..( 3003): 2750-1469P.txt file - cDNA_ID_1823413; gDNA_ID_2926159; Annot_ID_139654

SEQ ID NO: 19844 - DNA, 3000 bp, Unknown; identical to SEQ ID NO: 4219
  misc_feature (1)..( 3000): 2750-1469P.txt file - cDNA_ID_1823437; gDNA_ID_1620691; Annot_ID_48612

SEQ ID NO: 19845 - DNA, 3000 bp, Unknown; identical to SEQ ID NO: 4219
  misc_feature (1)..( 3000): 2750-1469P.txt file - cDNA_ID_1823437; gDNA_ID_2926159; Annot_ID_139648

SEQ ID NO: 19846 - DNA, 3003 bp, Unknown
  misc_feature (1)..( 3003): 2750-1469P.txt file - cDNA_ID_1823441; gDNA_ID_1620691; Annot_ID_48610
ttcttcctgacgtctaaattagatggagatacttcatatcctcaaacattcatcagttctttgattactattaaatgtcaaaatctataattagcttgaattgatcaatacaaataaatacatgcatcatagttactaacctcacttttttactcaattacatcatactttgttttacattcaacaagtgtgtgcacattaatccaattttatcaaaccaaatacatggcgccactaactaatagttcaaccactgttttcatcagatagtttaaaagtttaattacttgaagcagtaatattataacagctgactagcaagtaagaatatgcgataagtttattctctcaccatttaagggtgctggtaggacatctgggaagtcaaatctactaaattctccaggtttacttggcatagcaaaaatcatggagtgttccttccactgcaaccgatcattgatcccaagttctccaaataaattctgcacattcggataagcaccgacttccaacaagaacatgaagagagtatcagtaacgaaaagtaataacagggaaaacaagatacaatataatttaaccagtgttttgcaactttcttcaaattgatggtagagctgataagatatatgtaacaaatatattgggggagcaacagagagggtatgagttttggacttacagaaaatatgtaaaccagtctcataccagtccccatcttcatccttccatgcagctatctggaggaagacaaatatcacatcataaatatcgctctccaataagataggtaaattgttaaaacggaacaaacaagaacctaacctaagaaccagagaacacaataacaacttaacaaaatatatatccaaaagatatcttccagtaaactactctatatttgattcacattaagcctagaaactggaaagggttgtgcggtgtgtagcacaagactgaagacattagaacataataaaaaacaaattgggcagtacaagactaatacaacaaacaggacagatacattgggtacctaggagctgtaacactctaaacactagttataccttgtagtctcacaaacataattggtacagcctttgggaatcagcaaatcatataagaatgagaaatgcaaacaacaataagtaattcggaaagtgagaccaatcaaagtacctttccaccaagaacatctcttgcttcaagcaacagaggtttgtggcctgcatcagccaggtactttgcagttgacaatccagccaatcctgcaattatttgagagccaaaagaacttcatcacatgaacattaattccatcagatcccaaacaaagcagtaagaaatgaagttgtagacataccagcaccagcaattacaactttcaaaggcttagcaggacgaggagcactacggaaggatgcagataaactagcagcttccaagaaattgacagtgttctctagctctggccttggaatatccacacaaactacctgcaatttcctctctttaatcaaaattacacttatacactagatgaaatttcgagaactccaagttaaaaaccagaaaggtagatacctgcaaaggaccagcagtactcctcctccttgttcttgtcttaagcgcttgagaagtgggaaccctaaagctatgtcccattagttcacaacctccagatgaaagtgcctccaaaaacccgttttgataaggcaaattcgccgcagaaacattcccaaacacaaccattttctccaacttaactcacaactgcttcaatgaatctaaaaattgaagctataaaagaattagaattacaaaacacacaaaaagtaagaaaattgagtatcttaggtgaaaccggtggaagcaaatcagacaaaagtttgtatctttaacacataattgaaaagaagaagaacaaaaaaaaacggacttgaattaaaggggctatagtagttgtttagtatcttatcttttacctagcgagtaatcgtgaagtagagaaacaggagacgcagcgaaggaggaggctagtggaagtagccgataacaaaatggagtattcgagtgcccatatggtcttgtttggttttcagaccaagctcttttgttgcttacgaaacatgtagatggattaaataccacacaaattaaaattttgatttacgaattgatgaccatatgattcttttccttatttggttaattgagtagagagagaccatgcatctcaacgtaatttggtttaggggaaaaagaaattgacctctcagctaatatgtttttgcccaccaaagtaactacgacaaaataaaaataaataattttggtggagttggtgtcaaatagatatgaattctgtgttatcttattcgttataatcatgatcttccttctcgtgattcccaagtataccctaacccaccttatatttaacggagccatccgaatccgatcgaaactttgtggaatacacacatttgtacaaccagtggcttgtttattcggtgagagagtggtgatatctcaagttctgttatatgctccaacgcatcaacttctgttcccattgcatttcctccaaatctcttctcgggtcggttcggtttggatatccgattccgcttagtttgcccacataatttagcccaggaattgggtccattgtctgatgacgaagtatgttttagaatctaaaactagtggacttaaacaaagcccaatcataataagttgtgtaacaaattttaaatataaaaaccaaatactcctcctccttgcattttctcttttttgacttttcctttgctttgacttgtcagtcttctcttccccttttctcttcttttttttttttgatcaaacaaatcaatctcacacctcttcttcttcttcttcttcttcttcttcttcaacctcttaaatctcaaaatctcaatcatcaagcttctccttcttcttcttctttccatcttcgcttcaacaacaatg

SEQ ID NO: 19847 - DNA, 3003 bp, Unknown; identical to SEQ ID NO: 19846
  misc_feature (1)..( 3003): 2750-1469P.txt file - cDNA_ID_1823441; gDNA_ID_2926159; Annot_ID_139646

SEQ ID NO: 19848 - DNA, 3000 bp, Unknown; identical to SEQ ID NO: 4233
  misc_feature (1)..( 3000): 2750-1469P.txt file - cDNA_ID_1823443; gDNA_ID_1620691; Annot_ID_48609

SEQ ID NO: 19849 - DNA, 3000 bp, Unknown; identical to SEQ ID NO: 4233
  misc_feature (1)..( 3000): 2750-1469P.txt file - cDNA_ID_1823443; gDNA_ID_2926159; Annot_ID_139645

SEQ ID NO: 19850 - DNA, 3000 bp, Unknown; identical to SEQ ID NO: 4221
  misc_feature (1)..( 3000): 2750-1469P.txt file - cDNA_ID_1823447; gDNA_ID_1620691; Annot_ID_48608

SEQ ID NO: 19851 - DNA, 3000 bp, Unknown; identical to SEQ ID NO: 4221
  misc_feature (1)..( 3000): 2750-1469P.txt file - cDNA_ID_1823447; gDNA_ID_2926159; Annot_ID_139644

SEQ ID NO: 19852 - DNA, 3000 bp, Unknown; identical to SEQ ID NO: 4231
  misc_feature (1)..( 3000): 2750-1469P.txt file - cDNA_ID_1823451; gDNA_ID_1620691; Annot_ID_48607

SEQ ID NO: 19853 - DNA, 3000 bp, Unknown; identical to SEQ ID NO: 4231
  misc_feature (1)..( 3000): 2750-1469P.txt file - cDNA_ID_1823451; gDNA_ID_2926159; Annot_ID_139643

SEQ ID NO: 19854 - DNA, 3000 bp, Unknown; identical to SEQ ID NO: 4223
  misc_feature (1)..( 3000): 2750-1469P.txt file - cDNA_ID_1823467; gDNA_ID_1620691; Annot_ID_48603

SEQ ID NO: 19855 - DNA, 3000 bp, Unknown; identical to SEQ ID NO: 4223
  misc_feature (1)..( 3000): 2750-1469P.txt file - cDNA_ID_1823467; gDNA_ID_2926159; Annot_ID_139639

SEQ ID NO: 19856 - DNA, 3003 bp, Unknown
  misc_feature (1)..( 3003): 2750-1469P.txt file - cDNA_ID_1823471; gDNA_ID_1620691; Annot_ID_48602
acgagttcttaaacaaatttgttataaataaatttaatatataagtaccattaaatatgttaagtaacatattaatgatattaataaaccattttaatattgcataaagttttacaaccattgtcatcatatcctctttttctataggtgttactagctctcatctcaaggtctccaccatactctttaattaaccggctattatttattttaatagtaacacatttgttcaaaataacactagatgttttacggatggtgattttaagatgtttagatatttataacagaaagtcaggtcgatccaacattctttcatgccctacacaaataaacatattatggcctgtaatttttgtttttacaaattcacaaatcatagtaataaagaaaagatcatactaaaccttaaataataaaacagtttttaaattcattagcagtttgtaaaaagagaaaaaagaaaagaaaaaattatatccatttttttttggtaagggataggggacaaagtcccttaccgtttgttaagaaaacttaaaagaaattagaaaggaacgattcaagttttagttataaaaaaacttcaaaaaaatatatcatttaaatatagctctagttacatttttacctgtaaaatcactcatcaattagtcaagtttttcacacaaaaatcattcgatcatgtctagttgcctacaaacaagtaaaccaaaaatcgcatgccctttacctacgaatgactaatataatttaaaattgcaaactaattagatttaaagcaaagttgcaaaattaaagtccagacacaaaacctagagagacttcagactttttctttagtaatcaaactcgattttgcaagtttagtattttacgttttttaaaaccaaatttttaccaaacaaaattcattaactagacgtaaatttagctaaaaaccacaaaatataatgaaaggaagctaaaaaaaaatatatatatatatataatgaaagcctatattattttttattttatcataaaaggcttataaaagttttttgtaaaacatgttctattaactttgatgtcctaagccataacttctcttgattttgtggtgggccagacctaaaacattaaaaatatgatattatatataaaaatatgatatcagaaaaataaaactattaatttgtaaacaaaacttaactgacattttactttctttcatataatatatgaacgtttttaactatgtacatgaaaataaaacataacttaaaattagaaaactacattaaaacgagatctatataatttttggccgtcgaaacgatcgtctaaacgttatccagagaacctagatgaccgtctagactgtttttaagaacatatgacaatgttttataaacataagtatatttgtcataatgtttaacataatagttttgaaaagagagaacaaagtgcaacactgttgttatataatacaattttttattaactattgaaaatatgagatttccatgggatattgcacaaaagctaaattgcaattcataagattaataaaaatctttatgtacaatgtatcacaccatttctgtcagttttaaaatattagttttagaaaataaatgaggatctaatacttttttttttctttttcataatgagtcaattttattgttatggaggatcaaatctcagtgttaaaaaagggtaacaattcataatattaattaaaatctttcagtaaaatgtatcacaccatttttgtcagctctaaaatgttagttttagaaaataaatgagaatacgatttttttttttttgtctttttgataatgagtcaactttatgtttatgaaagatagaatttcaatgttataaaggggtaacaatttataagattaattaaaaaaattatctacaatgtatcacaccatatctgctagctcgaaaatgacagttttagaaaataaatgagaatagaatatcatttttcttctttttcatagtggatcaactttatgtttatggaggataaaatctcaatgttaaaaaggggtaacaaatcataagattaattaatatgtttatatacaatgtatcacaccatttctgccagatctaaaatgacagttttggaaaataatgaaaatataatatcattttttgtctttttcataatgagtcaactttatgtttatagaacataaaatctcaatgtgaaaaagggtaagaaaatcttctatataaattggtcaaactttctttcaattcaaatcattattttttattaataaatgaaaatataatattttttcaaaatgagtccactttatgtttatggaggatataatctcattgtttaaaagggtaaaaaatctcttctatataaatttggtcaaagtttatttcaatcttcaacaaaaatctttatttttctatgatttaatggaaatatgggatttatgatattctctaaaagctaagtttcaactaatataaaaataaaaaagctaaattacagctcatcacattaaatgaaattgtaatggacagtgtatcacaagatttttgccagtcttaaacgttctaaaatttcaggcgttttttttgttctatttataaatatcaaagttttagcttcataatccattcatagtcctctgctcttgttttactactcttactaaaagtttttttaaaaaagaaaagtcttagctactagcttgctccatttataatcccttcactcaactttcttgttttactactctcactaaacgtaagtttttctgtatcatttatctaaattttattgtcaatatcaaactagatttgaaggatttcaattgaaagtcttatgatatttaattgttacgtcgatataatctatgtgatgtagaaacactcatttggagtggtttaattacatatattgcaaattacttatttaaagtgcatgctaatgatttagataattttgtttcaaaattaggtcttttcatg

SEQ ID NO: 19857 - DNA, 3003 bp, Unknown; identical to SEQ ID NO: 19856
  misc_feature (1)..( 3003): 2750-1469P.txt file - cDNA_ID_1823471; gDNA_ID_2926159; Annot_ID_139638

SEQ ID NO: 19858 - DNA, 3003 bp, Unknown
  misc_feature (1)..( 3003): 2750-1469P.txt file - cDNA_ID_1823487; gDNA_ID_1620691; Annot_ID_48597
aactttataatccaattccaaaaacccaaaagcgagattacaattgttaaagataacaaaacagaggctagaatttgatctcgcctttgactcgcagtgaacccgaaatcgccggaatgatggaattcgaacactttcgtgacccgaaatcaatctgaacccaaaatcaggaaactgacgagaaggagaaccgtaagagagtagtgtagaaggtcccaaagaagaagtcgaagccatcgttgaggaagaggcgatgaagaaggaataatcaggtttcagacgaatttgcatttgcagataagatgaagatgaggactgtctttatagaagaaatggaacagagagagaatgagatctcgaagcaaacgtagtaaccatgtcgttgtcttgattttgatcttcactggttccagaagaagctcaccggaggagatttttttatatatacattcaattaaaaaatttatgtgttttaatttattattattatttttttgtctttttgctcataatctcgtacgaaaactttagtgttactcaatggaatcacatgagaatatacgacatttggtgctgatgatccaattatggtctttacattaattcttagctaatttgggtttgtgtttatgtcagaaaatctaaaaattcttaaaattattaaagttcttgatttttttgcagctttagggcaaagtaaatctcccacccatttacgtttttgtagctgttacagtttgtgatagataattttgttgttgattagagaatgtaataataatcagctttgtaagggaaaaaaattactatttattaattatttgaattttttttctcaacatagcgaaacttgaagcagaaaaggtataataaaaaaaagataaggaacaatattgagttatacgaataatccagctttaatcatgtgtcttcttcctcaagtcctcctcacagagtaacgctcggaaacttgcaacgatcatttcctgtaaaaaatctttgttagtgactatacgaaaaggttattttggtctaaatttggaaactacaaagaatggctcaccagggttggttgttgtctcatgagccaatccattgaagaaacattgaatgctttggttacgaaactgagcccagtacgaattaagcgcgtagcttgcatgccaataaatggagactggttcgtaacattctctcccaggagctaaagctgcacaagtggtgttgctttgggcacaagccatcctcaatgtttcttcaagctcagtctcgttggctccttcgactggtacgcaccacacttgacctttgtaaggaacgttgttcgtcggtttaggtaacgggttgaaaccggttaagggtgtttgaccggtgaaatctacgtcgtagattggtgaaccgtcgggatgcaagattccccaatgtctctgtgtccccgaaccggatttctggttttcgttgaataaggagaaaacaaatgtcggtattggtaaaccgggtcttgatggtgtaccgattggaggacttgcgctcatcttcttgatcagattacggttataggtagctgcgttgagaatgttggctccggtttcgtcgatgtcaccgaaattaggccatccggtttcagagatcgcgaggcgcatatgtggataaccgagtttggtcatggcgaagagaaccgaatccaacatttggtctagaagattacggtaaaccaaaccggtttgaggatcggtataggttgagtgtccttggaacagagcaaaatccaaactggtgttcatggggtttcttgaccaacggaagtaaggatgaacattaaggaagaagtaagagtttgttccgttgagaaacttcagcaacggtaacatcaccggtccggtgatttcttcccggaatgttccgttcgatggaggaaacgacgaccggagagaatccatagctagaggtgtcccaactttgatgttgtgaatcccatgtaatctgagtgagttaacgattttgcgcatcgccggtacaagattcacagagacattcccagaattgtagctgaggatttcgtttccgacaaggacaaaacggatttgtgtttgtggatagtaagggaggatgttagttctgacccattcgtcagctatggtttggttagagctgagggcggtgatttggtggttagggacggttatggtgacgtagagattggtttgagagaggagtgtgagactctctggatcggcgtcatagagcttgacatgaccagctttgatagatttgatgaagttgatggattgatatggagatgggaggttgtttcctcttcttccatagttgataccaatcttgctagccaaatctagcattgttttcctctgcatgtacctgtgcccttggaaccgagttgcggaacaacatgaacctgtaaaaccaagaaaaccatgttcaatatgggagattacgtaaagaaaatgtaaacatgatgcattattaagatgacttacttgaaaagacaaggatggtgaagaggaagaaagcaagaagagacatgtctttgtgtttgtgtctggtttggtttgcaatgtgttggtgatgatcagaatgtgattttaagatggaatggtgtggcattggagatgaggtttataagtaagagtatggtgtagtgtaggtttattgagtcatgcaagaaaagctttgttttggcttttgattttctttttgaaactctcatagttcttttgtgctatgattttaaaaggattgttggttggatggttcaaattgaaccaagaaacactttccccaatattgttaattttgcaaatacatttctgattgtagattgagagattatacatcaataatgagtttagtagactaatggactaaaatgtatgtttcgatgataacaatttatgtagaatttaaaagaactgtatactatatagtattttaatttatcttccgtgcacgaaccaaaacttcagtaccacactgatacacatg

SEQ ID NO: 19859 - DNA, 3003 bp, Unknown; identical to SEQ ID NO: 19858
  misc_feature (1)..( 3003): 2750-1469P.txt file - cDNA_ID_1823487; gDNA_ID_2926159; Annot_ID_139633

SEQ ID NO: 19860 - DNA, 3000 bp, Unknown; identical to SEQ ID NO: 4213
  misc_feature (1)..( 3000): 2750-1469P.txt file - cDNA_ID_1823491; gDNA_ID_1620691; Annot_ID_48596

SEQ ID NO: 19861 - DNA, 3000 bp, Unknown; identical to SEQ ID NO: 4213
  misc_feature (1)..( 3000): 2750-1469P.txt file - cDNA_ID_1823491; gDNA_ID_1620691; Annot_ID_164773

SEQ ID NO: 19862 - DNA, 3000 bp, Unknown; identical to SEQ ID NO: 4213
  misc_feature (1)..( 3000): 2750-1469P.txt file - cDNA_ID_1823491; gDNA_ID_2926159; Annot_ID_139632

SEQ ID NO: 19863 - DNA, 3000 bp, Unknown; identical to SEQ ID NO: 4213
  misc_feature (1)..( 3000): 2750-1469P.txt file - cDNA_ID_1823491; gDNA_ID_2926159; Annot_ID_198621

SEQ ID NO: 19864 - DNA, 3000 bp, Unknown; identical to SEQ ID NO: 4212
  misc_feature (1)..( 3000): 2750-1469P.txt file - cDNA_ID_1823495; gDNA_ID_1620691; Annot_ID_48595

SEQ ID NO: 19865 - DNA, 3000 bp, Unknown; identical to SEQ ID NO: 4212
  misc_feature (1)..( 3000): 2750-1469P.txt file - cDNA_ID_1823495; gDNA_ID_2926159; Annot_ID_139631

SEQ ID NO: 19866 - DNA, 3000 bp, Unknown; identical to SEQ ID NO: 4211
  misc_feature (1)..( 3000): 2750-1469P.txt file - cDNA_ID_1823503; gDNA_ID_1620691; Annot_ID_48592

SEQ ID NO: 19867 - DNA, 3000 bp, Unknown; identical to SEQ ID NO: 4211
  misc_feature (1)..( 3000): 2750-1469P.txt file - cDNA_ID_1823503; gDNA_ID_2926158; Annot_ID_139628

SEQ ID NO: 19868 - DNA, 3003 bp, Unknown
  misc_feature (1)..( 3003): 2750-1469P.txt file - cDNA_ID_1823507; gDNA_ID_1620691; Annot_ID_48588
gtcatcctcaacaccttctcaagcgtctcacgcatgttccaagttatactgatggaaaatgttgtttgtgtggaagcaaacttcataacttgttttatcactgttctatttgcaattttagcgtggatgtcaactgtgaaaaaaatccaccctctttcactctttttcaccctaaagctcatgagcataagctcactcttatgccgcaacgaagttttgtatgcagcgcttgtggaatggatgacgatccaaatccttacgtatgtcctcagtgtaatttcatgattcacagaagttgtattgatataccacgcgttattaagatctatcgtcatgatcaccatatttgttacaataactttcttgacgctggagattggaaatgtggaatatgtcataaaaagataaactggacatgtggggcttattcttgttcggaatgtccagatcttgtcatgcacttgagatgtgccacaagattcgggatatggaatgggattgaacttgaaggcatatcaaaaaatactctaaaagtcaaatcatacgaggagatcgaagaaggggtaataaagcattttagtcacgaccatactttaaagtttaaagaagggagtgatggtaacggtgaatgcatacagtgcacaatatgcacttatcccatattttctaatccattttatagttgcatggagtgtgatgatttcatccttcataaaaaatgtgtggatctcccaaaaaagaaaatagattctttctacaagatgtcgacctcgctaatcacaaattatcagggtaatgcagaaaacatttgcaatgcttgtcaaaacatctatcaaggtttttcttacttaagtgatgatggaaacactttattggatgtgcgatgtggttctatttccgagccttttttccatgaaagtcatcctcattcgttatacgtcagctacttaacaggcggccgattttgtaatgcttgtagagaaaaagcaacaatggttttgagttgtgaggaatgtgaatttgttttagacattaaatgctctactctgccaaacattgttaaacacgaaaatgataaagatcatttgttgtctctatgttatggagaaaacaaatgtgagcaatgctggtgcgagatgtgtgaggagacaataaatccaaagaaatggttttattcatgtgatcattgtggcattgcttttcacatcagatgcacacttggagacttcatatggtttaaaccggaaaaaaaatctgaatcatccaccaattgtgtgattcttaataatcgtgcaagtcggccattttgttattcttgtaattctcgctgtaaatacccatccatcttgtttttctatgggaaaacattgtgttctttgcaatgtttccaacaaaaagtttatgcaatcctggcataaatcttatttattttctcaaatattttatgataaaaaacaaattagattatgtgttgcatgttaatactatatatattttaagcatcaagtatattaaaaaaaaatttatgtgcaatttggaattcaattcgatttaggttggatttctttttatttctttgttatacttttggtttagaaataatagtattcaaaacaaaatataatatactttaagtttcgatatgtattcaaatctaatcaaatactaaattttataccacgtcgtgcacatgatgattttcttttgaaacaatttgtgaattttgataagggtttattggtaacgagtgtttacttgttgctgtaagaactttttttttgttttttccacaaaagttggattttattgaactgaaccaatcaatatgggctaatataaacaaaagccgtataactataattttacaagaattaattaaagcccaacatgagcctaaacataaccctaatgaagaggaaaatacaaaaagcctccatcactaacacgtgtttcaattagaacaaacagagagcttccatcacagaccgactttaaccttgccgttcaccaccgattccggtgacaagagtcatcgtcgatattaatttgttcagtaaattttgtggtttttcaccgtttaacaaaatcggagcccataagaggataacagctaaagggaattgatagtatgcttcagttcttctacttcttctctttaattaaaattgcaaatcactgggataattaaaaaacctttcccaattaaaaaaccaaacactcaaaagataaatcagtgaaaacaattgattagtgaaatttactaaattgcaatcaccaatgagaaatcccatgaaattatttaaagcaaacaaatatggaagccgactaaaagatgttaacgaaaccatctatgtcagttgataagctggacatcactgcgtgggaagccaatagattccagacggaagccgaccaaagatgttaaagaaaccatccatgtcagaagagaagccggaaatcacggctgaggaagccagttgattccggacggaagccaactatcttggctaacagagtcataagatgctggataaaagcccgagtcatacgagacggcgatttactgaaaaattcagtcggtagaaacagagttcatctctgtaaaagatatgtaggaaaaaagagagaactttttgttttgctgtaaagaactttggatgcaaatgtttttactatttgtgaaactattattttatatttatagccaaatttaattttttaactaaacaaaaattatgccgtccatatagtatcctgtaaattaagttttagattattaattttgttaattattgataaaaaaaactcaaataatgtcatattttctcttaattcaaaagttaattgtgtataatttgattggttcccccaaaagaaaaattgattggtttagtgaaccgataaatccaatctcgtaccgaccggttcaatgggttttgtatttgctcctctgtgctctggcctctacactttggatagctgccgccgaagttttgtgcaatg

SEQ ID NO: 19869 - DNA, 3003 bp, Unknown; identical to SEQ ID NO: 19868
  misc_feature (1)..( 3003): 2750-1469P.txt file - cDNA_ID_1823507; gDNA_ID_2926158; Annot_ID_139624

SEQ ID NO: 19870 - DNA, 3000 bp, Unknown; identical to SEQ ID NO: 4207
  misc_feature (1)..( 3000): 2750-1469P.txt file - cDNA_ID_1823517; gDNA_ID_1620691; Annot_ID_48585

SEQ ID NO: 19871 - DNA, 3000 bp, Unknown; identical to SEQ ID NO: 4207
  misc_feature (1)..( 3000): 2750-1469P.txt file - cDNA_ID_1823517; gDNA_ID_2926158; Annot_ID_139621

SEQ ID NO: 19872 - DNA, 3000 bp, Unknown
  misc_feature (1)..( 3000): 2750-1469P.txt file - cDNA_ID_1823525; gDNA_ID_1620691; Annot_ID_48583
cagtaaattacaacatttgtttaggcactttttcggttgatacacctagtcttgtttacttctgtttcactgagtatgttgctatagactaccctgtagttataatgcaaaacttatttgaggctagaatcagccttttggtaactcaagatcaaatcgagcgagcaagagcgccaaatatcgattgggtggaggatgatgttgttctccgactagttaatatggagaagctcataaaaggcatacgtaatgttcagtatatgtacttgtctccgaatactctcgaggtcagttagcgttaaagtcatgttttgagacatgtaatggcaaaaagtctaatagtgttttgtcttgttttcaggttctttctctgtgttgtgaatcgatgccagtgttcaacaatctcaaatcgttaactcttaagagtcacaagagtcgaggatggcaagcaatgccagttcttctaaggaactgtccacatctagaaactctagtccttgaggtatagttacaagtcatttttgccaaacgtgtacagacaagttttgaactgaataccttaactgtctcctttatgctttcagggtatcttgcaccatgtcacagataaatgtgggtatgcttgtgactgtgtttcccgagaagaaaaaggttgttcactcacatcttgtccagtaaaagtgttagagattaaagggtttcgaggaacgataaaagagatgcacatgataaagcatttcgtgaactattttccttgtttgatggaaacaaatatttatattgaagagagtggtcctccaaagctcagagtcccccaagtgtgtgaatttatcgcggagatgatggaacactacggaaaatcatccagtttcaatgtccagctcctagtgggtggttacttgtataagaagtggactgcacaatgaagtctttaaagaacaaaagtttctcatagttatgccaaagtctcttttaacctgttttaaactaaaccaatcgggaaactgtagtttcttttcgtcttcttcaatttccaatgtttacagtcatttactattgatcgccatcaattttctttgagttgttcatcgttaaagctaaatggacaaaagtacagcagaagcctaacttaaagcttactaccgcaaaacttaacatgttcaagaaaccaaacgaagtttactatggcttgtctagattttgctctctggagttggatgttctctgcaaatggaaacctcctggtttcatatacgaaaacaagccttcatatcttgaaaatagattgcagctgtataatgtgactcaagctttgtcgagcatagttttatagttgtgatgtaaaaaaggtgtactagctagggcacattgatgagtcttcaaggaagaaaacttactcatagttttgttcggaagctaaattttagttatgatttcatttataaattataatatataaactctcttcttctttttttcaaattaaaagctttccagtagccaaaatatagtagcatatttgatgctgatttctaataactgtaaataaaatttacataaatactttttgaagatatcaaattatttatacataattccactagatataattagatgataaaataaaatataatgtgattacttataaatataattaaatccgattacaaaaacatattttgaatttattctagagaaatattatttttgtaaataattaattgaatttataataacaatatacttaatctaatcacaactataaaatgaagtgcttgtcggaattttgttgtatgaagtgcatttggatttcatattcatgtatcattttattctgataatagagaatacataaaatgaggaattaattagtaatgactacattggtatcaccggatatggaagactcttgagattccaaacctgtaggatggcagcaacaccgaccgatcgtttggtgaacatatttttgacaaaaccctcctttgctgaatcctttaaatctacaaagttcgttgtatgtcatatcgtttgtacattttgatcccgctatacagggtatgacttcgactgcataaacaaacacattagcaagatattgtaagtaccaaaatgatcaattcctagttttatgaatttgtattatagtgcatgcatgtttatgtttctgattccagggaattttgattatttattttgactccggcaaaatatgtgttacctgaaattattgatggaaggatgagagcaaacaccatcaacaaaactaagagaaaatatgaaaacttctgagtggccattgtttatgttgctagagaatacaacaaaagtttgttagaatattcttgagaaaccaaaaaaaaactgtagaaaagtacactgatagtaagaatattagattttacaaaaatctgaaagatgttattgactctctttgagattcaagtggtttcctttcaacatttcttatgaaattatacaacccaatttacctttctttttgatatattttgatgttgggaattgactgtttatgttttggctatggtttttctatactatggcttatatttattattatttctttctcttatttggttatttaaacaatgatgatttggtcaaaggggttgttattaatttatgctcaggttcatgattatgattaaatagttttgttgaccaccattttatctgaaggggttataattttttttcctgtttagataaatagttaagctgactacaattgtataagacttgcttctaaacgttgatagaatctactttaattgtttcgcaaaccggccggtttaaattgagtggccgatctaaatccgaacacttaaaccaaaacctaaatccggtttaagttgactgtacatttgtcacctcttcttcttcaccaactaaccccatttctgcttcttcttctgcttagagacagagaaatagagagagatcgcgtcggcacaatctgcaatttccaacatcgacatg

SEQ ID NO: 19873 - DNA, 3000 bp, Unknown; identical to SEQ ID NO: 19872
  misc_feature (1)..( 3000): 2750-1469P.txt file - cDNA_ID_1823525; gDNA_ID_2926158; Annot_ID_139619

SEQ ID NO: 19874 - DNA, 1755 bp, Unknown
  misc_feature (1)..( 1755): 2750-1469P.txt file - cDNA_ID_1823529; gDNA_ID_1620691; Annot_ID_48580
aagcttcctccttcacgttattagccactgacagcatcagaaaggttctctagaactctagaacctaagcaaatgtcacaatgctctcgattatcttattactcaccaaagataagctccagttttttgaactagttaaatgtattataattagaacgatgtgagacttttgcttcaaggtcgttgagtgtgagaaatggttttctttgatgttacctggtaaagatgccatgaagcataagcatccgttgttgtttatgctcctttgacctcccaattcaagcctaattctgtttggcttcaggagctgcaaagtaacagtttttaaagcgaaatataaccacattcccaaagttctaaatagaaagaaaaaaacaagctttgaaatcaacaagataaggtggataatgggtacctctttgcaatcaagtgtctcagttagcgaggcacggccccatttttctgaatcaaggtttttgtgggctaaacgtaaaagatcttcgacatctttgatggatacaccattgtcatggaaaagcttaacaaagtcacagtcaattcaaacaccacatataagaactaagttaagtatgagcatatccatacttaactacagaataatattgtccaacatgaactttgatcacttcaaaaccttaacaagtcaatagtcaatgtatagatttcttagctacagaatcagtagctaagtatggatatgctcatatactaggttgttgtatcagaattgtaaaatttcttggcctggtttataaagtggtatgtgtttaaaagaaaaataaaagaagtaaaatgttatattcaagattcatggggcacattgtgaccagtaaaggactcgataaactcaacaattttgagggctttgggtgtggtcaaccgagtgaaactgtgcaaggaagcacgctcatgcaacttgaagttttaatgtatgtcttgttcgttttgtaattttaaatctctgttggctgcggtgtggtgtgtctccgtttagatgcagttttggttccggtgtgtcatgatgtagtgctaacctttaaccttctttataatcaggatatgtagcaatgctcctccattagctctaactcaccaaagacaaactttgtgcagccagttccacgtaaaaagtggggtttgtttgtattattacctgatgatatataatcggttgctgcttatttaacagaggatgcatgggcctcctagtttccgaacctgatgatgttcggtttcaagagctgaaattgaattgtaacagaatgatcaatatagttagaccagttgtcactattgttctgtagactcactatcggccacatatatacaaaggactagattctaagcatcactataaaaaaaccaataaactttcagagggtttctaataaactaaaagatttcaccataacagtggcggctggtgccacagctcacacgcctgtcttcatcaactcaggttccagtttcattctcacacggcatttcaatctctagaacgagggaacacatgcaacaaaagcctcaaagattaacctccaccacacggcaagagaactgcgatgaatagtcaaaggaatattcgattttctgtggaagcgattagtctttacagaagaattttcaagtcaagctttaatttatttcgaaaatatggagacaatccaatgatcaattcgtttcacagaaaataaataaaaaccaatcacagaaaaaacattctacagcaagatg

SEQ ID NO: 19875 - DNA, 3003 bp, Unknown
  misc_feature (1)..( 3003): 2750-1469P.txt file - cDNA_ID_1823529; gDNA_ID_2926158; Annot_ID_139616
caacgctttcacaggccatattccaccatctctatcaaacttgagcaatctccaatcattggatctatctcaaaacagattatccggcagtatcccaggagagctcggggaactcacatttctagcgcggatgaacttctcttacaacaggcttgaaggtccaataccacaaaccactcagattcaaacccaggatagttcttcatttacagggaatcccagtctatgtggtgctcctctcgaagaaccctgcggccgagaagaagatgaagaagcaacgaagcaagaacaagatgaagacaaggaagaggaagatcaagtatttagctggatagcagctgaaataggctatgtacctggtttgttttgtggactcgccatcggccacattctcacttcatataaacttgactggttcatgagaatcttttcctgcttttcttctccgctgataaaatgatcaataataagtgtctcctacttttctcattacctatatctattgtgtcgctgaaaccttcaagatcttgtttctattatatatactccttattttccttctagtatctaccacctcatcttccatctcttgagagatattcttacgtactctacgcttattaggctccatttatggtaactattcggtctatgtggttaaaacttatgattgctttgcttttgactgaggctgactggctgagactctgagagttagtcatactatacttagtagtcatgtcagaaaatattcctctggtgtggcgaacctaaagtcgaaaacatctctattcaaaagtcgaaaacattctacactagtgctttaatgtgttttcagtttcagtttttttgtttccttgttgtgatctaagtcctttctttcaagtgttttgttcctgatttgctttgattcgagcctcttgtgtggagaagtttcctctatttatcagtgtattgtgctttgtgtttctaagatttgttcatgaaagagtttgaaaagagttttctcaagtcttttacatcggtattccaagtttaaatcaacgtactaagaagagcttaccatggagcccattaggttccacagagacttataagccgagagtgagtactgattaaatggactagcaatagcaactagatacaatgttcatatctattttgcaaatcctctaagagatgcatctagtatactagatttatatcatcattttaattactaactcttggggttataggctaatctctaagcttcctccttcacgttattagccactgacagcatcagaaaggttctctagaactctagaacctaagcaaatgtcacaatgctctcgattatcttattactcaccaaagataagctccagttttttgaactagttaaatgtattataattagaacgatgtgagacttttgcttcaaggtcgttgagtgtgagaaatggttttctttgatgttacctggtaaagatgccatgaagcataagcatccgttgttgtttatgctcctttgacctcccaattcaagcctaattctgtttggcttcaggagctgcaaagtaacagtttttaaagcgaaatataaccacattcccaaagttctaaatagaaagaaaaaaacaagctttgaaatcaacaagataaggtggataatgggtacctctttgcaatcaagtgtctcagttagcgaggcacggccccatttttctgaatcaaggtttttgtgggctaaacgtaaaagatcttcgacatctttgatggatacaccattgtcatggaaaagcttaacaaagtcacagtcaattcaaacaccacatataagaactaagttaagtatgagcatatccatacttaactacagaataatattgtccaacatgaactttgatcacttcaaaaccttaacaagtcaatagtcaatgtatagatttcttagctacagaatcagtagctaagtatggatatgctcatatactaggttgttgtatcagaattgtaaaatttcttggcctggtttataaagtggtatgtgtttaaaagaaaaataaaagaagtaaaatgttatattcaagattcatggggcacattgtgaccagtaaaggactcgataaactcaacaattttgagggctttgggtgtggtcaaccgagtgaaactgtgcaaggaagcacgctcatgcaacttgaagttttaatgtatgtcttgttcgttttgtaattttaaatctctgttggctgcggtgtggtgtgtctccgtttagatgcagttttggttccggtgtgtcatgatgtagtgctaacctttaaccttctttataatcaggatatgtagcaatgctcctccattagctctaactcaccaaagacaaactttgtgcagccagttccacgtaaaaagtggggtttgtttgtattattacctgatgatatataatcggttgctgcttatttaacagaggatgcatgggcctcctagtttccgaacctgatgatgttcggtttcaagagctgaaattgaattgtaacagaatgatcaatatagttagaccagttgtcactattgttctgtagactcactatcggccacatatatacaaaggactagattctaagcatcactataaaaaaaccaataaactttcagagggtttctaataaactaaaagatttcaccataacagtggcggctggtgccacagctcacacgcctgtcttcatcaactcaggttccagtttcattctcacacggcatttcaatctctagaacgagggaacacatgcaacaaaagcctcaaagattaacctccaccacacggcaagagaactgcgatgaatagtcaaaggaatattcgattttctgtggaagcgattagtctttacagaagaattttcaagtcaagctttaatttatttcgaaaatatggagacaatccaatgatcaattcgtttcacagaaaataaataaaaaccaatcacagaaaaaacattctacagcaagatg

SEQ ID NO: 19876 - DNA, 3003 bp, Unknown; identical to SEQ ID NO: 19875
  misc_feature (1)..( 3003): 2750-1469P.txt file - cDNA_ID_1823529; gDNA_ID_2926158; Annot_ID_198574

SEQ ID NO: 19877 - DNA, 3003 bp, Unknown
  misc_feature (1)..( 3003): 2750-1469P.txt file - cDNA_ID_1823536; gDNA_ID_1620692; Annot_ID_48622
ctctcagattgctatgcccactttttcttcccttcttagtatcttccaccatttataatggccaacaatactagctcctatttcatttcgaaatttttgaacttttgaatcatcattcaattttgactataatttatgcaaatttattgcaaccactaaaattgttagaaaactcaacacccagtgctagtataaagagattatatatacaagggtttatatttctcttaataactagatattaattaactaatccattctaaattttgtgttaattgcactagctagtaaaacttaagctagcttaaaactcaacctcacgcttgacttgctgctgtgtacttcatagctgacatatagccttagcacttgtggtcggatagctaaaatgttatattaggtttttaccttaagaatatgtaaaattgtattgaaatatttttataacaaattgtagtgaaaaaaaacaacaacaaatttgatggtcgtaaagatatgacctcaattctagaacaaaaataaactaagtggctaaaaagaaaacaaaaatgaatggtcttattctgttgttaatcctctaaatctctaaaacaattaggtctgccaaaaaaaaaaaaaaaaaaaaaaaaaaaacaattaggtctgccattttgataatcctctaaataaatgtgggctcaattcctaccaaaacatgaaataattatgggcttaattgtccgtatggcccagttaccttataacttcccccccccctccccatggcccagttacctttcttattcagctatttcagagtcttttttaaaaaaaataaaaataaattaatttgagtctttgcgctgacttttgcttcctcgtgattttttttttttttttttcctcatgattctttctcttgcgcaaattcttcctccattgttacaggatcaaatttggatgacaattttaaaatcgttgcacataaacgtctcatttccatttatgtttaccatttttctttttttttaaatcaacagataagaattgtagtatgggtactggtagtggtgtgaggtctacgcatatacttgaattgtctcaagtctcaacaataaagagctctggaaccgacattttggtaatgtcagcaacattacatccaatcatattgttatattcatataaatagtattctcagcaacacctatgaaatgtacaactacaaactgattcaagaatactcaataatataacgactgtattcaatattccaaatataattcagcttgtatattaacattttaataaaaaaaaattggacgccactacaaaaataataatcatctttatcactacaatttgttagagactttcttgcgtatcaaattagatatacgaaaattttcaaggcaaacatgtaaggtagggtaatcacaaattattttcctacacaatgaatctagtgaatatatattataaagatgagggttttgttacatgctcaaagatcttggcgaccgcaaattgagaatttcttgttccaggtctggcagctttctgtgtgtttgtagcctagtaggggtcagctcttagaatcgtagttgtgatgaaaacagaattgtcgtagttgtcatgaaaacagaattgactaattaaaaactcttgatagtttcaaattcttttagaaccaacctccaaaaatcatgccgttcgttgattcatttcgttaccgaatttgattttatgcaaggccttggtcttatggacctgagatttaatgttgggcctcacatcaaacgacttttcaagatggattagtaaaaacagaagcacatattttttgctttaagaacttaaattactctgtttttgtatggatctttagaaaacctcaattgttttccaaaagtagcctaaaaagactttaagctcacgaacttaagtcacatggatttttgtaaataattaaacgatttaataaaactaatgaaatgataggaaaatgaccgatatacacaattgatttaaacaattgaattcgagtagttatgattttgataaaatgaaaaaggactgtttgttccctctatgatcctaaaaatgtcataaaaatgaaaaaggaaatatgaatttgataagatttacagcgaacaagacaaattggaaaaaaaggaaagaatgaatatacagatacgttaaaatgaaaaagatatttacgtcaatctattgattattaaaaggttaattttgtcattaaaagcaaaagtgctttgccaaaggcgtgctacgtcacgtaaattatacaacactatgagggctttttggtaattttacaggaataaagctaacctcataatatatcttctgcaattccgtccacccaaaacaactgacatggaaactactttttaagtttgatacaataaaataaatatacttatccggtcaacatttttattctgatgaagtaaaaatattactaaaataacgaaaaacacgttttctccaaatgaaaaaaacgaaatttacactgaaatgtttttttttgtaaaaaaaagatgtacttattcttttagtacattaataaattagaataaaaattttaattgattaaatcgctagttgctattaatcagaagagctgagctacttctaatgcttttttacagagagatgctttcttcttctttctctcgaactttctctctctaaatattttgtttcgttttctctctctctctctatttactttcgttctctctattttttttgtttggtttagcttatttgtgaagtgttaaatcttcttcagtttctggggaaattaggtggggaggtgaaaaagggggaaatataattgaaattgggttctctctgctgtgcaataataatttctgagaggattgtgaagaagcgcttttatgtaagaagatatctcattattagttatttacatgagaatctgacattcttaacaactgtctgtggggttagttttgtccaaagaactatacagagatg

SEQ ID NO: 19878 - DNA, 3003 bp, Unknown; identical to SEQ ID NO: 19877
  misc_feature (1)..( 3003): 2750-1469P.txt file - cDNA_ID_1823536; gDNA_ID_2926202; Annot_ID_141564

SEQ ID NO: 19879 - DNA, 3000 bp, Unknown
  misc_feature (1)..( 3000): 2750-1469P.txt file - cDNA_ID_1823543; gDNA_ID_1620693; Annot_ID_48633
atttgacgacagaggaggtactgtttctaattttccatacctttgctaatcaagtatttatgtccttctctacgccatggtaacgttttatttttctgttggtagattaaaattctatgcgatgatcttcctgtcttggggaagaatgacttcaagcatatcctaaagtaagaacagtattattgactccttcatggatctttttaatctttatgtctcacttgttaatttctaagcttttccaaggatgtggtagagctttgactaaaatgaattcagctattgtagaattagttagctgtaaattggttcggtaaagaacggtttccttagcacttcaagtttttacctatgctgttttgagtgctcaacccgataaagcactgtgtgaaatgggtaaacgggtgtccatgggtgttaggaattggcgtgtgggaaactactggttttgttaagactttagcatttgtcgtcatccatctatgcgtctagaaattatattagttgcttaatggtcattgaactctctattttgtagatggcgaatgcaaatcaggaaagctctgactcctgagaaaaaggaagttgctaaacctgagcctgatgtgggaaaggaagatgaggaaaatgaagatgataaactactcaatgaattggaagagctgacaaacacagttgaccgcaagaagaaacaggcaaagaagattcttgcaaaacgaagggctaaggttatttttaaccttatgataataacctatcaagtctttatgtcttagtcagtggccttagtgatggatcccttagactttatacttccttcactaaattcaatatcttttgccaggacaaggcgcggaaggcgactggtccacagatggatgtacttgaagatggtttcgtcgacaatgaattgttctctcttaatgctatcaaggtacttcatttttgataccatctctgcggaattttgtttattatgatggcattcgaagaagtgtttattactctttcattggttgaagagcattctcctttcaccctgctatcagttcttacaattcaattgtttgaacatatcattatattctgaatgagattgtaaagattttcatttattttctttacagggaaagaaagatctaatggcagttgacaatgatgaagatgataatggcaatgccgttgacagtgagaacgaagaccatggcgaaggagcttcagatgactccaaagacagtgacagagattctgatgaagaacgtcagaagtacgaccgctaaacctatacctttttgtagattatagagtgctgttacaagaacgtcgtatatttctgaagtttgtggagttacttcatcttaatagtctttttaacattacagatacactgaacaaatggaagagatttttgagcaggcatatgagcggtatatggtgaagaaagaaggaagcgcaaagcaaaggaagcgggctaggcaggcccatgctgaaaagctggaggtactatcattttcttaccccaatttcttaggatagaacagatttttggaactaaacacttttttctttttggctttgcaggaaggtgatggagatgaagaaatgaagatcgattacgattcagatatgaatgaagaaaaggatgaggcaaaccctcttgttgtaccacttgatgatggagtggtccaaacaaaggaggaaatatccaaccagtggttcagtcagaatatatttgcagaagccgtggaagaaggagacttgggaaaagatgacagtgaagacgaaatagcaaataagaaaaagagcaaaaatctgtctaaaccagacaagtcaaagcagaaggcttcaaaagcaagtgtgttgtctgatcagagcttgcccaatagctccaagaaggaagatgagtttgaggtagtccctgcaccagccacagattctgactcagattcatcctctgaagatgatgttcataccaaggccgagatactggcatgtgccaaaaaaatgctgaggaagaagcagagagaacagatgcttgatgatgcatataacaaacacatgtttgtagatgaaggtttaccaaaatggtttgtggatgacgagaagcagcacagacaaccaatgaaacctgttacgaaagatgaagttaatgcaatgaaagcacagttcaaagagatcaatgctcgtccagccaagaaggtggcagaggccaaggcacggaagaagcgagctgcccagaaaagattggagaaagtgaggaagaaggcaaacacaatatctgacacagcagatatatcagaccgttcaaaggacaagatgatagacaagctatacaagaaagcagcagagccaagaaagccaaggaaagaactggttgtgtctaagaaaggagttggggttaaagttggtaagggacagaagagagtggataggaggatgaagagtgatgataggaaacgtgggggaggaaagcccggtaggaacgggcagaagggcactggtaaagcaggccagaaaggaaaaaggcctgctgggaaacctcggggaaggaaacccgggtaagacctcaatgtcgaatgaggcgaacaggaagttttgttacgtattttaatttaagttttggcaattcttgacttctggatttacttgtttactctgataatctgtgttcgtggtgtcctaagttaaaacttagtggatctatctatcttgtttatcaaatttaccgtaatcgacaatgttcttgtaccatggaagttcctaatattcacatctggattgagaacagtagtttaataagcttccaatattgaacgatcgatttaaaaaaagttttctaaaaaagaattcaatttttccataaaaagcaaaaacacaaatgagtcaacaacacactttaacgcatttctcaaaattacgttgccaaagtctggtcagagctacaaatcaaatttgacagactgcaatttccaatccaacgactgcgaatgaagtttaatg

SEQ ID NO: 19880 - DNA, 3000 bp, Unknown; identical to SEQ ID NO: 19879
  misc_feature (1)..( 3000): 2750-1469P.txt file - cDNA_ID_1823543; gDNA_ID_2926187; Annot_ID_140858

SEQ ID NO: 19881 - DNA, 3000 bp, Unknown; identical to SEQ ID NO: 4260
  misc_feature (1)..( 3000): 2750-1469P.txt file - cDNA_ID_1823551; gDNA_ID_1620693; Annot_ID_48631

SEQ ID NO: 19882 - DNA, 3000 bp, Unknown; identical to SEQ ID NO: 4260
  misc_feature (1)..( 3000): 2750-1469P.txt file - cDNA_ID_1823551; gDNA_ID_2926187; Annot_ID_140856

SEQ ID NO: 19883 - DNA, 3000 bp, Unknown; identical to SEQ ID NO: 4258
  misc_feature (1)..( 3000): 2750-1469P.txt file - cDNA_ID_1823557; gDNA_ID_1620693; Annot_ID_48628

SEQ ID NO: 19884 - DNA, 3000 bp, Unknown; identical to SEQ ID NO: 4258
  misc_feature (1)..( 3000): 2750-1469P.txt file - cDNA_ID_1823557; gDNA_ID_2926187; Annot_ID_140853

SEQ ID NO: 19885 - DNA, 3000 bp, Unknown; identical to SEQ ID NO: 4256
  misc_feature (1)..( 3000): 2750-1469P.txt file - cDNA_ID_1823561; gDNA_ID_1620693; Annot_ID_48626

SEQ ID NO: 19886 - DNA, 3000 bp, Unknown; identical to SEQ ID NO: 4256
  misc_feature (1)..( 3000): 2750-1469P.txt file - cDNA_ID_1823561; gDNA_ID_2926187; Annot_ID_140851

SEQ ID NO: 19887 - DNA, 3000 bp, Unknown; identical to SEQ ID NO: 4255
  misc_feature (1)..( 3000): 2750-1469P.txt file - cDNA_ID_1823565; gDNA_ID_1620693; Annot_ID_48625

SEQ ID NO: 19888 - DNA, 3000 bp, Unknown; identical to SEQ ID NO: 4255
  misc_feature (1)..( 3000): 2750-1469P.txt file - cDNA_ID_1823565; gDNA_ID_2926187; Annot_ID_140850

SEQ ID NO: 19889 - DNA, 3000 bp, Unknown; identical to SEQ ID NO: 4273
  misc_feature (1)..( 3000): 2750-1469P.txt file - cDNA_ID_1823586; gDNA_ID_1620694; Annot_ID_48644

SEQ ID NO: 19890 - DNA, 3000 bp, Unknown; identical to SEQ ID NO: 4273
  misc_feature (1)..( 3000): 2750-1469P.txt file - cDNA_ID_1823586; gDNA_ID_1620694; Annot_ID_164877

SEQ ID NO: 19891 - DNA, 3000 bp, Unknown; identical to SEQ ID NO: 4273
  misc_feature (1)..( 3000): 2750-1469P.txt file - cDNA_ID_1823586; gDNA_ID_1620699; Annot_ID_164996

SEQ ID NO: 19892 - DNA, 3000 bp, Unknown; identical to SEQ ID NO: 4273
  misc_feature (1)..( 3000): 2750-1469P.txt file - cDNA_ID_1823586; gDNA_ID_2926208; Annot_ID_141854

SEQ ID NO: 19893 - DNA, 3000 bp, Unknown; identical to SEQ ID NO: 4273
  misc_feature (1)..( 3000): 2750-1469P.txt file - cDNA_ID_1823586; gDNA_ID_2926208; Annot_ID_202408

SEQ ID NO: 19894 - DNA, 3003 bp, Unknown
  misc_feature (1)..( 3003): 2750-1469P.txt file - cDNA_ID_1823594; gDNA_ID_1620694; Annot_ID_48642
cttgtcttctcatctcctacactagcaacactttccccacggttagctttaaagttctcttcttttactttgatttcgtgaaattttagcttggtgaagttggttttgttgttgaagcttatgagttggatttagtcacaagtatttgttaggttttcttaaagtcttcttctttctgctaccttagtgaatgtactgatgtgatctttaggatttgagagactcagagattcatgtaccgtagcaatgttgttgatctgtttaatgatcttagaaagagtgttaggtaactttctgtaaggagattttgtagctgatgttttagtggaattttctatgtgacaggattatgtgccaactgtgttcgataatttcagtgccaatgtgattgttgatggcaacactatcaacttgggattgtgggatactgcaggcaagttgttaccttggatttttttgtcttttgaatttcctcctcttccagagagtcatttgtgtttttgacttggtgaaacagggcaagaggactacaatagactaagacctttgagctatcgcggtgcagatgtcttcttacttgcattctcacttgtcagcaaagctagctatgaaaatgtttctaaaaaggtttgatctgtggtcttctcctgaaacttctttcctgttttattcagtttacattcagtgattctgatagaatacatttggtatcttgcttttgattcttagtgggttcctgaactgagacattatgctcctggtgttcccatcatcctcgttggaacaaagcttggttggttttttcttagctcaactcttaatcgcctgattatcgggggttttctgttttggggaactcttctgatattttgatgactgagtctcgtacagatcttcgagatgataagcaattctttgccgagcaccctggtgctgtgcctatctctaccgctcaggtacctttctcattatctttctaaactgaatcctaggtgttaatattctgcatgtttcatattttgatggtatcaaaacagggtgaagaactaaagaagctgattggggcgcctgcttatatcgaatgcagtgcaaaaactcaacaggtattaacctgagagtcaatatctttatctaatctttacctgtctaaaaccgccaattgaatctgctgatgattcctatatctgttatctgttcaacagaatgtgaaagcagtgtttgatgcggctatcaaggtcgttctccagccaccaaaaaacaagaagaagaagaagagaaaatctcagaaaggttgttctatactctgattcaacaagaagaaaggaatcaacaggagaattagagctataagtatttgttttctcctttttcataacttgtttacccaaggaatcaaaaatctgttgtttgtagtctgaaaatgacaaaagttgaagaactagtaacaagtatttgtattcttgtttgcattttgatctgtaaatataccacgaatccttgatttctctgtttcctagattcacaccaattgtcttaaggattatgttccaaacctaaagacaatgagagcttacacgcgcgaaccaatgagaatgagagagcacttgtctttcttggacaatagtatctaaaccagcttatttgaaaccttctgaatgagccagagtgtcttccatacatatcaattccacatagacctaacctgatctttagactataatcttcaatgatttcagaacctcaaaacttttgattttacatttttaatcaaatttatttgatattcattttgcttattgactagacgttttccccttggagataatagaatgattgattttaactctcaccggaaaagacaaaaaaaaggaaaaataaatcattgattaaataaaatttatggtgaataagcttggcttctctttaccaaacatatatgtttgttgatcaatctctttctttgcgttatctgccccttgatttagacccacgtattattcgattcctaaactaattgaaatgattagatatgtgtcatgacgtttagtgaactaatattcacctaatatgtctttcaatcacttaagaatttgcattattcttgtgaaaaacataaattcacatgctgctagtaaaatatgttaacaaatcaattaaacatcagaaaataataactgagatcttcataaagaaagtggaagtttttttaaatatatgaagaagaaaagtgcgtagtgtgcacgggacttagttcatttaattctcgagccattgccgtacggaggaggctgccttcaaggcttaagtcgaggcgtgttcgttacgtttaacccgcaatagccggtggctacacactcacaaatcccctttgactcaccggatatcgacggtttcccgctattttttcccctaactaactttttttccttttcttgtaaaactcttaaaaacaaaactcggtgttgtctctttgtttgctcactccttttctttctctctctcgccgacactttcattctcacttgtgttcgtacgtaatgttcttgatccggtaggtttttatttgattataaactcatttcatttaacaaattgagtccatctctctatgattcacccataagatgatagaagaagatcaacatttacgtctgagataaatcatgtcctttaatgtatatttgtttattttctggtcaatcatcgatctttcttagtcgtagcagttacacaatgctgatggtacatggcggcagattttcgattcttattatttaaagaccaaatttaataatagatgtatgtacaacgagttttggtatcactatcttgtccggtaatgctcattgtttatcttttaaatctacgtcttcttctgcataattgacacaaatcacttgtttcaatggagtttttgtttgtttgatttcctctgttacttatgcagcaaaagaagaaattgagtttaaaggagaagtgtgagaaggaagtttcaggaagatg

SEQ ID NO: 19895 - DNA, 3003 bp, Unknown; identical to SEQ ID NO: 19894
  misc_feature (1)..( 3003): 2750-1469P.txt file - cDNA_ID_1823594; gDNA_ID_2926208; Annot_ID_141852

SEQ ID NO: 19896 - DNA, 3000 bp, Unknown; identical to SEQ ID NO: 4271
  misc_feature (1)..( 3000): 2750-1469P.txt file - cDNA_ID_1823598; gDNA_ID_1620694; Annot_ID_48640

SEQ ID NO: 19897 - DNA, 3000 bp, Unknown; identical to SEQ ID NO: 4271
  misc_feature (1)..( 3000): 2750-1469P.txt file - cDNA_ID_1823598; gDNA_ID_2926208; Annot_ID_141850

SEQ ID NO: 19898 - DNA, 3003 bp, Unknown
  misc_feature (1)..( 3003): 2750-1469P.txt file - cDNA_ID_1823608; gDNA_ID_1620694; Annot_ID_48635
gaaagaccttttttgacataaaaagggtcagatgaaagtagttgcttgagagttttgttatcatgttatgaagcagtgaccagtgagccaaagttgctatattgtattgatattctgttagaatcatattccaaatctacggcaaaaaaaaaaaaaaaaaaaaattcgaaagagttggaaaaaagttctagttacaaatatttctctaattacatctcgggactgataccgactagtgcataccacaaaagaaaatccaatattgtacttaccaatgaaatggaaagtgatagaatgtttacccgctgagttacttcatcaaaaaatggtcgtatacattgcgcgcgcaattacatgcaacatgtctttgaccgtaaatatcacattaaaatagaatgacagtcactttctgatataatatattaatatacaccaaccagcatgactaggatcaaggtgtacaacaattttttttttgaatttatcaaattcacacaaaacatatcgtgtacaactctaacgtacgtttcacatcggctaagccttgtatttctttatttgtagcttgtacggaacatttatagcttgcaacactgacaattttgcagattagttgctttgttctgataaagatggtttaagaatttagttattccgcggtttactttcgtatggaatacagcagataccacaatttaaggtaccaacttggaaagagtcattcggatcatcggatgagacaactattttcatcgaccaagtaaagaatatttcatcgatcggtttagttttgttaaacataattgcagtatatgtgtgttaaccgtcaaaaattagagtgccaataaatctttttttactctaccaattaaaaaaataaaaaaataactggaagtgaagaaaatatcatttgcaaaataaattaaataaaacgtaacgtacgctaatatggaggaggaatttcggaatttcatcagttctttttttgaagcttatcgacaacgcctgacggctttgctggatgaaaatatagctggataacatttatttttaagaagaacaaaaagtgtaataattatgtgttgtatagcgattgtaattcatgttatccttagccgcctccttattattatgtaagcaatattttctttggcaaaatgaagttctaataatctaatccaagaaaattcgtaagttactctatcctgtgatacaaattcagacacgcatgaataaaggagattaaaggttgcatgtatctttaaaaaaccatcatttctttcaacgggttaaaaatgagttattcacaaataattgttttgcattgcataattagattgagttatatatgttattcgattccgtcaggtttacatgatcagatcagcagacaaaagattaaccaaaaaatgaacgtcggtggattacagattgagaaacaaaaatatgttcaacaaagtcgtgttgtatttgacagcttaaaccacttgccagatgtggttaatgataagagcgatgtatatttgatggggccaatccgggattttatacagtaagtgagtgataaggatatgtttctttctatcagctagtgcataaatattgtgggctaaattatcacaaattgtcgaataagtgatatgatttgtgggcgaggttatcacagattcacaatttgcttatcacaaaagatatttttttgtttgttttagaaaaacaaattatttgtatggtatcacaaaaagacatttgtgtatgttaatgttgtaggattccaaaaacgacttcataataataatataatgatcattaacaaagaaaatgtggcaacggttgagaatgaaggacaaaaatatttaataaaataaaaaagataatagcatgtactagtagcaaacaacataaaagaaatgagtaactatcgctttaattaaaagtgggactaaacatgtctctagactattgaaatattcttattgatttgaattttcttattgtaaagataactttgaaattcactctttaattattttcttaacgagtttttggaatggatccgaatgtatatatatatattgatttgtgtttctatttatctaagcttgtggtaactttattggcgatggttaataaaaaacacgttgggtgcgtatatgcaatattcttgatactcgaattcattcctgaacatgagatattaagataaacgacctactacttcgtgattaaaaaacataagttaaaatttaaatgtccgaaggaatcatagttaagtgacagcatttaagttgtctaaaaattgccatttgccactcgcatcaatttgtaattttgcaaagtgcaattttatgtctcaagatttgtttcgcagtaagtaatgaaataacataatcaatgttctaacaaaatatctcacctaccagccacacgagtgtcaatttagtttacatttgaaccagagacctaaaagtttgaactaccaaaataatgattttgccgacaaaataggaaaactaagaaagtagtaatgaatatcagatatctgtttcttcagatcaaagcctactaaggaacgcaaaaatatataactaaacaaaattgcgtaaatttagaaacagtgattaaaagcccatatttgattcaatagtaattgaaaacagcataagataatggcccattagccgttatttaggcccgttatcatatcacaaaacaaaacacgaatcatctacgacgaagacctgaaaaaacacactgcaattgagatcgatttcgactgtaagtgaactttgattgccgcgaagattactcaaatcgccggacacaagtttttcagtgaattccattggcatagaactcgagagaaagagacacagagagagagagagatctaacaagagtcaaagtttctgactttttcgcattctttttgagatcgagttctgtttttgttggcgtgtgagatgaattcttaagaaggaagaagaagaagaaggaaagatg

SEQ ID NO: 19899 - DNA, 3003 bp, Unknown; identical to SEQ ID NO: 19898
  misc_feature (1)..( 3003): 2750-1469P.txt file - cDNA_ID_1823608; gDNA_ID_1620694; Annot_ID_164868

SEQ ID NO: 19900 - DNA, 3003 bp, Unknown
  misc_feature (1)..( 3003): 2750-1469P.txt file - cDNA_ID_1823608; gDNA_ID_1620624; Annot_ID_162452
gaaagaccttttttgacataaaaagggtcagatgaaagtagttgcttgagagttttgttatcatgttatgaagcagtgaccagtgagccaaagttgctatattgtattgatattctgttagaatcatattccaaatctacggcaaaaaaaaaaaaaaaaaaaaattcgaaagagttggaaaaaagttctagttacaaatatttctctaattacatctcgggactgataccgactagtgcataccacaaaagaaaatccaatattgtacttaccaatgaaatggaaagtgatagaatgtttacccgctgagttacttcatcaaaaaatggtcgtatacattgcgcgcgcaattacatgcaacatgtctttgaccgtaaatatcacattaaaatagaatgacagtcactttctgatataatatattaatatacaccaaccagcatgactaggatcaaggtgtacaacaattttttttttgaatttatcaaattcacacaaaacatatcgtgtacaactctaacgtacgtttcacatcggctaagccttgtatttctttatttgtagcttgtacggaacatttatagcttgcaacactgacaattttgcagattagttgctttgttctgataaagatggtttaagaatttagttattccgcggtttactttcgtatggaatacagcagataccacaatttaaggtaccaacttggaaagagtcattcggatcatcggatgagacaactattttcatcgaccaagtaaagaatatttcatcgatcggtttagttttgttaaacataattgcagtatatgtgtgttaaccgtcaaaaattagagtgccaataaatctttttttactctaccaattaaaaaaataaaaaaataactggaagtgaagaaaatatcatttgcaaaataaattaaataaaacgtaacgtacgctaatatggaggaggaatttcggaatttcatcagttctttttttgaagcttatcgacaccgcctgacggctttgctggatgaaaatatagctggataacatttatttttaagaagaacaaaaagtgtaataattatgtgttgtatagcgattgtaattcatgttatccttagccgcctccttattattatgtaagcaatattttctttggcaaaatgaagttctaataatctaatccaagaaaattcgtaagttactctatcctgtgatacaaattcagacacgcatgaataaaggagattaaaggttgcatgtatctttaaaaaaccatcatttctttcaacgggttaaaaatgagttattcacaaataattgttttgcattgcataattagattgagttatatatgttattcgattccgtcaggtttacatgatcagatcagcagacaaaagattaaccaaaaaatgaacgtcggtggattacagattgagaaacaaaaatatgttcaacaaagtcgtgttgtatttgacagcttaaaccacttgccagatgtggttaatgataagagcgatgtatatttgatggggccaatccgggattttatacagtaagtgagtgataaggatatgtttctttctatcagctagtgcataaatattgtgggctaaattatcacaaattgtcgaataagtgatatgatttgtgggcgaggttatcacagattcacaatttgcttatcacaaaagatatttttttgtttgttttagaaaaacaaattatttgtatggtatcacaaaaagacatttgtgtatgttaatgttgtaggattccaaaaacgacttcataataataatataatgatcattaacaaagaaaatgtggcaacggttgagaatgaaggacaaaaatatttaataaaataaaaaagataatagcatgtactagtagcaaacaacataaaagaaatgagtaactatcgctttaattaaaagtgggactaaacatgtctctagactattgaaatattcttattgatttgaattttcttattgtaaagataactttgaaattcactctttaattattttcttaacgagtttttggaatggatccgaatgtatatatatatattgatttgtgtttctatttatctaagcttgtggtaactttattggcgatggttaataaaaaacacgttgggtgcgtatatgcaatattcttgatactcgaattcattcctgaacatgagatattaagataaacgacctactacttcgtgattaaaaaacataagttaaaatttaaatgtccgaaggaatcatagttaagtgacagcatttaagttgtctaaaaattgccatttgccactcgcatcaatttgtaattttgcaaagtgcaattttatgtctcaagatttgtttcgcagtaagtaatgaaataacataatcaatgttctaacaaaatatctcacctaccagccacacgagtgtcaatttagtttacatttgaaccagagacctaaaagtttgaactaccaaaataatgattttgccgacaaaataggaaaactaagaaagtagtaatgaatatcagatatctgtttcttcagatcaaagcctactaaggaacgcaaaaatatataactaaacaaaattgcgtaaatttagaaacagtgattaaaagcccatatttgattcaatagtaattgaaaacagcataagataatggcccattagccgttatttaggcccgttatcatatcacaaaacaaaacacgaatcatctacgacgaagacctgaaaaaacacactgcaattgagatcgatttcgactgtaagtgaactttgattgccgcgaagattactcaaatcgccggacacaagtttttcagtgaattccattggcatagaactcgagagaaagagacacagagagagagagagatctaacaagagtcaaagtttctgactttttcgcattctttttgagatcgagttctgtttttgttggcgtgtgagatgaattcttaagaaggaagaagaagaagaaggaaagatg

SEQ ID NO: 19901 - DNA, 3003 bp, Unknown; identical to SEQ ID NO: 19898
  misc_feature (1)..( 3003): 2750-1469P.txt file - cDNA_ID_1823608; gDNA_ID_2926208; Annot_ID_141845

SEQ ID NO: 19902 - DNA, 3003 bp, Unknown; identical to SEQ ID NO: 19898
  misc_feature (1)..( 3003): 2750-1469P.txt file - cDNA_ID_1823608; gDNA_ID_2926208; Annot_ID_202399

SEQ ID NO: 19903 - DNA, 3000 bp, Unknown; identical to SEQ ID NO: 3817
  misc_feature (1)..( 3000): 2750-1469P.txt file - cDNA_ID_1823625; gDNA_ID_1620695; Annot_ID_48667

SEQ ID NO: 19904 - DNA, 3000 bp, Unknown; identical to SEQ ID NO: 3817
  misc_feature (1)..( 3000): 2750-1469P.txt file - cDNA_ID_1823625; gDNA_ID_1620695; Annot_ID_164921

SEQ ID NO: 19905 - DNA, 3000 bp, Unknown; identical to SEQ ID NO: 3817
  misc_feature (1)..( 3000): 2750-1469P.txt file - cDNA_ID_1823625; gDNA_ID_1620666; Annot_ID_163933

SEQ ID NO: 19906 - DNA, 3000 bp, Unknown; identical to SEQ ID NO: 3817
  misc_feature (1)..( 3000): 2750-1469P.txt file - cDNA_ID_1823625; gDNA_ID_2926190; Annot_ID_141018

SEQ ID NO: 19907 - DNA, 3000 bp, Unknown; identical to SEQ ID NO: 3817
  misc_feature (1)..( 3000): 2750-1469P.txt file - cDNA_ID_1823625; gDNA_ID_2926190; Annot_ID_200991

SEQ ID NO: 19908 - DNA, 3003 bp, Unknown
  misc_feature (1)..( 3003): 2750-1469P.txt file - cDNA_ID_1823629; gDNA_ID_1620695; Annot_ID_48665
gaagtcctgacgtgacatggctcagtcaacgcaaatactactcaacttagagacgtagctggcctgtatctaattgttttaaggcccatatacggcccacgcttccattttcttaagtatgcttttcgtagtggactgaaaccttttcttgtctattttctccaagtcgattccttgatgatcgatcgagatgaacctctatcgaacagaaacttcgtttctagaaattaaataagcctccatgaacaacagttttttcttttttttttcttttggctactagtattcaaaatctttaacatattcgcaaatttgttaataaaatgtatttcactaggaaaatagagattggaatttggaggcgaaaaaacattagtttacaacaatagtagttgaagccaagatccagagttttcctattgattttaagggtccggtttattgtaatttccgactattttttagtggaccaattatttggcaagtaagaagtttttttaaaaatatagaccatatgtgtataatagtgaccggatggcccaaactgacatgtaccaatagaaaatgaagacctaattttggcacatgaacgtaacaggtataagatcatcgttgtctctagcgagagagctctgtaatgcttacacttcaacgtggagactgtaagagatacgtgtaccaagaaacgtgaacgcaaagaaggaaaggaaagaaaaaacgtgtacaaaaagaggcccatgttaatcatcatcccttaggccttcttagcttatgcattgtctctttgctagtctttttctcacaatcgtgtcgatatattttaagggtttttaacgtgtggtttttctgtagggagcattagtagaattattgattggttttattcaaatatagaatatatatatatatatatatatacataaaacatttattgatggatcattgaatgttcatttgttcgttacaacattttcttattcaaattttatcgatccttgaatcaaagactttgacataagcgaaaccattggttacttctctaaattaaaatgaaatggtagtcttctaataaatatatatgtttaacaaacaaattggcataatttgatcgttctaaccaaagataggatttcgaatccaaattggatgggatgactagactattagatatttagatcgatcaccaatcaaacaaaataggcgtgcttttatattcattaagctggtttaaaacaacaaacaatccagcatttttaattttagtggttgaatagttaagttaataaaatcaaagataaacagaaaacaaacagctagtttttcaaattttggcgtttaattttatttggaatatttttttttaataaaacacacaaaaaaaaactcttttgacaaaaattggcatcaatactgcatatcgcatagccccatacatacatgatacatgccacatctcttaaaagatgagaacaagaagggatgtatttgaactattctgacaatattatatatacacacacattttgaatatgaatctctcttcttcaaagttctgacttgttccaaaattcttatccacacaatggaggaaaaaaagaaaaagaaaagccacaataatgagccataaccacaaccacacccactcaccagagactttgtgtatccgtggctctcatcatgacatctcatcttcctttgattcttcacaccaccgtcgatcgccacgtaggatttccccaaatcaaagcattccacataagcacaatcttttatgtggccagagtttaatcaacatttgtttttcttacaatgggttcgtgagagccacaaataaatcaactatacgattaaataaccatatctaacaaaaaaaaaaaacattaaacaattatagtccaagtaaacaaatactcgcctactatgtaccatattagaaagttttttattctcccccaataccgatatattattttgtaatttaaaaattcattgttatcttatcctcgcaagaaacacagatgttttggatcagtttgggaagcgaagaagtatgggagagaagtaaaaaacaaaacaagtggtttataaaaaaagagggaaagataattgaacaaagatacgtggggcccattaaacttgtgttatggtccagacaaatcccaggtgggctcacgtggctacgaagcccattgagaacctgattcgtccacgtaggacgggacagaatctcgctctcctccttccccggctgagatctcgccacgtcatcgactaaataaatctctcccaaaaaaatatctcgaaactgaaccatgagtttgtcgccacgtacaaacggggtttggctttggcccatacgcattaataactggttttcaaaaatcatttaaacttatttatcctaataacgcataattaatgtgttttacttaaactgtaatgattctaagtagaaaatgtgaaacagtattttttatccacaagaaaaaataaaacacaaggataaagctaaaaacaataaagaaaacattactgactcaagtaatttaaataattgcagcagatatagatctgataattatccaaacaaaaatctcaaataaaggttaaagtgataaacccatctctaaagcaaaaagatttttaagttgaaccaatccttaattgattaaatactatacgttattacaaagttaaattgaaatgaaatggatactaaccacagaataaaaaaaaaaggaaggtgctatataaaatagagtcattgtgaaaccaaagaagagaaatagattttttagcagaaggcagaaaaagacgaaactagcctccaaagaattgttgaatcacagaaaactcgccacgaaaaatatcccaaatcctgcaacttgcactttcctattcttcttcttctttccttatctctccaaggaaccaaagcatagacacaaaacgaacaaccacagaaacttgaaagagagaaagagtttgattttgattaaaatg

SEQ ID NO: 19909 - DNA, 3003 bp, Unknown; identical to SEQ ID NO: 19908
  misc_feature (1)..( 3003): 2750-1469P.txt file - cDNA_ID_1823629; gDNA_ID_1620695; Annot_ID_164918

SEQ ID NO: 19910 - DNA, 3003 bp, Unknown; identical to SEQ ID NO: 19908
  misc_feature (1)..( 3003): 2750-1469P.txt file - cDNA_ID_1823629; gDNA_ID_2926190; Annot_ID_141016

SEQ ID NO: 19911 - DNA, 3003 bp, Unknown; identical to SEQ ID NO: 19908
  misc_feature (1)..( 3003): 2750-1469P.txt file - cDNA_ID_1823629; gDNA_ID_2926190; Annot_ID_200989

SEQ ID NO: 19912 - DNA, 3000 bp, Unknown; identical to SEQ ID NO: 4300
  misc_feature (1)..( 3000): 2750-1469P.txt file - cDNA_ID_1823632; gDNA_ID_1620695; Annot_ID_48664

SEQ ID NO: 19913 - DNA, 3000 bp, Unknown; identical to SEQ ID NO: 4300
  misc_feature (1)..( 3000): 2750-1469P.txt file - cDNA_ID_1823632; gDNA_ID_2926190; Annot_ID_141015

SEQ ID NO: 19914 - DNA, 3003 bp, Unknown
  misc_feature (1)..( 3003): 2750-1469P.txt file - cDNA_ID_1823636; gDNA_ID_1620695; Annot_ID_48663
tttttgttttcgcagaaaatctagctccaaattgttgttatagctagctcttcgagaatttttagtcaacgacccaaaacttattaatttatatttctgccccttaacttatttttgatccagtaaaccaccttaattgtaaaagcttgactagatagctcctaattaacatatctccttttattcatggaaagattaagcattataatcaacacatcattgatagtgcttaaggatgatgatttttttgtgtgtgctacaaatcgatattgtgatacagtcatcaccagtctagtttatgaatttttttctttattttatatatgttcaacacatctgatcaaagatataaactgaagtgtaaaaatagtatcaagtactatgattaaaagaattatgtgaatggtaacattaatggaaaaattaagaaaaaggtaacaaatgaatcgaattaaataaaagaggaagggatcccaaatctctccagtgtcaatgccggcgcgtgaagccaaactcctcctcaatgacctccgtgacgagacaccgcgacgcttccatcaaatcagggctaagcctaaacatcaacacacaaaactccatctgattcaacgcaccgtcgcagtcaaaatcaccttctttaatcatacaccggacatcttcatcagtcaaatctcctaaacccagaaccgccgcagcgttacgtcggagactctcgaacgtgatgacacctttctctctgtccatcaaaagctcgaagccgttgcatagctctccgatcagaccttcaccgcctaggtttccggccatggtaggaagaaaatcgtggaaattgggttgtgggttttgttgggttggtcttgtgggtgactttggtgacgccattagagcttatgttgtttaaaaatctgaaatttggttctggttaaggaaggtttgtttttttatcgttgttattgatttgaggaggagaatgaggagtgaatgagaatataaaggaagagaaattgggatttctgagaaggaacatccatggaagccagctaagattaatgagggaaggtcccgtgtctgggaaattgcgattaatctctcagattgttggtatgtggtttcttcgaggaaggtcgcttttaggggtaatatcgtcacttcgtaaagggatgtggaaagctcatagtgtgaaaacggcgagagatggagggtaaaatcgtccgtttatattaagaaatagaaagagtaaagtaatggaaatggaggagttgtttgtttgttcctttgtttatttatgggaaatttccaccactttcatcggcaagtgacttgagtttgtttatttgattgattatcgaaaatatgtttctttctttttctttaaagattaaggtcggctcgacttaaaattactctggaattattcaaatactggttttgcctgatcacacagttttttttagtatagattgtagttactatttcgatttttggagatgggtatgtttaatgatatttactactacaaattacttttgtcaaagttcacgaaatgtgtaattagtttaagttttgttataacttgcttcaaaaatatgtttttatctcagttagttttgaaaaattaaatagctgtggaatgcatcaacttatccatgacattcagttttctagactttcgacttagttgtgcccaaaaaaacaaaaaaaaaagactttcgagttatgacttgcatgcaagttgcaacttcaaacaaacgaaatatcaaaggtttgactaacatttactataacttggtatgtgacatttctatgcatggtatttgattaaatcaaatgttggtgtcccttattcaaagacatcgtcagcaaaactaaatgcagcgacataatattctactacttggtctgcccgttctctaattgcatgtctctattttaatttatatataatcaaaccaaaatcttgcttattggataaccattgtcattatttcatgattcatgtactatttaaccgaaaatcgcagttcaataatgcttattcaatgcattaaaaaaaaaaaaagagtcaagttcaaagaacgaacattaaatcatgattcctggctaatgatatctttggtcttactcttgcctcttaatgagcttgtcttcttaatgctgacaaaccattgtgctcttattaaaacctctcataaataaaatttgctattgaaatattaaatctgttgaatcatgtttatctaagatacagataaaaggtatcgtaacatttaaactgtctcagaattgataataacctattttattgtcacaaaattgaaaataattcatcatatatttgaaagtgtacattatcttcttaatccatgcggctcattttttgttttcttagattacgtggaagctttactaacagataaccatgggccggcccacatgctgaatcagcaacactgatcgtggcggattttaactaagtctggtcgagaaagcccgtcgcaacattttagttttatatgagtcggtcaacaaaatgctaagctgtggattgtttttttgttttgaatattcaatggtttctgtctttctgagcttactttctttagattgagaagctccccactaaactttgtttgatgttttctttatatcttagttaaattgcattatttagttccaattgacaagtaactttgcatctccattgaatcattccaccatttgtcctataaaacacgtataaaactacaaatatataatctctaggcacgttgtggttgacattaagagcaaataatatcacgacgcaagatactggacagcaactcattacaattctcttccatgtctctctcatttacacatattaaactatattccatggaacctaacttaaacaattttctctatatttccagtaattaaacaaataaaataactgactatcatcattgtttatataccaacttcgtttccacgctctctggttccacagaaccggccatg

SEQ ID NO: 19915 - DNA, 3003 bp, Unknown; identical to SEQ ID NO: 19914
  misc_feature (1)..( 3003): 2750-1469P.txt file - cDNA_ID_1823636; gDNA_ID_2926190; Annot_ID_141014

SEQ ID NO: 19916 - DNA, 3000 bp, Unknown; identical to SEQ ID NO: 4289
  misc_feature (1)..( 3000): 2750-1469P.txt file - cDNA_ID_1823640; gDNA_ID_1620695; Annot_ID_48661

SEQ ID NO: 19917 - DNA, 3000 bp, Unknown; identical to SEQ ID NO: 4289
  misc_feature (1)..( 3000): 2750-1469P.txt file - cDNA_ID_1823640; gDNA_ID_2926190; Annot_ID_141012

SEQ ID NO: 19918 - DNA, 3003 bp, Unknown
  misc_feature (1)..( 3003): 2750-1469P.txt file - cDNA_ID_1823644; gDNA_ID_1620695; Annot_ID_48660
aaatatttatgtgtaaaactaattatatgcatggtttcatttttttcattggatgtgaggaaacagaatgatgtcgaggaaagaatttactaatgggataccaattaataaaacaaaaaggattttacttatatttttcatcacggtgctcgtatttttcatgtagttctgaagaaaagagcatgaccatctcttatgatcaagattcaagattgctcaagatgagtgactaattagatttaatataagatttgaggaagaaaaactaattttgaaaacgttaggaaaaaaaaagaaagaagaagctaaaaaccaccggagatgatattaaaagttaatggtcaaaggacttaaatgactgtcggtgtctcccgccgacgccacaggcttccgtatattattattagcacaacagaaactgtgaaagagtgtggagagtacggaatttttttcttttcagaatatcgaattccaaaaacgtcctttgtcaacgttgaatattacacatctgcatccttagtgcacctgctcacacctgattttcggtggagggaacatccgcgtggcatgttgggataatctgtgtgtatgaactaaattcttaaaataaagagaatttgtaatagatgatgaccacaaaagtttcaatatttttggttagtttggatacagtcagaagaattagaggagtaaaaccaggaactgtcaatattttcaagaatgatcatcaaagattcaaaggttttttctattaaaaagttatgtattgtacaaacagagtatacacaattttgtcattttcctacactattactgcttttaatcaatgataatttacctttttcttctcctccataccacaaaaacctaatgtatggaatttacttaaaccacatttataatgttttccaaatatattattaaaaacaaatgttttccaaatgttgtaaagctaaaagatgtgcgacagttgaaactactgatatcgggaaattaaagtacaaattttctatatcaaacataatatacaaccatagagccattagtcaagcaacttaccaaagtatttgactcgtgaatacaaagaagaaattaagagtcttacgctatgtagacgttacgtacatgttaatctgttaggcaccgattttaaaccatatcagattacagcacacatcagccattagattctacataatctcaattcaattatatgtttaataaacaattacctgaagttttgagaattcggtttctctatatatagaaacaccattcttaggtatacttttctagattaatgttcgtaaacaacataacgaagcatgtccaaaacaaaacactaattagcaaaacaaaaatgctaacccatcatcaaatggctattttcacgattagtaagtttcagttacgttctagacactaaacaatatgaataatattttaatatgacaattatctaattaggctggtgagcttatctagagtttcacgttgaatgtgtttaaatacaaatctagaaaaaaagaaagaaagaagctgaaatatccaaaaatatgcgttcacacccaacaaaatgttcaaatctactcaatttaatttacatggatgatgagaaaagcaattcaaaaaaaaaaaaaaaaatcagttcaaaataaacaacgtgaaggcaccaaactagtagaaataaaataaagatcaacaatccgtacacgtgtcaacctatcaagtttggagtccagctgtctggtccccccaatatacacacacctctaaaaacttattctcgcggagatgacactgatttggccaaaataccgcgagaagttaccaatgaacgccgtttttaagagatggttttcaattttttttgtttagcttaggctattaaaaaggtttaaagttggttgccggtgatttgtgggacaacccgtacgtgattactgcggattaaccggatattgccggtttggtagtgctggtcaaccggattataccccgttataaaatccgtgcccctatcgatcgcattccctgttgttatggacggacacaccccttatttaattatcgtattaagtctgattgagatagttaattacttatattctccatgatttagattactgtttcgaataatttagattatgtagtatggaggaatgatttgcgtattttacactgagtattgcatcaaacattattgtggaattcaaattttaaaccctatgtatttaacttaattaaacattaaatcattatgaaaccaatatatatatattttagtaatatatataagttaattactccttatcatctgacgaccaaatgtctcgaatataatctgttgtcatactcgtaccaactacactgcaattataatggatacttgatgaataataacaattcaacaagtgagatttttttcatttgtaaatgcaaacaaagtaacaaactggtggttcattacaaaatcttcacaattatatatatgcttaagtcagctcaattatatgctaagtctaaaatcttcatagcaattatagtcacatggaattctctattaaagtataagaagaaagaaatggtatgaatgaagaatgatatagttagagaagtcattattattagagtagaccatctttatccatccggtacaggttttgaccaatacggaaagagagaaaaagagtcgcaatccttttttttttgttacgaaattaaaattatataattagtgcaatttaaagcacgaatagtaagcgttcacttaattcctcgattaactgattagcatattacgattatacccttcatcttccttattgtgtctctactctctactttcaccttcctttccttccattctcctctatatatatcgaccctttctctttctttcttcctcacacactaaaagcttgcaaaaaccataagcttatctacttactcatctctctcacaaatcattttctcagacttctctctttctcttaaaccatg

SEQ ID NO: 19919 - DNA, 3003 bp, Unknown; identical to SEQ ID NO: 19918
  misc_feature (1)..( 3003): 2750-1469P.txt file - cDNA_ID_1823644; gDNA_ID_1620695; Annot_ID_164912

SEQ ID NO: 19920 - DNA, 3003 bp, Unknown; identical to SEQ ID NO: 19918
  misc_feature (1)..( 3003): 2750-1469P.txt file - cDNA_ID_1823644; gDNA_ID_2926190; Annot_ID_141011

SEQ ID NO: 19921 - DNA, 3003 bp, Unknown; identical to SEQ ID NO: 19918
  misc_feature (1)..( 3003): 2750-1469P.txt file - cDNA_ID_1823644; gDNA_ID_2926190; Annot_ID_200984

SEQ ID NO: 19922 - DNA, 3003 bp, Unknown
  misc_feature (1)..( 3003): 2750-1469P.txt file - cDNA_ID_1823668; gDNA_ID_1971851; Annot_ID_58420
aggctacaggagctccaaacaaccaatgagtcagagaattctacactttcgcaagtcatgaactagattcgaaaaagaaagtttactccaggacattaaattggcaatggcactatttaagaatcccttaattgtatctcaaccaaatgtgacattatttatgtagctgtatattgagaatcataagttttctagcactccacgttatcatttttctgaaatgcatttttttaatggcacaaagtagcaagactttcaagatttgaaatagccatatacctgcggaataatgtttttctccatgacatctttgaaaagaggaggcggtggcaaatctagcccaagcatcagaaacggcatcctggagatttctttgttttcattgccttgatactctttcacaacctccaactcaccctgtaatggttaacaggttacatgagatacagcttttttgtaagaaattatatcaaactgcattatgttgacatttcaaaggacggacacatacctggaagcacttgtggatgatactgctagcgtcctttgaagttctaagatccatgtgcaaagtgttgaggagccacgacataaactctactggatctgattgttggccaatcctaaagcgtttcttgctggctttcatgacagcttgcaagaactcatgtggactcacctgttgatgcaaggtaacttaaattagcgaggtcctcaataggtgagtgcataacaaaaactaaaaaagtgagaggcataaattgagtcagacttgtcctttaaagtttcgagcatgccaaatcttgcgagttagttccccaaaacggtgaccaagaggagacttgcagtgctgataattttcaggaatgaggaagaaattccttagaggagtaactctcatcaacgactggattgtaacattcacaaactctgtcttttgtatgttgttcaaccccacctacatatttacaagcttaacctttaggagacattaatttcaagatcaagtgtaatcaaagagaaaggattaccattcctggaagatagtcggagccatcaagagccctagaccactgcctattcttgtcaagctcgtttacttgtgctctactaaacctgtaaatggatagcaccgaagccttcatacaaaggaactgaaaaatcaaagaaaaattgacaaaacatgaaagaagagtaatatgttcaagctatcatgcaaaaaaatataaatagatggtagatgatacagagaactagtaagaagaaactgattgagataatagtcaaagcaattttgttgttgttaactacgtgcaaaggctcacatgttcacaaatcaatacccaaaatgcagtaagaactatgatgtagttagtcacaagatctaatataccttgggtttaaaacatggcgaatgtcatccaaagaagggtcattgatctcgtaactatcaggaagacaataaaccttctctgtcagaagattgatgtaaacgtggtgtcctgcttccaagctatgtgtataagcatgagacttctggcttcttccttgaaagtacttcccacaaacaagacacgcatacacattcagatttgacaatgagacagagcaaaacctctcgaaatcaaaatccaacacctgaaatcaaccataagatatgagtttaaacgctaatctcaaaccagcaatataatgaacctagcagaagcttaaagatccaccatagattagatacattacaagtaccaaacacaagaaattggtcaatgatatacctgacgattaacagtatcaagataaggacaatcacgacgaacttcaacatggcgtgaatgctttcctctccccttcgaagcatcatcatcatcatcttcgtcgtcatcgacctctacttgagcttctcctttcactttgttaccatttccctctcctttcgcaactacattacaacgagtttgcgatttattctgctggttattatcatcatcgtaagcattagcaaacggcaaaagaggattgttgaaacctagtggtggaggtggcgaatcagaccgttccatcactctcttcctcttcacctctctctcttcctcagaaacaccattcttcacttctctttcacctttcattctcaaaattttccctaagctaaagcttgcttcaaaaaccttagaacacaaaatcccagcgattcacgaagaatcctcaaccaaagaagcaatgaactcttccaaaaaacgccaaatacttcaaatcagaagcgtcgacagtcgcgaatctactcgaacttatctctcgttcccaattttctcgagaaacttcaaaatccgccacaacgcagacgttaaacaaacaacctattaaagcttcaagagccgactcaagtctcacccagattgattaactcggttaaaaggccgaatatttattattgggccacactgttatagcccaataacaatctgttccatttatattacttctgtcagcagtattcagtaattgatctgtattcacgatccgatacttatcgaataaccattaataccctcaagcttctcgaagcaaactataaacgcgtgaaaatctacaaggacgtattcgacattccacgagtaaagagatgagttctgaagttaaagccagctggcgaagaagtaaaaaagcaaatagattagccaaaatacgacaacaccctctacctacaagccatagataccatgactcataagggcaacaccgacatttgtcatcatttgataaatctaaccaaccctgaagggcatattcgtctttccaaatagttataaagagacagagacgaagaaggagagagagaaagagacaagattagagaagaggataagagagagaaagatatagagaatttgttgtctttttttctttttcttttgtggggtatttgtttttttttttctccttaaaaagtttttttttttgtgtgtatgaaaaaaaaagctttgaaattctctctcgacaatg

SEQ ID NO: 19923 - DNA, 3003 bp, Unknown; identical to SEQ ID NO: 19922
  misc_feature (1)..( 3003): 2750-1469P.txt file - cDNA_ID_1823668; gDNA_ID_2926180; Annot_ID_140505

SEQ ID NO: 19924 - DNA, 3000 bp, Unknown; identical to SEQ ID NO: 8687
  misc_feature (1)..( 3000): 2750-1469P.txt file - cDNA_ID_1823672; gDNA_ID_1971851; Annot_ID_58419

SEQ ID NO: 19925 - DNA, 3000 bp, Unknown; identical to SEQ ID NO: 8687
  misc_feature (1)..( 3000): 2750-1469P.txt file - cDNA_ID_1823672; gDNA_ID_2926180; Annot_ID_140504

SEQ ID NO: 19926 - DNA, 3003 bp, Unknown
  misc_feature (1)..( 3003): 2750-1469P.txt file - cDNA_ID_1823676; gDNA_ID_1971851; Annot_ID_58417
tcatcatcctgtactattttttcttcaacctgctatataagaacagatgagaggttcagtatttacttttcgtagtaacaaaagatcacaaagcattctttattcaaattggaggcaattcaacacaatgacaagggaaattatgcaagattgcaaattatagctggcattagaacaaagtctagaaaccacaaattcaagtacgcatgatgctatgataaagtatcagtttttgaaaatcctaccaaaagaaacgcagctaggctccaagtaataagtcaggaatccatgaatgaacaatggagttatcaacagaaacattgatgaagcagataatagtacatgttgaatgctttacctgaatatcttccatcggaacatcattgatgtcaggcttttcctccacttccacttccgctttcttctcgctcgactcctctacagttttgtcctcatcaaccttgtcttcctgctcaaccttattatcctcatcaatcttgtcatcctcctcaatcttatcatcttcctcaatttctgtaatttccttcttctgttcctcaagtactgctatctgcaccattttaatcacacttcacttcaaatgaatcactaataatcaaaactaaactagatatacaaagtttcaaattccaaatttataatccaacacgattcaatgatactgaaaacagcttcttaagcaaagatcatctacttcaaccagtgataaaccttatgattccatcttacaaatcattcccaaatcacagctactaaaaacactaatccagtccagttactccaaggaatcaaaatggcaaaacagagacataagcactccttcaacaatgctcaaaactgaccctttttttgtcaatattaatacggtgattaaatccctaatcactgtaacaatcacctaatcaaacttctagcaaaaaccttatagctcaatccaatgcaacaagaacattgaaccaaaaaccaaaaactaaccggaacgtatttgaatctccgccgtggaggatcttctgccaccgttgccaccgtatcctcgctcggagaattactctcacttttaccatcttcattgccgttaccattctgagacaatggtgcccacttatacagcaacaaatgcgatccattactaccgtcagaattcgaaccaccgttaacgacggaagctgcagcagcggcggaaccggaggagctattattattgtctttcttagaggaaggagagacgtgtacccacttcttcttccacttcctcaccggtccggtgaaaaccgttgccggtccgtaccgtgtcgaggacctacctaaccgtgcaccaactccttccataacgacgaatcgtttatcgttgattcactgatcaaaattcaaatttaaaatcccaccaatctgtttaatgaaactttgttttcaaatttcttaaaagtaaaatttgctctttccaccgaaggaagaactcagatctcagtttttgcgaagcgaccaattttattggtttttgcttcaagtagaagactcttgttgagcaagaaggtttgactattgacacgtgtgtgatagttataggctaatctaattatacttaacaataattgcttttgtttgagaaagagaaagactctgtctaaaccagagggtctcggctaatcgttttgacctagtagcgtcatcatagagagtttagtggaaaagactctgatacccctgaagttctctcctatataaacatcgcttcaacctttcagctacatcatctctttcattacgacgcctaggtttagggttttcaacatcaatttttttgaatcagattagtttttttttttttaaattggggctacattgtaccgagagaagggctcgatttcgatacctttactcttgaatttgccaaaaaaacggctgtagctagattgaataagaagctatctggccggtggtcgcgagagggatttagatctctccggtcgattcatctgcttaccgagtttcttacattttctttttgattttcttaacatcttttgattcgttttattgaatgattggatatagtgaatagggaatagcagattttaaaataccattttcgatagttctttctcgtgtattaaacttagggttcctttccaggcgttctgtgctctcttcatgaacagttgtgtcttattggtacctacatatgtattttttttacattgatcgcatttaaccaaaagtataacagtcgataaagatgaaagtgatttagtatggccctgaataacttatgtgatttaattcgaccaaaaaattgttccattgaattgtcataatgaagattgaattgttttggacctaatcaaaggaataaacatttgtcatttggacctaatcaaaagaaatatatttgaattgaaccaactcaaaggaaaatgttagttttgttttgaccgaaactaatcgttaattgtcgctgtcgcatatgaaacagagtacttgcaaatgaattaagaaaacgagaagcctgggaatgagtttgtgatattggtttgaaatagtagatgtgaacaataaccattttcagctccagaaattagactgaatggacctcttgttgtatattagaattcataaaacaagatatgtatattacccccaaaaattagagaagtgtttgttctcgatgaaacgttagatcttgtaaaccaaactaagtatttagatctggtagagtaaaccttctaatacactgcaatcaagtcccaagcaaacaagatttgaatttgaaaacacaaatttaaaagcgttctcatcttgcaaagctgaaaaatgaaaatccatagtaagggaaaacaatttcagtttatgtactacacaattatatagagttcacacaattgaccattccttaggttggttatacccaatctcaaaagccgccataacctttgcgcattggaatgtgttcaatcgtcaaaagaaaaattagccctgggcatg

SEQ ID NO: 19927 - DNA, 3003 bp, Unknown; identical to SEQ ID NO: 19926
  misc_feature (1)..( 3003): 2750-1469P.txt file - cDNA_ID_1823676; gDNA_ID_2926180; Annot_ID_140502

SEQ ID NO: 19928 - DNA, 3000 bp, Unknown
  misc_feature (1)..( 3000): 2750-1469P.txt file - cDNA_ID_1823680; gDNA_ID_1971851; Annot_ID_58416
gtcttcttctctctcttggtccttttctgaatttcgccaattgaggggtattcccgtcttatcacctgccggaattttggatattgtaaaagaatattaaaattgaaattaaaaacctaagagcggcgcacacttccgtcgacatgggattcggtaaaatttggtgaatcagtaatttctgtttaaggtcatccttctttgttcctgtttttacttaatgtggattaataatataactagaaaactcgtgtaaatccactttactttaatggtttttggtacttattagagtcagagacataaaagttcgcacggatttagggaatgaactttaccaaccaatcatttactatgactagatgtatttaacatgagactgtttcttaacgaaagagaagaaaccatattcagacagttaaccttaactgtacattgttagatagtgatagtactatattcgtttttctttttttttattgatgattactaatgtatattgctaaacaagttatatgtatgaaggattgtttgactattttggggatgattaacaaacattgagcactcttccgagcatgttagatcttcattggtggtacaaagaagaaacacattatgagcaaatgcgtttacagttggaattttcacgaccaagtggcccggtaaaacaatttattggaaaatttgagacttgagtgtttttattagtgaagtaagatgctgtatcatggattataacaaaagcggatggaccttttggacattaagattttttttaggtctgggcataatatccgaacccgaagaatcgaaccgaatccgacccgaaatacccgaacccattctacttcggttccggctaattacccgatcgggttctgttttcaaataaccaagggtatcgggtattacccgaaccgaacgcgatactcgtgggtattttttactacccgaacatatatatacatatgatggtatatatgcattaatagcttgaatttgtgacttgtctaatgatatgagttatggaataagctcaaaataaggtttatttcttgttttatattattctcttaaggaaaaacttgttataattgcggttttttcgggttttatgaatacttttatgtatttttgggtatatttaaataaagtttgggtaagtagtactcaaacccgagatagttttggttacttatgggcaatacccgaattatccggacccgaagtgaacccggatagaacccgacccgaaattgttgatataaccatacgggtccaaaatttcaaaacccgaaaaatccgaacccgaaaggacccgacccgacccgacccgaatacccacatgcccagggctaatttttcttttgacgattgaacacattccaatgcgcaaaggttatggcggcttttgagattgggtataaccaacctaaggaatggtcaattgtgtgaactctatataattgtgtagtacataaactgaaattgttttcccttactatggattttcatttttcagctttgcaagatgagaacgcttttaaatttgtgttttcaaattcaaatcttgtttgcttgggacttgattgcagtgtattagaaggtttactctaccagatctaaatacttagtttggtttacaagatctaacgtttcatcgagaacaaacacttctctaatttttgggggtaatatacatatcttgttttatgaattctaatatacaacaagaggtccattcagtctaatttctggagctgaaaatggttattgttcacatctactatttcaaaccaatatcacaaactcattcccaggcttctcgttttcttaattcatttgcaagtactctgtttcatatgcgacagcgacaattaacgattagtttcggtcaaaacaaaactaacattttcctttgagttggttcaattcaaatatatttcttttgattaggtccaaatgacaaatgtttattcctttgattaggtccaaaacaattcaatcttcattatgacaattcaatggaacaattttttggtcgaattaaatcacataagttattcagggccatactaaatcactttcatctttatcgactgttatacttttggttaaatgcgatcaatgtaaaaaaaatacatatgtaggtaccaataagacacaactgttcatgaagagagcacagaacgcctggaaaggaaccctaagtttaatacacgagaaagaactatcgaaaatggtattttaaaatctgctattccctattcactatatccaatcattcaataaaacgaatcaaaagatgttaagaaaatcaaaaagaaaatgtaagaaactcggtaagcagatgaatcgaccggagagatctaaatccctctcgcgaccaccggccagatagcttcttattcaatctagctacagccgtttttttggcaaattcaagagtaaaggtatcgaaatcgagcccttctctcggtacaatgtagccccaatttaaaaaaaaaaaaactaatctgattcaaaaaaattgatgttgaaaaccctaaacctaggcgtcgtaatgaaagagatgatgtagctgaaaggttgaagcgatgtttatataggagagaacttcaggggtatcagagtcttttccactaaactctctatgatgacgctactaggtcaaaacgattagccgagaccctctggtttagacagagtctttctctttctcaaacaaaagcaattattgttaagtataattagattagcctataactatcacacacgtgtcaatagtcaaaccttcttgctcaacaagagtcttctacttgaagcaaaaaccaataaaattggtcgcttcgcaaaaactgagatctgagttcttccttcggtggaaagagcaaattttacttttaagaaatttgaaaacaaagtttcattaaacagattggtgggattttaaatttgaattttgatcagtgaatcaacgataaacgattcgtcgttatg

SEQ ID NO: 19929 - DNA, 3000 bp, Unknown; identical to SEQ ID NO: 19928
  misc_feature (1)..( 3000): 2750-1469P.txt file - cDNA_ID_1823680; gDNA_ID_1971851; Annot_ID_176404

SEQ ID NO: 19930 - DNA, 3000 bp, Unknown; identical to SEQ ID NO: 19928
  misc_feature (1)..( 3000): 2750-1469P.txt file - cDNA_ID_1823680; gDNA_ID_2926180; Annot_ID_140501

SEQ ID NO: 19931 - DNA, 3000 bp, Unknown; identical to SEQ ID NO: 19928
  misc_feature (1)..( 3000): 2750-1469P.txt file - cDNA_ID_1823680; gDNA_ID_2926180; Annot_ID_200158

SEQ ID NO: 19932 - DNA, 3000 bp, Unknown; identical to SEQ ID NO: 8683
  misc_feature (1)..( 3000): 2750-1469P.txt file - cDNA_ID_1823682; gDNA_ID_1971851; Annot_ID_58414

SEQ ID NO: 19933 - DNA, 3000 bp, Unknown; identical to SEQ ID NO: 8683
  misc_feature (1)..( 3000): 2750-1469P.txt file - cDNA_ID_1823682; gDNA_ID_2926180; Annot_ID_140499

SEQ ID NO: 19934 - DNA, 3000 bp, Unknown; identical to SEQ ID NO: 8682
  misc_feature (1)..( 3000): 2750-1469P.txt file - cDNA_ID_1823686; gDNA_ID_1971851; Annot_ID_58413

SEQ ID NO: 19935 - DNA, 3000 bp, Unknown; identical to SEQ ID NO: 8682
  misc_feature (1)..( 3000): 2750-1469P.txt file - cDNA_ID_1823686; gDNA_ID_2926180; Annot_ID_140498

SEQ ID NO: 19936 - DNA, 3000 bp, Unknown; identical to SEQ ID NO: 8679
  misc_feature (1)..( 3000): 2750-1469P.txt file - cDNA_ID_1823698; gDNA_ID_1971851; Annot_ID_58410

SEQ ID NO: 19937 - DNA, 3000 bp, Unknown; identical to SEQ ID NO: 8679
  misc_feature (1)..( 3000): 2750-1469P.txt file - cDNA_ID_1823698; gDNA_ID_2926180; Annot_ID_140495

SEQ ID NO: 19938 - DNA, 3003 bp, Unknown
  misc_feature (1)..( 3003): 2750-1469P.txt file - cDNA_ID_1823730; gDNA_ID_1971817; Annot_ID_58266
accaaggttttctatatcgttttatggacttgctacatcagttctcagccatattcgactctctagaggcaggcctttcaatcgctaacccggcccgtggctttgttgagcgtgtttttatcggtccttgggttgctaattggttgacgcgtatcaccgctaatgatgcagaagtcgagagctttgcttcgtggccacagtggttagagactaatgggttcaaacccttggaagtgagctttaccaaccgttgtcaagcaaaactccttttgagtttgtttaatgatggatttagagtggaagaattgggccaaaacgggctcgttttgggatggaaatctcggcgtcttgtgtcggcctccttttgggcctcgtgccagacgaatcagtaaattctcgtttttgcattctcgagtacattacataagatagtccctttttttccttttttgatataatggtttatgaagacatcaaattatgtgaatatcgaacgtgtaatttctcaaaaatgacagtttagtttaatatgacaagtaattgagccacgacattgcattgtatgttgaatctttaatcttctatataaattaaaatgagaaactcgacaatcgttttacacaagactatgtttgaatatacgtgttaatatgttgtagtaattttggtagcggaccaagccatacttgggtacaagcggaccaaggccatacttgtagccgcaaacaacataaataatatttttggtcaaagtttcatcattggaattggtaactctcttaattgaagtggtggaactagggttccaaccttcctcttttcataaagcttgtttaatttatttattttatctgcttgcagcctataatagtttaagctgcatagaagcggaaacggaaacgctcggaattgctcgaaatcgtctcagaatcgcgattcctaaaatgatgtgtttggaaacgtggaggaaacggacaattcagcttttgaagcgtcggtggttgagatcgacaatgtctctaccgtaaatcaaagatgaaacaagtcaaaaacatctttttgggcttataattgataaaaatacatcaagttatgtttgggccaaatagctcattttgtaaacaaagtaaaagttaaaacctaatctatatatacattattggagattttgtggccaaaagatcatttgcttatgcatttattacaattccctttgcattaaataatttgtgtctgcattaaatatacaaaatgggctaattatcaatattattatctacatatacatttttgcagtcattttagcaaataaatcctcaagttggaacttatttacaaagaatgccattagcattaatcattatcaattaattaatattcctaattattagtatttctttatctaatatttctccatcaattctaattacttttaaaaatgagaaatcttaggactttattaatatgatactttattaaagataaatattatggttatttaaagtttataaaatatttagagtatttaatgaaaaacgtttagaatatatataataaatacaatctataaaatcaaataaccatttcaaaagatttattttaaaattgatttgaattataaatcttttaataaaaatattattagaacaaaaaataataatgtttaattttaccgaactagattagatggtgggacgagtttagaatactatagtatatggatttttataacaattaaataaccatttgaaagaaaaaaataaattactttgaattatatatttttaaattaaagtattattaaaacaaaaataacaaaaaaaaaaatgtttaatttcactgaacattatagatatgtttaattgtaggacgggtttggtcgatagtaatacgagacggtataccacaggtgaaatctattagatatgtttaattttactgaacgagattagatggtatgacgggtttggattgatagtaatacgaaacgatatagtacggatgaaatcctaaatataacaattaaaatacaattatattatattaaacactaaacaaaacaaacaatattaataaaataaatataatttaaatttaaattatatagttataatctagattttaacttaataaactgtatgttattgtttccatattttttaaacagcaaaaatcaaacatattaattgtatactaaaaaaatagatataagagttgtacatttagaaaatacaaagcattaaatcatatatatctttaatctactaaacaaattaaatttttagtttcttaaaaaatcaccgaatggattaaaaccatatgtatttatttcataacggctaaatacatatactactcttacgacattccagagttcttgtatttttcacaaactatatagtctaaaatcaagtaaaataaattgaattttacataatatagtttatcgtgcttttattagatgcactatacattttaaccgtaatcccaactaacatactaagaaaacacatattataaatatatttgattcggatccttcattaatcttttgctaaaagccaaaaacaaataacgacattaaataatccaatatattccgagatttgcttcgtcaatatttttaagggaatgtgacacgtttacgcacttttagactatcttattcctttgggaatgttacactattaggcacttttagaaaatctttttacgtttgaggcactttccaaggttcaggcacttttccttgtttctggaagataaaaagacaattatatcctttccaaattaaaccataaattgtttaaccagttcgattggttttgttttctgtgttatctaataaaacacacgtgtaatacatgttccttctatttcgtgtcggttgagatcttgagatgagaaagagagttatctcacaattacagcaaataaatggatatttttaaaaaataaataatatatagtgtcgctcttcatctctaaaaccaaattcttatg

SEQ ID NO: 19939 - DNA, 3003 bp, Unknown; identical to SEQ ID NO: 19938
  misc_feature (1)..( 3003): 2750-1469P.txt file - cDNA_ID_1823730; gDNA_ID_2926142; Annot_ID_197544

SEQ ID NO: 19940 - DNA, 3003 bp, Unknown; identical to SEQ ID NO: 19938
  misc_feature (1)..( 3003): 2750-1469P.txt file - cDNA_ID_1823730; gDNA_ID_2926142; Annot_ID_139010

SEQ ID NO: 19941 - DNA, 3003 bp, Unknown; identical to SEQ ID NO: 19938
  misc_feature (1)..( 3003): 2750-1469P.txt file - cDNA_ID_1823730; gDNA_ID_1971817; Annot_ID_176036

SEQ ID NO: 19942 - DNA, 3003 bp, Unknown; identical to SEQ ID NO: 19938
  misc_feature (1)..( 3003): 2750-1469P.txt file - cDNA_ID_1823730; gDNA_ID_1971715; Annot_ID_175172

SEQ ID NO: 19943 - DNA, 3003 bp, Unknown
  misc_feature (1)..( 3003): 2750-1469P.txt file - cDNA_ID_1823758; gDNA_ID_1971817; Annot_ID_58258
caaaattggctcgattaagtcctaaataatatctgatagcacaaacaataaaattagggttaaaaatcagaatcacaaacctagctaaaccttcgagttttggttgtaaaaagctcttaatcttctttgatgtaagagcgtaacctacaataatggatttcttcaccggaaaagcttcgattactaacgaacacggcgacgatgtctcttgctctgtcgtctccatttctcgagttccgttcatggtgatctcttcgttgtccgttagcttcatcttgtggaaaaatcaacgaaacaattttggggattatggaagtggagaatgcgagatcggaggaagaaattttctgggtttgatgcgttcacaacggagtaaaatttgggattggttttaccgggtcgggtttagatccgaattgttttagtcggtgcttgtgatattttgggtgggttatgagagagtagggagaggtctgaaatatttatagcggcgtgagggacatgtgtacacatgtatgtgtctaacggttgttttttttttttttttggtaaagaaacatgttttaattatgagaaatgtatattgcaatttgaacatattcttggaactgcactgttttatttttgtctgagccaagccgatatatagctagttgtgatttgttgttgtttaagaacgtgaatgatctaggttggaattttttaaaatgttagatagatcgatctggtttgagtttggagagtttattgttggtcgggatttgaaatcaatgtattgacaagtttgagagacgattaaattttttagatataattcgcaaaatgaatgttttaggagaaaatcatgtagctaattttctttcaaataatatagttagcaaaaaaacaaattaatatttttgtataattttattaggtaaaataattttttatcaatttatcaaaactcaacaactatttatatgaccaaaacggttgtataaatgatattagtgaatgtttgtgaataaaacttaggtagaatttcattaaaaagaatatatattctatgtataaaaagacttaataaattattttatttcaaaaaagcagatctcacatacttttaaattttaaaattggtaactttcttcaaaattcctcttaaaatagtacgtctttccctttataaacggctaagttactacatcactttaactttgagctttttggtcctccgaatacgtcctcacattcttagtgacttaactagaactcatcttcccaactcatcttcccatgctttcgagaaaactttgttttggctttttgagaattgatgatcttaccatttcttcaaagagtcctataagattctcaacaaaaagccatactacttcaaccattggttctttgatttggagagatgcatgttgtagatgtgtttcttaataccatgatatcttggattcacatagaagtcatcccctcccaactctagatggaagagatcttttgcaactttggaaactcttgtcacaaactactttcgagtattcgagcagttaatgctccggtttcaagaatctaaattacaatttgagtagatgcattatcccttaaggtttaggaagaatacacaaatctcaactagtgagactgtgtggatctctttaacgtattagaaactctacttatgatgttctaaatggcataatatttttcatgaagatgattcttgctccttcaagtgagagtctcatagtgaaggtcgcattactagaaagtccctattgtgcaccgcaaggatttgttcacgaagttatagattagctggactattactctttcccgatttacaatgatacccatatacgtacacattcctcgtgttagagaccatatcttgccccatcaccacccgagccaatcatcccttctagagattatcgatcttaaaacgcagatggtaaactgcctctaaatattggggaagcgtagagacgaatgaattttaaacctcatacttttttgtcttcattctcgaacgaaataacattagatccctaatagtgcttgagatggtgttagggattattcggatgaagattaggagagaaaatcatcatgatgaaacatagctctctcattgggagacttctccacaccctcaaaagagtaaaagtttgataccattaaagcttgtgaaacgaacattaacaaccataatgaaaaaagcagataaaatattttaattttcattgaaaattttgaaaaatatgaaaataattcaatcgagtactatgcatatttttaataatcaagagaatcagctaagatataaagcattaatcaaatgtaatctcatctaataaattatcgaatcaatggtttaattaaagattttcgaaaataaatcaaatctaaatgattacaatctctccttaagatcacatttgaatagtgtttcatattaaatcaatcaacaaacgatgtatagaaaactagttattgttcttaaaattaattacattccttaaagtgacgtgcaaaatttccttattctaaaactgaaattaatgatttgcttaatttaacgagaatattattattaaatacttttaatatatttcattacaaaaaaaaaaaaaaaacttagtgcccatattcgattctcgccacgtcagcaaacaacacctcaacaacggcaccgatttttctgtcctcttcgttcaagtcattccaatattaataaaaaaacgaaattagtaaattaaaatttttaaacgaaaaaaaaaaaaactttggcctctccggtgactcttccttcttctgctaccgaacttttcgcttccttctctgaccaatttttttcaacaacctctcttcttcaacaaattctcttctcaaatcctccaaatcctctctgccatgaacgctactttcttcctcctctccaccaccgtctccaccgtcacaatcaccggattcaacggtctcgatttctcatcttagaaccacatg

SEQ ID NO: 19944 - DNA, 3003 bp, Unknown; identical to SEQ ID NO: 19943
  misc_feature (1)..( 3003): 2750-1469P.txt file - cDNA_ID_1823758; gDNA_ID_2926142; Annot_ID_197536

SEQ ID NO: 19945 - DNA, 3003 bp, Unknown; identical to SEQ ID NO: 19943
  misc_feature (1)..( 3003): 2750-1469P.txt file - cDNA_ID_1823758; gDNA_ID_2926142; Annot_ID_139002

SEQ ID NO: 19946 - DNA, 3003 bp, Unknown
  misc_feature (1)..( 3003): 2750-1469P.txt file - cDNA_ID_1823758; gDNA_ID_1971817; Annot_ID_176026
taaaattagggttaaaaatcagaatcacaaacctagctaaaccttcgagttttggttgtaaaaagctcttaatcttctttgatgtaagagcgtaacctacaataatggatttcttcaccggaaaagcttcgattactaacgaacacggcgacgatgtctcttgctctgtcgtctccatttctcgagttccgttcatggtgatctcttcgttgtccgttagcttcatcttgtggaaaaatcaacgaaacaattttggggattatggaagtggagaatgcgagatcggaggaagaaattttctgggtttgatgcgttcacaacggagtaaaatttgggattggttttaccgggtcgggtttagatccgaattgttttagtcggtgcttgtgatattttgggtgggttatgagagagtagggagaggtctgaaatatttatagcggcgtgagggacatgtgtacacatgtatgtgtctaacggttgttttttttttttttttggtaaagaaacatgttttaattatgagaaatgtatattgcaatttgaacatattcttggaactgcactgttttatttttgtctgagccaagccgatatatagctagttgtgatttgttgttgtttaagaacgtgaatgatctaggttggaattttttaaaatgttagatagatcgatctggtttgagtttggagagtttattgttggtcgggatttgaaatcaatgtattgacaagtttgagagacgattaaattttttagatataattcgcaaaatgaatgttttaggagaaaatcatgtagctaattttctttcaaataatatagttagcaaaaaaacaaattaatatttttgtataattttattaggtaaaataattttttatcaatttatcaaaactcaacaactatttatatgaccaaaacggttgtataaatgatattagtgaatgtttgtgaataaaacttaggtagaatttcattaaaaagaatatatattctatgtataaaaagacttaataaattattttatttcaaaaaagcagatctcacatacttttaaattttaaaattggtaactttcttcaaaattcctcttaaaatagtacgtctttccctttataaacggctaagttactacatcactttaactttgagctttttggtcctccgaatacgtcctcacattcttagtgacttaactagaactcatcttcccaactcatcttcccatgctttcgagaaaactttgttttggctttttgagaattgatgatcttaccatttcttcaaagagtcctataagattctcaacaaaaagccatactacttcaaccattggttctttgatttggagagatgcatgttgtagatgtgtttcttaataccatgatatcttggattcacatagaagtcatcccctcccaactctagatggaagagatcttttgcaactttggaaactcttgtcacaaactactttcgagtattcgagcagttaatgctccggtttcaagaatctaaattacaatttgagtagatgcattatcccttaaggtttaggaagaatacacaaatctcaactagtgagactgtgtggatctctttaacgtattagaaactctacttatgatgttctaaatggcataatatttttcatgaagatgattcttgctccttcaagtgagagtctcatagtgaaggtcgcattactagaaagtccctattgtgcaccgcaaggatttgttcacgaagttatagattagctggactattactctttcccgatttacaatgatacccatatacgtacacattcctcgtgttagagaccatatcttgccccatcaccacccgagccaatcatcccttctagagattatcgatcttaaaacgcagatggtaaactgcctctaaatattggggaagcgtagagacgaatgaattttaaacctcatacttttttgtcttcattctcgaacgaaataacattagatccctaatagtgcttgagatggtgttagggattattcggatgaagattaggagagaaaatcatcatgatgaaacatagctctctcattgggagacttctccacaccctcaaaagagtaaaagtttgataccattaaagcttgtgaaacgaacattaacaaccataatgaaaaaagcagataaaatattttaattttcattgaaaattttgaaaaatatgaaaataattcaatcgagtactatgcatatttttaataatcaagagaatcagctaagatataaagcattaatcaaatgtaatctcatctaataaattatcgaatcaatggtttaattaaagattttcgaaaataaatcaaatctaaatgattacaatctctccttaagatcacatttgaatagtgtttcatattaaatcaatcaacaaacgatgtatagaaaactagttattgttcttaaaattaattacattccttaaagtgacgtgcaaaatttccttattctaaaactgaaattaatgatttgcttaatttaacgagaatattattattaaatacttttaatatatttcattacaaaaaaaaaaaaaaaacttagtgcccatattcgattctcgccacgtcagcaaacaacacctcaacaacggcaccgatttttctgtcctcttcgttcaagtcattccaatattaataaaaaaacgaaattagtaaattaaaatttttaaacgaaaaaaaaaaaaactttggcctctccggtgactcttccttcttctgctaccgaacttttcgcttccttctctgaccaatttttttcaacaacctctcttcttcaacaaattctcttctcaaatcctccaaatcctctctgccatgaacgctactttcttcctcctctccaccaccgtctccaccgtcacaatcaccggattcaacggtctcgatttctcatcttagaaccacatgcatcccttctgttgcgttacaactgtctccgatcactctccttcgatg

SEQ ID NO: 19947 - DNA, 3003 bp, Unknown; identical to SEQ ID NO: 19946
  misc_feature (1)..( 3003): 2750-1469P.txt file - cDNA_ID_1823758; gDNA_ID_1971715; Annot_ID_175164

SEQ ID NO: 19948 - DNA, 3000 bp, Unknown; identical to SEQ ID NO: 8554
  misc_feature (1)..( 3000): 2750-1469P.txt file - cDNA_ID_1823762; gDNA_ID_1971817; Annot_ID_58257

SEQ ID NO: 19949 - DNA, 3000 bp, Unknown; identical to SEQ ID NO: 8554
  misc_feature (1)..( 3000): 2750-1469P.txt file - cDNA_ID_1823762; gDNA_ID_2926142; Annot_ID_139001

SEQ ID NO: 19950 - DNA, 3003 bp, Unknown
  misc_feature (1)..( 3003): 2750-1469P.txt file - cDNA_ID_1823766; gDNA_ID_1620682; Annot_ID_48355
gcggcttcggatccgaattacaggttcgttagaggtggtgagagaagaagctggacggctctcagaatgaattcgccggaaattgggtttggcgcagcagaaaagaacggtggctgttgaagcaatcgccatggctgagatttttctccaatttccaattcccaagttctggtttaattttaaaccggtttgctgttgaaccgtcttttatcattttcacaaacaaaattaaactaatcggtttattaacaaattctggtttttctaattacttcccatctttgaagttgaagagaaaaatataaagacaaaatggagattagtacattaaaaatctcaaattctgtattgaattatttatattacaagaagaattttccaattatttgtagtacatatatatatgtataatcaaaatgtggagtgaaacaaaatcaaaatgttaaaatgtgttactcttttccttagaccagatcaaaacgagagtgaaccccatcaatgacattaccaccgtctgcaaaacaaaacaaaaatctctataatcatcatcaataaaagattatgctatgtcaaaaggatatgagacttacagatatagcaggaggaatccccacaagaggatcttgaaagaacttagtagcaagcgctagagccaaaaggctactctgcattcctgatatattcacaaacacatttctcttctcaaatctttaaaccaaattgtactttcttgataagattttccaataccataaagagttagtaccagtttcataggacaatgttctttgcatggctttagcgtctggagcgtttctaaagacagaaccggtaaggaagtatccagcgaggaaagctgagagatgaaacattgttactagtaacaatatggtggctccaaatggagacatgaccgagtttatgttcaatgcgagtggtgctccaacgcagcaagctgtgtcgagaaccgatagaatcgggagaaatggtcggattgcatttgatacttttgggaacaacctgtaaaagaagaaacaaaaaggagataaaaatggttatacttagagaaacaacttgtggttatttctagttgtaggcttgtagctatatctctcacttgtttagtagcaatcctgcagcgattggtgcgattacaacctgaagaatgctggatatcattccttttacatcaacgggtagtttcttcccaatgagcaggagtgatagcatcggtgtgacaagaaccgcagtagcggttgatagagatgtcatgacgatgctaagaggtgccaatgctggatcagttaggaatgtcgcatagtttgacaactgagctccactaacacatgataccaacatgattccagcacctgagagattgagaaagattggttaatgtgagagataggttaagagtcttgaatgatgagagacagggagcttttaccaattggagttgggagttggaaaagagaaacagcagctaggccaaagatgaaacctaggacaggctttacgagatattgtccaacataaccgaggaggatagcttttggtcttttgaaagcttcaagaaagtctttctcgtttgaattgataccaaccgcaaacatcaaaaaacctaaagcgggcacaaagtacctaaaataacaggagagtaaagaagagctttttagcaaacctcatgtctacaattcaaagtcttagatcaatttgaccttgttccaatgggaagaacctcgacgtaaaccaagtgaaagaaggaggatagataagagctaatattgtactcgccaacactacatgaggaagaattgagtttgctttcttcattctatccactatagaaggcttctcaataacctgcaagccacttactagattcatgttggttctcggaagtaacataaaattcttaacaactgaaatcatcagcaaacgaagaacaaagtagcaaaactgtgatccagggatgatttttagctaatcagattcaaaagtaggataattaacaagtcttcaatagtgcaaaatcacattttgacattaaagatgacacattttgagaagactattcaaacccaacataacatagaatggaaaaggaaagatcccatagcgcacaccttgaatggatcagctccaggatccaaacccatctccgagaaattatcagatgcatatctacgccacaaattcctcgatccgccaactgtgtatatagtaggttgaagaaaaccatgagagaagaaagtgtaaattttgcaggtacccaacaagcataaacgcctgaggatcgatgagagtaagatgaacaaaccttgagagattgggtcgatgcgaagtggagaactcagagaagtgttcgagaagatgttgggcgggaaaacttgaatccgttgactgcgataaacagctcgtggtagaagacgaagtgttgactttaggtgcagggtctctattggagttgtgatcacgctcattttttttctttggactttgtgatctttcagattcttcagaagaagtggcgaaactctgagagttctgggaaatggaagaaagagggagagattcagagaatctgggacccgagaatctgtcgcatcatcaacctaacaaaacccgacccgacccagttagagtttaagtttctggaaatggcccactgggctttaagataatgtatatttcaaattatgattttcttattttaaaactgatatttggaatataatgtgttgtgtagtgagaaagacgcaattaatatacttaagttagggtaataaaaaaatcggtacaagactacaaagcaaagacacaaatcaaggagaaaacttccacaaattgtctctctttctttcctacacaccaatttgttttgtgattctttcgattgcattcttctttttcgaattcccgatcactggattttcccgtttaaccggaaaatccagtggattagattttacccagtgttatctttttggattggattcgatg

SEQ ID NO: 19951 - DNA, 3003 bp, Unknown; identical to SEQ ID NO: 19950
  misc_feature (1)..( 3003): 2750-1469P.txt file - cDNA_ID_1823766; gDNA_ID_1620698; Annot_ID_48733

SEQ ID NO: 19952 - DNA, 3003 bp, Unknown; identical to SEQ ID NO: 19950
  misc_feature (1)..( 3003): 2750-1469P.txt file - cDNA_ID_1823766; gDNA_ID_2926181; Annot_ID_140553

SEQ ID NO: 19953 - DNA, 3000 bp, Unknown; identical to SEQ ID NO: 4309
  misc_feature (1)..( 3000): 2750-1469P.txt file - cDNA_ID_1823785; gDNA_ID_1620698; Annot_ID_48726

SEQ ID NO: 19954 - DNA, 3000 bp, Unknown; identical to SEQ ID NO: 4309
  misc_feature (1)..( 3000): 2750-1469P.txt file - cDNA_ID_1823785; gDNA_ID_1620698; Annot_ID_164968

SEQ ID NO: 19955 - DNA, 3000 bp, Unknown; identical to SEQ ID NO: 4309
  misc_feature (1)..( 3000): 2750-1469P.txt file - cDNA_ID_1823785; gDNA_ID_2926181; Annot_ID_140546

SEQ ID NO: 19956 - DNA, 3000 bp, Unknown; identical to SEQ ID NO: 4309
  misc_feature (1)..( 3000): 2750-1469P.txt file - cDNA_ID_1823785; gDNA_ID_2926181; Annot_ID_200248

SEQ ID NO: 19957 - DNA, 3003 bp, Unknown
  misc_feature (1)..( 3003): 2750-1469P.txt file - cDNA_ID_1823797; gDNA_ID_1620698; Annot_ID_48721
gatgttggttgagatcacagaaagagcgatggcgcattgtgacaagaaagacgttttgatagttggcggtgttgggtgtaacgagcgtttgcaggaaatgatgaggactatgtgctcagaacgtgatggtaagctgtttgcaacagatgaccgttactgcatcgataatggagctatgatcgcttacacaggtctactcgcgtttgttaatggtattgaaacaccgatcgaagactctacctttacacaacgatttcgcacagacgaggttcatgcggtgtggcgagagaaagaagctgtactacttggggataagaaagttgcagcgaattgagtctgtccccatttttgttcatttttcatcaaatttgagattgaatctctctctactcgataaattggtttttgctaagtagttaagacttttaaatgtgttttattagccaaattatatgattgatatcttttggtttgaatgtaataacactttcaaatttcaaagtgagctttgtaaaaagttcaaatgtttcttgtgttgcatttcgctatttgttttattgctttaataaaaatatgatatctcaaagtcgacatttctaccgagaatggtggagagattagtgcattagtcttccttaatcatacaaaaacaactgtgaaaatacagcactactaaaaagtaaaaagtaagaactttttaatgtagaacgtatgagatggttcaattaatcacaagacacttctatggcattgcgtattaaacgaaaagtgagtaaatagaatttatacataatgatctaatcttgatcttgctaataaaaattgtaaaggcaacaacaagttgtcaaaaatttcaatttgacgtagagataaattctatctaataattttgtaaaaacattcgagatatagtgtatcatttttccatcatctagaactcatttgcgtattttcaagtgtaaatcagaaccttgacacataggctacacaaattttggtcgatatttatattacttttgtagcataatgtggatatccttctagagactagagttctagataaaacattcatacatgtaactatgtaagtaagcatgcatactaaatataaaattttcaaaagttttaaaagacatcatatagattcaaaaagacgtgggaaaaaggagaaaatgacaaaagttattagtaaaacaatcaagtaaaaggtcaaagtagttaacgaaaagataaaagtatttcaaaagtcttccttccatcttgaaatgccaaaaaataaaagacgaatgattgaagataaatcaaagttgtctgattgctattgtatacatctttttttttgttaaaactattgtatacatctaaaaaaccttgaagtaatcaagatctgaattatagccgttgataaggttttatgctttcacattgaactcgatcgtcgtcgtcaaatctactagtctcgttttttagttttaacgtgcttaattacttcactaatttgttttttgttatcattttcaccaattttattcattgtgtgaattaagttttgtccacatagtaagattcatcagtataataggacatatgataaaagtttgtatataatcaaagagtatatctaagaatatctaattaagatgaatgtttcagtccacattggattctgcttatagtcaaactgtcttgttcttaaacccaattaggttagaatacatgtaccaacaaatagcatttctataactaatcttttatcaatttactttatagcctacaaataattagaggaaaagaaaagagagttagtggaataattgtcctctaaatctcgatatcatcattaactaaatactatatttagaccatatatactatattttatagtatactatattttatagtatatataatcaactaatcatattagaccactattagaaatatggatctaaaaaaaacattctttaatcagtactattctcatccaaagacttgttttaagagactaaatatgaatatgtgtatgtgtatgtgtatgcaggagtagacacgtgcacgtggcacatgcagggaatgggaaggtggagtgttgacaaagaagaagaggatgatccaagtttcgaaatgattccaaaagttatgaactataagccaaagtgctcaatcgccaaacatgaacttaaataaacttcactcgttagatcgttttctcacattaaagccgctctacacttttacccattttaccatttataataaccaccacacatagatattaagttctatggattttattcgtaaacttaagttatgatcaaatagctaaatgattttgcgatttgcccgagttctgtttgtttctaaaatggttatccaaaaagcatatttttgttttatatagaatttgtgatatagaagaaatatactaaaaatgttttaaagtctgtctaaatcataaaccaatgcaaagaaagtgaaataaaccaagatctcgagcaatagacataataaataaacaaacacctaataacatcacatccccactaacaaatgtgaacattaactgttaaaaatcaccaaaaaagtcatcaagatttggctttccttttcaaaagcagtatacgtctctgtctcacacagacagtgtattcaatgcgttgtgttgtcttcccacttttcaccagctgaggttctgcttctttctcttcttctctccaaaacaagaaaattctgcagaataacttttcattcacgagagtggaaggttacagttttccaaatccgagaaacagacacaaaattggtccctctctaaaagttactatcttcgtttaacaaagagatagctcccaatccagtacaaaacagagtactctgctctataaatttcgttcctttattactctgctctataaaacagattattctgctctataagagagatagataaatgagctaaagctcagtaatttctaaacagagagacaagaaaattcaagaatg

SEQ ID NO: 19958 - DNA, 3003 bp, Unknown; identical to SEQ ID NO: 19957
  misc_feature (1)..( 3003): 2750-1469P.txt file - cDNA_ID_1823797; gDNA_ID_1620698; Annot_ID_164958

SEQ ID NO: 19959 - DNA, 3003 bp, Unknown; identical to SEQ ID NO: 19957
  misc_feature (1)..( 3003): 2750-1469P.txt file - cDNA_ID_1823797; gDNA_ID_2926180; Annot_ID_140541

SEQ ID NO: 19960 - DNA, 3003 bp, Unknown; identical to SEQ ID NO: 19957
  misc_feature (1)..( 3003): 2750-1469P.txt file - cDNA_ID_1823797; gDNA_ID_2926180; Annot_ID_200207

SEQ ID NO: 19961 - DNA, 3003 bp, Unknown
  misc_feature (1)..( 3003): 2750-1469P.txt file - cDNA_ID_1823807; gDNA_ID_1620698; Annot_ID_48715
ttatagttttaatcttgtgattgatttttgcatgttgttatgtagttgcacctacttttactattgtttacactaattatgacatgatcatcatcgctgttatacaagatccataaaaagtaaattaaattaaaaatccattaatatattccgcggttttgcaaatatcttaaaaaatagtacagtatcttaccgtaccatattaattagtgcaatcttttgtcaaagataattagctaactagtgcagttttaaacaagacttatttatggtatctaattgatttcggttttgtgtggcaaagcaggcaactctaatggaggagcaacgaaaaagattgttgcatcaatgggcctttttggtgtggttgcaagtctgttcttttaattcaactctacaaaattctgtgtaattgttcttctcatcatttttgtttgttttcaaatctgactactcgaacatttatcgaatcaacaaaccttaactttaataattccgcttcgtcaatgttggtattaaaacctggtctgcgtaatttgacagatgtgtatagattattttttaggtttgcattggttaatgtgattatcacgtcttcatacaaatgccccacccgaaatttcatttcaatatatattatggtaagccgtacgcagatgcagatcatttaaacatatttgttactacaagggtttcaatattcttatcaatttttagtaggtctaattaagatgtccagttatatacatttaatttgaattacagtggatttaatgaaacataccaaagtacatacattcaggtcaaaggcagtgagatattttattagtagataactatactagcaaaaacaacatactgaagaagcaagctgaaatatattttggtttgcgatgaagttgtaatttgaccattcacaaatgttcttaagaaaaaacaagaattgtttcataaacaaggaaaaaaaaaaaacgcatcatcattattcattagctaacagcaagaaattgaagaagcaagttgaaatcatcatgtatgcgaaaagcttggtaagaaccatcgagcagagagttcaagtaacgaacaatcgaaatcaaatttgtgcagtggctccatctcccgtgtctcgtaattgaacagaaagagatcttttgtggtcgtgtcatggctatcactgaaatatatagtatttctatggagtccctcaacttcattggcgagcacggtgatgcctagatccaaaagcattgcctcgtcgcccaaagaatcagcaagttcatatttatcaagaaatgtccctgacgaataaaacttgtagacgttgaatgactggattctagaccaatgtcttaacattctttcaaccaagaggacatctccggttactgtgactacaagttttgtctcagcaacgcaccatgaattacttaattgacgactacgaggacttaaccactcagatctatagacatgcataaaacattgaaaggcttttcgaggaatctctccagaaaaatctaggattgtgaaaagatttctgtagctaaatgagtaaagcttgtgatccttgtaaaccatgtcaagagaatctaaaataatttctggaatttgattccacaacttatctccgttcttggcataaaccacacaccaatatccaagcccccacagagctatgtactctttggttttctcgtcaatccaaaacacaggggtacgtacggtattattacctttgaataacttaacgtggttgtgatcgtcgaaagttagaaaatcatcatctatggtttggtcaacctttaccatgccaacttgttgtgattcaatagcgggaagaccgatcttctcgtaggtgaatggattcaaaatgtatagattatactttgaatcttgcatcaggagccaacttccataggttgctagacaaacactctttgcaaattcaacaccaagatcttgcgtttggtaaagttggtctttgtcctcgggattgaaaaaaatcgtgcatgaactgtttttgttgttgtttttgtctttggggaagagcatcagccaagggatctgatttttgggcacggattgtttcgaagcagagtaccaagacgaacacaccgatttggcttgtcgaaaattagcaaagctgaggcgtttgaaaactaagttcaagagatctagaggaagatccgaccaggtattagggttttggttcttctccatgaaaacgacaatatttgagatatatagagagagttctcttatcaacaaataattatttgagtgaggagatatctctaacaaaagattttataaaccgaatagatctcggaatttcatggtttgctttgttaaaatatgggcttttgtgaaattccgaaatattggccccattaattaatcagtatatattttgttcacttggatccaataaggtgcaagacatgaagagagaaaggtaacataggtgaacgattttgttccctaaataaaggttcaattcaacaatgtgattctcacgtcttatacacaaatgctccaccataaatttcatttcattatatacctattttgacaccgaaaagagtttggaataaatatacctattttcttcttaggtctgaaatgtccagtaaaatacatttgaattacaactgatttaatcatttaatgaaacagaccattagttatacatatacacgtcaacggcattgaaattgtattagtattcgcctttcttcatatatgattagaatgaatgaactgtcgaatccatatcaatgaatatttagttttgttataatcctaataaagatatgatctggattatattaatgacacatatctttgaattgtcagggccgtccagcttatattgattttcgacattctgtccttaacaacttcttcgcaaaacattccattttatgtattaatggttttattttaaattggcttccatatatatacatgaacatgccacataaaatattcattctcaaaatg

SEQ ID NO: 19962 - DNA, 3003 bp, Unknown
  misc_feature (1)..( 3003): 2750-1469P.txt file - cDNA_ID_1823807; gDNA_ID_2926180; Annot_ID_140535
tatagttttaatcttgtgattgatttttgcatgttgttatgtagttgcacctacttttactattgtttacactaattatgacatgatcatcatcgctgttatacaagatccataaaaagtaaattaaattaaaaatccattaatatattccgcggttttgcaaatatcttaaaaaatagtacagtatcttaccgtaccatattaattagtgcaatcttttgtcaaagataattagctaactagtgcagttttaaacaagacttatttatggtatctaattgatttcggttttgtgtggcaaagcaggcaactctaatggaggagcaacgaaaaagattgttgcatcaatgggcctttttggtgtggttgcaagtctgttcttttaattcaactctacaaaattctgtgtaattgttcttctcatcatttttgtttgttttcaaatctgactactcgaacatttatcgaatcaacaaaccttaactttaataattccgcttcgtcaatgttggtattaaaacctggtctgcgtaatttgacagatgtgtatagattattttttaggtttgcattggttaatgtgattatcacgtcttcatacaaatgccccacccgaaatttcatttcaatatatattatggtaagccgtacgcagatgcagatcatttaaacatatttgttactacaagggtttcaatattcttatcaatttttagtaggtctaattaagatgtccagttatatacatttaatttgaattacagtggatttaatgaaacataccaaagtacatacattcaggtcaaaggcagtgagatattttattagtagataactatactagcaaaaacaacatactgaagaagcaagctgaaatatattttggtttgcgatgaagttgtaatttgaccattcacaaatgttcttaagaaaaaacaagaattgtttcataaacaaggaaaaaaaaaaaacgcatcatcattattcattagctaacagcaagaaattgaagaagcaagttgaaatcatcatgtatgcgaaaagcttggtaagaaccatcgagcagagagttcaagtaacgaacaatcgaaatcaaatttgtgcagtggctccatctcccgtgtctcgtaattgaacagaaagagatcttttgtggtcgtgtcatggctatcactgaaatatatagtatttctatggagtccctcaacttcattggcgagcacggtgatgcctagatccaaaagcattgcctcgtcgcccaaagaatcagcaagttcatatttatcaagaaatgtccctgacgaataaaacttgtagacgttgaatgactggattctagaccaatgtcttaacattctttcaaccaagaggacatctccggttactgtgactacaagttttgtctcagcaacgcaccatgaattacttaattgacgactacgaggacttaaccactcagatctatagacatgcataaaacattgaaaggcttttcgaggaatctctccagaaaaatctaggattgtgaaaagatttctgtagctaaatgagtaaagcttgtgatccttgtaaaccatgtcaagagaatctaaaataatttctggaatttgattccacaacttatctccgttcttggcataaaccacacaccaatatccaagcccccacagagctatgtactctttggttttctcgtcaatccaaaacacaggggtacgtacggtattattacctttgaataacttaacgtggttgtgatcgtcgaaagttagaaaatcatcatctatggtttggtcaacctttaccatgccaacttgttgtgattcaatagcgggaagaccgatcttctcgtaggtgaatggattcaaaatgtatagattatactttgaatcttgcatcaggagccaacttccataggttgctagacaaacactctttgcaaattcaacaccaagatcttgcgtttggtaaagttggtctttgtcctcgggattgaaaaaaatcgtgcatgaactgtttttgttgttgtttttgtctttggggaagagcatcagccaagggatctgatttttgggcacggattgtttcgaagcagagtaccaagacgaacacaccgatttggcttgtcgaaaattagcaaagctgaggcgtttgaaaactaagttcaagagatctagaggaagatccgaccaggtattagggttttggttcttctccattgaaaacgacaatatttgagatatatagagagagttctcttatcaacaaataattatttgagtgaggagatatctctaacaaaagattttataaaccgaatagatctcggaatttcatggtttgctttgttaaaatatgggcttttgtgaaattccgaaatattggccccattaattaatcagtatatattttgttcacttggatccaataaggtgcaagacatgaagagagaaaggtaacataggtgaacgattttgttccctaaataaaggttcaattcaacaatgtgattctcacgtcttatacacaaatgctccaccataaatttcatttcattatatacctattttgacaccgaaaagagtttggaataaatatacctattttcttcttaggtctgaaatgtccagtaaaatacatttgaattacaactgatttaatcatttaatgaaacagaccattagttatacatatacacgtcaacggcattgaaattgtattagtattcgcctttcttcatatatgattagaatgaatgaactgtcgaatccatatcaatgaatatttagttttgttataatcctaataaagatatgatctggattatattaatgacacatatctttgaattgtcagggccgtccagcttatattgattttcgacattctgtccttaacaacttcttcgcaaaacattccattttatgtattaatggttttattttaaattggcttccatatatatacatgaacatgccacataaaatattcattctcaaaatg

SEQ ID NO: 19963 - DNA, 3000 bp, Unknown; identical to SEQ ID NO: 4334
  misc_feature (1)..( 3000): 2750-1469P.txt file - cDNA_ID_1823861; gDNA_ID_1620700; Annot_ID_48760

SEQ ID NO: 19964 - DNA, 3000 bp, Unknown; identical to SEQ ID NO: 4334
  misc_feature (1)..( 3000): 2750-1469P.txt file - cDNA_ID_1823861; gDNA_ID_2926192; Annot_ID_141089

SEQ ID NO: 19965 - DNA, 3003 bp, Unknown
  misc_feature (1)..( 3003): 2750-1469P.txt file - cDNA_ID_1823871; gDNA_ID_1620700; Annot_ID_48756
gctgcttcattgtctaccgtcacatgcacgtacatatccgttatgcctgaaccatattcacaactctttttaaaaacttcaattgcacaagtctaaggagtttgatttaaatgttcttaccccattctccagcaactctcttagacttgtcaataagtttgtaaccaactccattacgatgcagctcttttgcaacacagacgttgctcaagtatgctctagcaaaatccacaccaatcccctataacacaaaatactcttaggctactcaatttgtccaatttcagattttaagttcagcattgttggcaacatcaaatagacaaatacctctggttttgttccagcaatttcatcaggaagccaacgacattggttaagatcaaggcttcccaccacaactctgtcttctatgccatcagagaactgagaaacagatgaaccatagcacaaatccatatcacagttttttctagaccaggaagtaacaatgacatgatgacaattccaaatgtagagcaccataacttaaatgcaacaaaccctcttgaacaggtaaatacaggatgaccaaattgagtacacagaccttacatgcagagcataaatcctcaaaagagcttgataattgcgacaatggaagggtagcatttatgcaagcgacccgcgtaaacccttccctcttccctgaagttctctccttaagcgcctcgaattcacgctctgccaagtatcttctatgatcctaatgaaacttgaacagcaaactgtaacatcagcataagaaacaaaccataaaccaaacaaaacactcactaactaatcacacaacaacaacgaagttcttcaaaactataaacacagctccaacatcaattatcatttcatctaccaattcatagtcaacggagttgacttcatgatacaacaaatagctaaaaatcatcttctaattcaccgattaagtaagaaactgacttggatattgtaagcagaaggattgagttcgttgaaggttcgtacgcggagacaagctgcagcccaaagctcatcttctgacaccgattcggatatgacgaaagtcgacttgtcgatcgctggagcacaaatgtgtgaggaagcagcgacgggacggaaccgtaacttcaatgaaggaatcgaaagatacgagcgtgatgatccatctgtgtttgggtcgccgaaaatggcgatagaggatgaacttgggagagacgaacagagaaacgccattttttcgcggactaatcacatcctcagcttcttgctaagcttcaaagctcgcatgtttgggcttttctattatttgggcccaatatgagcccatagttttctgtttgtttacgcttctttcaatttttatccgagagaaatggcagccacacaaataccaactaaatgtcataactcataaacaaaagatacgtaacaaacttttaacgttttatttcccaccaaaagaaaatcaacatgtgtcatcatcactcatcatcttttctttcaacgacaaaaaataacattgttcttatcgcaacaatacatgttttatcatcatcatttgaatgtacgtaatcaatgtatctcgattctttttggttgatatagaaaagaatttggagttgtattttgttacctaataaaaatcaattaaaattaataatagtaatctacaccctcgttaagagaagcaagtagagctagttcatgcatgatgatgtcttagtaaaagaaataagattatctcatataaagtaatagttagaaagtgtggaaggattagaatgaggatgatgatgatgtgtgtcatgagtcattgatctttgtcattatcctatgattcatatctcttctttctcgtgcatccaattcttattggtcaacaaataccaatagaaatcatttcagcaataatggacagaaacctacttacgattggtgggagggatacacaagaagacaactagagtgactaactataacatgttcacgcatatgatcttttatctattttcataattctgatgtctgtgaccaccttgcaatacacctgtacttaaatgtagaatatacgttataatattcgtaatacaacgcatcacataggacctaaatggcgatttttatggttgcatagtttcttgaaaaatgttttattttgttgatacgtattcaatcgtgattgtcaagagaatgaaatatcatacagtgaaatcaaaaggaattaactaaacaataattggtagtcaaatcttaaaatgctatacgtataattttcttctttaatttttctttttttcttttttattttgtaagagatttctttgaacaataattaattcaatctttccttacgtattaaacaatgaatagaaaaaaatcacaagacattattgaataaatgtcggattatctactatatatgtgtgcgcatgtgatatagtactgtaatagtgggctacaggccaacttcggctttccaagaacatggttgcatcgagcatatctttgctagattttaaatataactacaacttcttgcttactttgtgatgcggaaactcaaaaccgtaatcactcatgttatattttttgttgttgctttcaacgctaatatctgaaaccagttttcgctggtctaagatccatttgcaagaaatgtcaacaaaataaaaagctcttatcattcccacgagttttagttaaggtaatctattattccaagacttccacgaaccacctatatatagaagcttacatattctatagacttaataaatgtatagttcaatattatgtcactaacgtacgcggctaacaggtttgttaatccttcctatcacatgattgacatacacacacacacacacgcacgacacattatttgtattcagtattcacatatacgatatataattacaagagacgtgtatattgagagattcattttttagtgattgtagatcttaagagagagagagagagatg

SEQ ID NO: 19966 - DNA, 3003 bp, Unknown; identical to SEQ ID NO: 19965
  misc_feature (1)..( 3003): 2750-1469P.txt file - cDNA_ID_1823871; gDNA_ID_1620700; Annot_ID_165046

SEQ ID NO: 19967 - DNA, 3003 bp, Unknown; identical to SEQ ID NO: 19965
  misc_feature (1)..( 3003): 2750-1469P.txt file - cDNA_ID_1823871; gDNA_ID_2926192; Annot_ID_141085

SEQ ID NO: 19968 - DNA, 3003 bp, Unknown; identical to SEQ ID NO: 19965
  misc_feature (1)..( 3003): 2750-1469P.txt file - cDNA_ID_1823871; gDNA_ID_2926192; Annot_ID_201127

SEQ ID NO: 19969 - DNA, 3003 bp, Unknown
  misc_feature (1)..( 3003): 2750-1469P.txt file - cDNA_ID_1823883; gDNA_ID_1620700; Annot_ID_48752
tcggaagagatccaaccttgaaattgaacctcctttgttggtaaagaatgatagtgacgctgattcttgtactcctcaagccaagaaacagaagtctcaggaagcaaatgatggagacattgaaggaattgtctgcacagataaaagttatgaggatcctaactcattaacttgtcctgatacaaagcttaatgattttagcaagtcaatgagctcatttgctgttgatcaagtatgggctttatatgatcctagagatgatatgcctaggaactatgcccagatcagggagatttttgagtcccagttgagtttgcaggtgacactacttgaacatgtcaaaactacaaaagatgagcagtctattctcagtggttgtgggagatttgaatatggagatacagagatcaagagccacttgatgtttgctcatgagatggatcacatcaaatctgctgaagaggtcattgtgaacccgagaaaaggcgaaacatgggctcttttcagtgattggaatgcaagttggaacagtcacctagaactacaggagcttccttatagatacgactttgtggaagtcatctccgagtttgacgatcttataggcattcaagtggcctatatggggagagttgaaggatacgaatcggtttttaaccatgctgagcagtatggatgcatcaagattgtgatcccacctgcggaaatgcagagattctctcacaaagttgaatcagtgaaattgagcgggaaggaggaagagggaatcccatttaggtccttcaagctaaaccctgctgctatgccgagatactatcatgtgcttgaggaggtggtggaaacggaaatacaaattaaagatccaacggtcgtacatcaaaatggatccacaaaagatcttcccataataatagattgagggattcaagcctggttggtgcacctttcttatctatgcaaatatatatttaagtatgtagagtgcttggtgatggctgaggttgcaggaagtagtgaaactgtaatctttttggtttctgtatctgttttctaaactgtctatcttctgaattgtaccaacttcctttgatataaataaaagagaatgctttaggaaaactaactgcctacttgctcgcttcggcatagacctcacatgtggattactgagtgtctcaaagtttcaactttgttttcacgaattgcattaaaactaacataatgaccatcctatgttgatcaaatgcgtctgctgtaacagtctgaacactacaatctaattgacacaagtcaatacaatccccaagctttgtatatcctcgaaactccagttctattattgaaaccatattcgtgcatttacataaataacacataacagaagtaaagactgaaactttagagtctaatacatcattaccttataaatacttccaaatgctataactatagacaatataaacgccaaagataaacggaatacgatccataacctttgcatcatcactcaaagcagagtaagtagtggctattgactatcctctgctgttgttgagaatcgaacctagagttcccaaaacggcgaaagcaagcaaagggctaacgtcaagcgtatcaaagactggagggataatgttcctgaagagattaagataaggatcacacagatctctaatggctgacaaaggctgacgatcccatggaatgtttgggaaccaactgagcaaaactctgaccatcagaacaccactgtatatatcgagccatttcgatagcccggctgcaactaccgtcaacggagtgttcagataaccggcgggtcgatcacggagcgacgcgaagaacaacggacttgctgttcggaaagatgcttgaatctgtggagataggttcacaattgcgacagagagcttctgaattagagatttgattacgacgccggctagaagcacgagggtggtgatcgatctagttgagtcggagaaggggaattgagaagggggtttagaggagagtaccggagacgaggaggtaacggcggaggaaacgatggttctagcgttatggagggagagattgaaagagagtttacggggaagagagagacggggacggatgatcggaggaggtagtctagggtttgcgagaattgaagcgcgaagagcgagactgttggttgtgaaagaagccatctttgttcctcggtgccggagattactcactcctcagaatgttgtatcggaggaaataatgaacccaaaagattaaaatagaaaaataaaatatttatttttggtcaaaaatttatctctttgtataaattattttagttacgaaacttcgttgcccaaaatataaaattaaaaaaaaatacgaaactaccttctttatttatttttattcaacaaataaaattaatttaattaaggatagaaaatgaatcgaagtagtgtactagtggtatagttaaagaaaaacgttttatgtaccagcttttatcacaacagctttacattgtaaccatgtttgaataaatcaacgaagaaagtcgttaaaaaaaaaaaacgttttctgtcaacaaatataattaattaggacggttctaaaaaattaaatagaatttaattacttcccaaatttgtagttttttttttgattcccttgaaattaataatctttttttttcccacaattttattaggaattttacaacggttgttatttcccggcaaaaatattaacgaccataagagttaatggaagaagcattgctaaaaatagagggaggatcgtcccacaccagtcaaacctatatgtcttctccgtcgtccactaaaatcttatttacccctcaaaaagacattcctccactacaaaaacttgagagcaaaacaaaacaggttatttgtttgacaagaaaacacaaaacattcattctttcgtttatatttgaatatctttccttctagggaatgctaatcaaggatttgttcggcagaaatg

SEQ ID NO: 19970 - DNA, 3003 bp, Unknown; identical to SEQ ID NO: 19969
  misc_feature (1)..( 3003): 2750-1469P.txt file - cDNA_ID_1823883; gDNA_ID_2926192; Annot_ID_141081

SEQ ID NO: 19971 - DNA, 3003 bp, Unknown
  misc_feature (1)..( 3003): 2750-1469P.txt file - cDNA_ID_1823899; gDNA_ID_1620700; Annot_ID_48746
ttcgtggaggctttgattcaatgcaatctcaattctttagcagatgttaccgagcgtctacaagcagaatctatggagaagaagatatgagatgtgacttgagaatcttttcattcggaaaagaaggaaaaagaccaaagaagagaaataactcttcccttttatagcaatgtctatgttttttcttcttctatttccattttctgaatgtttgtatattattggaagtttgtaacgaaatgatttcgaatagctgtcaaacgagaaatataaattcaaatttgtaagtgtttatatgaaatgcttttttatttttaacatttccacatgaaaatataaataacatatcatgacacatgcaaaatcatatttatgaaagttttttcaactctctccattttttcgacatatcagcattagatagagtgacacttatcacatcaacatatgaattacatttcttatttaatttaatgtatttaagaatttataatcatgcattaattctttctaaattttttgacatgtttgaacttattaattaaataatttcaatttaattaggtacaaagtatatcaaactcacataaataacttatttaaattaaattatataaatcgtataaacttatgtataaacataaaattaatagaattttaatgaacttttagatttgattaaagtataaaaattaaataatatgatataagaatttatttcatgttttcatatactaatatatatatatatatatatatatataaaagattaataacaattgatattagttaaatttacggtttagtttaaggtaaacccaagatgctctcatctggaattctgttatgatctgtacgtcctcaaagttccagagatgttgagaaagatcaaacatcagcagcgtcagaggctttttctctggagaggtgatgttgaatggctctatgcgctgctcggagagcaaaagagtcttgaagaagactctagcaaatccatattggcatctaagcttgatctttgtgttcctgttatgaaacacagaatctagactgagactgaagttggatacctcagctttgggatggagaataccggaactcttggccggagtaagaggatggaaagcatgctgaagatgagcaagagcgttccaagaaagactatgacgaagaaaacaaatcagaaatatactaagtatgagttgtttcaaagaacgtagtaatggtttataataatattaacaatagaataaaataaatagtaatggtttaagaaaatattaataatagtgagcaaaagctaagcaaaatataagcaaaacataataacatagtcaaaataatatggaaatgacaagtatataaattatatgttaaaagttaagaaattgacttggaggtttgtgttgggattttcccttaacttaaataaaggttttaaatgtgaacaaaaaaagtttgaagttttagttgggaaaatgttttgatttggaggtttgttttggaattttttcacttacctaaaaagattttggttattattaacataaaattctactaataacaattgatatgcttcttcgtgttaaaaacaaaaaaaaaacaattgatatgcttcttctttttttgtgcacccaataaatatgaattaaataagcatttttaatagatttatctcttgatagggtatccatctaaacaaatacaaaaaagaatacatttaaccaaaatgcttatctaatgtatatttaaatgtaaaactttattgtatttgttaatttagcaaaagataaaatgtctaattgctaaatcatatttacaaaatataatatctgttaattaaatcatgattcagttgtttgggctgttaattttgttttaatccgtctttgggcttgacccttctgtatttgcctattgggctttatgaatgttatgaatgaaaatgaatagtcacaaaacaaaagaaaaaaaacagaatttgagtcggtacacaactgttaacgaggtgtacttggtggaatcatagacacgtgtcttgacactcttaaggcctcttcaccaccaaattacttccctaacaaaagaattattattattgtgaagccccaaaagatcgaacattctaattcaatggcctacttgctgaccaagcaaaaaggaccggctccgttttcacctaattccgagcttcacaacgtgccttccattggttgaatattcaactggtttaaccaaaccgaagttacacatacgatttgagtcggtacacaaatattacgagacgtactttgtggacagtttgacacgtgtatcgccactctttatccctcttcaccagtcaccactcaccaccaacttaaaaataaaataaaaagagcatatattgtggagccccttacatgatcgaaaattctcgttcaaaagcattcgttaagaccgtgtgttgtgtgtcgttttttgtcgacgaaaattagaccggctctgtttttattggctcgtttcgattgaaagcgtggctataattggtttaaccaaaccgaagtcgacgtctcggtttgttcggttaagattaagccttgtagaacattccaaaacgccgcgtcaaagcttttagggtttgattctgctgtgtggctacccactcaagtctccagtgttcctttgtggctctggtttgccctattcttctcttccccctctctctctctctctctctcttgttttctttttccctcttctccaaggaatctggaaaaaattaaaccttttttctaaatccctggaaatcagaaaacttcctattgagaaaccatagattcgatccaagcctttgattgtatcaaaatctctgcttcaccaagaatttgggttgatacagaagaaaaaagttaaatggttgaggcagagcgcgcggagaatagttggattgcttcggaaacgtctccgtcgtcgtctccggtggtaatagaaagcagtgatttttcgataactgatggaatg

SEQ ID NO: 19972 - DNA, 3003 bp, Unknown; identical to SEQ ID NO: 19971
  misc_feature (1)..( 3003): 2750-1469P.txt file - cDNA_ID_1823899; gDNA_ID_2926192; Annot_ID_141075

SEQ ID NO: 19973 - DNA, 3003 bp, Unknown
  misc_feature (1)..( 3003): 2750-1469P.txt file - cDNA_ID_1823946; gDNA_ID_1620701; Annot_ID_48777
ggctgccatgagaagagaagaagatgttgaagtcgatgattcgttttatatgagaaagtgtgtggagctagcaaaaagagcaattgggtgtacaagtcctaatcctatggtaggttgtgtcattgtcaaagatggtgacattgttggccaagggtttcatcccaaagctggtcagcctcatgctgaggtaacaaaaattcaatctttctttgttgggttactgaaaatgagcaaactttaagtcttgcttgtggaattgttgttgttggcattggtatggtaggtgtttgctcttagagatgctggagagttagctgagaatgctactgcttatgttagtttggaaccatgtaatcattacggaagaacaccgccgtgtacagaagcattgattaaggctaaggtgagaagagttgttattgggatggttgatccgaatccaattgttttttcttcgggtattagtcggttgaaagatgctggaatcgatgttactgtgagtgttgaagaagagttatgcaagaagatgaatgagggattcatccatcgaatgttaacagggaagccttttctcgccctcaggtaaagttcattgcttctcttgagtggagacaaatccgagtcaatagattgtttttaagttttgaaaatctttgcaggtattctatgtctgtcaatggttgtttgctagacaagattgggcaaggggcttcggatagtggtggatactactcgaagctattgcaggaatatgatgcgataatactttcttcctcgttatcggatgaactctcgagcatttcttcacaagaagctattaatgtttcgatccaacctattcagatcatagtagctagcaatgcacaacagtctcatatccttgcttcttcccacactgtggaagaatcgggtccaaaagttgtagttttcaccgcaaaggaatcggttgcagaatccggaatcagtagtagcggggtcgaaaccgtagtattggaaaagataaacttggattccattttggattattgttacaaccgtggactatgcagtgtcttgttagatttgagggggaacgtcaaagaccttgaagttcttctgagagatggatttgagcagaaactattgcagaaagtaattattgaggtcttgccggaatggagcacaaaagatgagagacagatcgcgtcgatgaagtggttagaatcaaagcatgtgaaagatttgcagtctaagcaattaggtggaagcgttttgctagagggctatttttgatgttttcatgtatgaatgaatacaagtcatgatatttaccttttttaaagcatagtattattaaggttttacagatcctattattaatagattgataacagatttttgagaaaatgttgtattttcaaaagaaaatattttcacatgttgagaatctgattcgaccttctatggcctacacatgatgggtatcctaagatgagatgttttttcttaattggagttcataaaccaaaacccataaaaaaaattaaggatgtgtaatagaatgtgaagtacattcaatgagaactgattgttgatgtcgattgcgttacaaatttgacaattctttttggattttggtggaaatgtgaactaactgacaacaaacatcaaccatgttggatttgtttttgtcaaaaccgatatatctagagatattcgaaagaaagaacgaaataaacactatacaatagtcaattttaaatcactttatgatttaacaatcctaagttcctaacttcaaatttaagatttacaatagcatgaattttagtctttcttattgtttcatagcattattgtattaaaaaattactctacagttacaccatctctctttataatggttgtttcaattgagttaatcatttactattaatctgaaaatttgtagtatgaatgttattgttggtacacaaattggtgatggaacaaaagattaagaggatatcttttatgtcgacaatggtcgagtggttcaacaaaatccacgcaatcgcctgagcgaaaaagttgaccatactcagccccaccactctccacttcataacctttttcttttatccttcttccttttgcatttatacaagtattttccaatgacggaatgcagaaagaaaaaaatttgttaagcaaatgtcataaaatataaaaatatctatagcaagtgactgtaactacgattaactcaaccgattggagaattgagtaacttatatcgaactcaagttcgaacatacgctatatatgagagtcaaaattattgatcaaaatatgcaatgtaatggtccaaaattcaaaatattaccaaaaagaaattctataagttaatgttggaattatgataataaaaaaatactaattgatagatatgaaacaatttaagacgatccatttgagacccgggaaatagattagtttatcaagtattaatttataaagattttactttggactatttgttcaaaaaactacgtgatgatgagttttctatgcaaaatcaattaccgatatgtggatgattcttgtcttttgtagtaatgttggttatctttcactcttaatgagaggtttaatatcatgtgagagttaacgagcttcttatttgagtcaattgtagataaatagcttaacatatgcccttataaactagcgttgattctcaatccaatttgaaactattaacagaaccattaaaaactatatatgaacacataaaatatataattgaccataacgacgagtcaagatatatatttaaagaacttacttttttccactttgttttgctttttttttttttagtctttggtacatatatattacaaacccttttccagtaaatagttagcacaaactaattatcagatgtcacttaaaccaacctccttctttatataagcttggttaacattgagtttgttatcatggtctatgtgaaacaattcaggaataaaaaaagaaatg

SEQ ID NO: 19974 - DNA, 3003 bp, Unknown; identical to SEQ ID NO: 19973
  misc_feature (1)..( 3003): 2750-1469P.txt file - cDNA_ID_1823946; gDNA_ID_2926177; Annot_ID_140373

SEQ ID NO: 19975 - DNA, 3003 bp, Unknown
  misc_feature (1)..( 3003): 2750-1469P.txt file - cDNA_ID_1823952; gDNA_ID_1620701; Annot_ID_48774
gaagataagagagtcgtcaacataccatgaaagtaagtgtaccagcttctgcagcaagaacacctccagagacgggagcatccaacatgactggcttttcccaattatctacatcaaagatgcttgaaactagtgaaaatgaaacaatctcgacttgttcacaagaagaacaaaatgaagctgttgttaactcataagaagaaactaacttccttccaaatcctatctaagctttacctctcttttctttcaaattacaattagaaacagcaagtgagatttttcgagttgtttgtggatcaatagtggatgaatctataaacaaagcaggtcttatatcattttctccaagaagcaacccatttgttcctgtgtacacatccatcacctacatcaatcacaattttttttccttcataaaaatcatccaatcaattgaagattaacattctttcagtaccaggagtaaacaacaatactatctcgtagactaggtgcagctaatcatacagctaacaggacgatctttcaaactgttttcatataaaactattgctaaaggtaaataacttacatgagatgatgaaggcaacattgtaatcacaacttcgctatcttgtgcaacttcataaggagtttctctagaagagactcccatttcagtgaacattttcataacatcacggtttctgaaaattcaaacacaagtatatgcacaagaaagttaatcaaaggaatcaacattaaccaaatatgaaaattgataggcagcaaaacgcactcaaagtacattacatgtcatgaacggtaactttatatccagctctaattagattattcaccattctgaatcccatatttccaagtcctatgaaaccaacattctgacaaaacagcaaaaatgagacttcatttacataaattttgggtactgaatcagacaaattttgctgttaaaaatctaatccagacaactttttttgcagaactgatgaatttagataagtggtcaagatcaataagcaatttggccactaaaattcttattaactatgctcgagattacaaaagttaagatcttttattccaactaccttaaggatcatgttttagaacgtttcaataaaattctaggtgacttatgaggaaaagagattatgttttctgatcatgaagacaatttaaaaagcagaacctggaattgatttgaattttgagacgaagaagagaaccggtggagcgacccagacacgaaattggttttgaatttagaaagacaaagtagagtttgcgctctgcgaatcgccattgatgaatttcttcaaactcagagcaagttaacaattagcaaatgagagtgagttttagacgtaagtgtgtaatctcatcaaaacactcagatttttgttttttgaattatgaccccttaactattaatttattctgaacccggacatttactttcaacattatcagtagaacccaaataattggtctgatgcccttgtctcttccggtcttccctagtcaacgtagtcagcatgtgggacccattttcctacgcggtatttatttcgcttctacattttcctactaattaatgtggtatcaacttcaaaaatatttatttgtccgaatattcattactattttttctggattgttcaaaaaatcatgtttcatttactacacattttccttgcaagcttttaatatctgtattttggtgtaaataacattcactccgaactctcattactctttttattttccctattatttatttatgtaaattcatttattgcaagtttctaccaaaatttattagaacactgcgcaattttcgcttattttcccaatgctgtaaatctctctcactaaaggcaaggacatagactcataaccatattggataaaccctttcacgtccaccatggtcacactcactaaaaacattagtgtaagtagcttttttcattttttttggattcctttcccgggccattccaggcgggtaattaaactatattttaaatctttcctcactgaaaagactatgaaaaagtaaattaatatataattttcttctcgtgaacccatgaaaataatttcttgctattttactttttatttagggtttttgatttggtgtccgttcacacgcttcaagacttacccttttacaaggtccttgtcgttcgtcactgtcgaacgtgaaaactagcaaaacattttctctatctttaattttgttttggcttctttcttttgttcttaaacagtgacaatcttttaagggtttttaatttttaaagtgacccacaaagatttccctcagttagctcagtgactcagtctacaacactgttgagcttaatccaaaaccccgtgcagttcatgagctaatgaacaaaatgattctgctttaaagtttttgtcttccttcttcttcaactctgtcgacattgttcttgcagtgagaagcttttttcatccccgtaagtttaaaaatcctcacttttcatttatctctttgctttggagttaggttagatctcggaatgggacccaaatattgaatagcccatttgttcatttaatgtttttttcagctgattccctttgagtgaagattgtctcttctcactcagtagcattactgcattttgtttgattggggtttctcagaagatttgttcatcttaggtaaagtttctttctttagcttctgtttttttttttatcagagtgaaatttctggtattgttgatttttgcagaaagatttaaacttttttttggtaacattgatgggttttgtcttatttcattatgttttatgtcagatttacttggggttccatgaattttctgcgttggtgagctggaaaagttgttgggattcttcaaaaactgtagctttttgggggaaaagatttgaagtcaaggaaggatgaatctttctaggattttgttactctccatgttttttctatctgcaatg

SEQ ID NO: 19976 - DNA, 3003 bp, Unknown; identical to SEQ ID NO: 19975
  misc_feature (1)..( 3003): 2750-1469P.txt file - cDNA_ID_1823952; gDNA_ID_2926177; Annot_ID_140370

SEQ ID NO: 19977 - DNA, 3000 bp, Unknown; identical to SEQ ID NO: 4348
  misc_feature (1)..( 3000): 2750-1469P.txt file - cDNA_ID_1823956; gDNA_ID_1620701; Annot_ID_48773

SEQ ID NO: 19978 - DNA, 3000 bp, Unknown; identical to SEQ ID NO: 4348
  misc_feature (1)..( 3000): 2750-1469P.txt file - cDNA_ID_1823956; gDNA_ID_2926177; Annot_ID_140369

SEQ ID NO: 19979 - DNA, 3000 bp, Unknown; identical to SEQ ID NO: 4347
  misc_feature (1)..( 3000): 2750-1469P.txt file - cDNA_ID_1823964; gDNA_ID_1620701; Annot_ID_48771

SEQ ID NO: 19980 - DNA, 2848 bp, Unknown
  misc_feature (1)..( 2848): 2750-1469P.txt file - cDNA_ID_1823964; gDNA_ID_2926176; Annot_ID_140367
atctcttaattataaggtttattggatctaaagacgggtcatcaaagatttcctaaactgaagcaaaatacactaaatattcaaatatctatctgttaccaaattataaacaaataagttcgtaaaacaatttaatattttatatacgaaatcaattaaatcttaatcacataaaaattagcacaaaaaaagtattcaacaattaaacaattatcaaatctctgtgttatataagttttgatactatattcgaataaagtgtaatatatcttttcaatttgtattctttaactaatttaagctacctaatatatttgctaatcttatacctatcaaaaccgactatcgtttcttatctctacagtatttttgcaagacttttttagtggatttggataaaagtgcattcgggtcatatggtacattctcctattaaataaatatggtgcactcctatgttattagctaaaatattcagattataattcagagtcatatcataaataaaattaatattaataaaataaatggctttttggcaagacggatttggagagacgggtttttgaatcaacattaataaaaaaataaaatataattaatccactgtttgaatacgggttaaatctttaatttattattttttaagaccactaatattaaacatatcaaatcatcctaatttagaaaagattatataaaaccaaaaatgttatgtggtatgtataatgttactatatataaaattaaactataaaatataaatgtgttagagaatgatacaatttgcaaaacttttatatataataaataattcttaaattttaaaaattattactttaaaaaaatattacgggacgggtaaaggaattacagaacgggttttattttggaattgggttatatggtggatgtatttgaatcaatatttataaaattttaaaatattattaatatgctgttttacaaggggttaaacttcagttttttaacaattgtctcatggattcgtggtatagcgttacttaataacaattataaactgtaaaatataaatattttataaaaataaaatttgcaagttttaatagatattactttaaaaaaataaatcatcccgcggtataccgcgggttaaaatctagttctgtttaaaatctccatgtttcttccttaatcacacttttacttttggtcatatgatatgactcatattttagtgttatgcattcattacatgacatggttttcttcaaattttggctacaaagcacaagaaatgtgagaataccaaacattaaggttatgattcgtaacattgcataatagcataacggtataagttgcataataaaatatgtagaatgaaaaaccgtagaatcaaattacttaaaaatatatgttgattggatacattttacagaacgacaaataaaatattatatcaacaatatatatttatactaataaaactgtttttaataaattttaagtaatatttgataataaaaatataagattcttaaaatctattaaagagttgtgaaaatgctgattagagattttgaaatgaagtaagtaaagatatggttagttatttggttgttcggatttttagggaatattatttcgtgtaatattgaattagtagagattcaagggattaatgtgtgcaatttatgagggtagtgcaaaataatatttttgtttaggtaagtaattagtgcaaaacgtgaataattgatcaaaaatttggtcattgtcataaagaagacaatcttgtctgattgattttgtagggactaaacatacaatatcgaaattgaaaaatgatttttcgacacaaatcttccccaaaaatgtatatgtagattattaataacataatttttgtgtaaataattatagttttttattgtttaaaattgttagtatttaagatgcgtaaaataataacaatttcttatgcgaataaaaactatatacccattttttgcataatgaatttttacttgtaaatttaaacaaaaatacaaattgtgcgtttttacgttttcttatacaattatgcaaattttcttaatatgagaatttttttacataattacattaaaaaacgccttaccaatcagagccttaaacctataataacttcacacgtaaatggtatttattttcttctagaaaaagagaatggtggataggggaataaaataaaaagttggaaaaagaaacgattctacaacatgtaatgaccaaaacaccctccttcctccctctaaaaccccattctctctctcccactctctttttctctgttgctctctcctgagttcttcttacatgaaagtccgctgaactctttaggttcgttgtcgattattcttgctttatgtttgtgtatttattttttgaacttctgggctctttctgaaattcaatttcattgacccatcttctctgttcatgacaattcgtttgtcctaatgttacactcaaaacccttttttgttgtttatacccaaaccctctatctatctgtacttccttggaacgaaatttttttgctttgactcaatttctttcttagaattagaacattgagaatgttggaactcaaatagatgttggttcgattttgaactttttgtttatttattaatgttttctatggctctgatttgaattgtcaagtttaagacattcttcttcttctcttagataccctaatttcaggggtatgcacattttgcataaaagttccaatctttcctgatcgttgacaatatttatgtgtacccttttgtttgtctcagtgtgttaaagaagctacattgtgtttgtgatg

SEQ ID NO: 19981 - DNA, 3000 bp, Unknown; identical to SEQ ID NO: 4346
  misc_feature (1)..( 3000): 2750-1469P.txt file - cDNA_ID_1823976; gDNA_ID_1620701; Annot_ID_48767

SEQ ID NO: 19982 - DNA, 3000 bp, Unknown; identical to SEQ ID NO: 4346
  misc_feature (1)..( 3000): 2750-1469P.txt file - cDNA_ID_1823976; gDNA_ID_1620701; Annot_ID_165069

SEQ ID NO: 19983 - DNA, 3000 bp, Unknown; identical to SEQ ID NO: 4346
  misc_feature (1)..( 3000): 2750-1469P.txt file - cDNA_ID_1823976; gDNA_ID_2926176; Annot_ID_140363

SEQ ID NO: 19984 - DNA, 3000 bp, Unknown; identical to SEQ ID NO: 4346
  misc_feature (1)..( 3000): 2750-1469P.txt file - cDNA_ID_1823976; gDNA_ID_2926176; Annot_ID_199899

SEQ ID NO: 19985 - DNA, 3000 bp, Unknown; identical to SEQ ID NO: 4345
  misc_feature (1)..( 3000): 2750-1469P.txt file - cDNA_ID_1823978; gDNA_ID_1620701; Annot_ID_48765

SEQ ID NO: 19986 - DNA, 3000 bp, Unknown; identical to SEQ ID NO: 4345
  misc_feature (1)..( 3000): 2750-1469P.txt file - cDNA_ID_1823978; gDNA_ID_2926176; Annot_ID_140361

SEQ ID NO: 19987 - DNA, 3003 bp, Unknown
  misc_feature (1)..( 3003): 2750-1469P.txt file - cDNA_ID_1823982; gDNA_ID_1620702; Annot_ID_48798
tgcatcggatctgggcaagctcttcattggcgggatttcatgggacacagatgaagaacgactgcaagagtattttggcaagtatggagatttggttgaagctgtgatcatgagagaccgtactaccggacgtgcccgtggctttgggtttatcgtttttgcagatccttctgttgccgagagagtcatcatggacaaacacatcattgatggccgcacggttagtattcttggatccattgcttgacaattcatctaattatcagtcttgagtaatcgagtgttctaaagtctcgatctttctgtaatgattctgtcttagaggtcttattggtctcgctgctcgttaatgagcaacggattgttctataatctcgatctttctgtattcatgctctcttagagatctgtttggtgtcatccattaatgagttttaagcagcaacgtttagatctttctgtaatcatgctcttttcgaaatcttctgttgtcattagcttctggatttgctgttactgttataacttgtgagaatgtgttgttgctttgtgttgaagtggcaatgttagtgttagatcaatgagaaaagaatgaaagatctttttttatttctttgttgcaggtcgaggcgaagaaagctgtcccgcgggatgatcagcaagtgctaaaacgacacgccagtccaatgcaccttatctcacctagccatggtggtaatggtggtggagcacggacaaagaagatctttgttggaggtttaccgtctagcattactgaggccgagttcaagaactactttgatcagtttggtacaattgctgatgttgtggtaatgtatgatcataatacacagaggccaagaggctttggcttcatcacttttgattccgaagagtctgttgatatggttctccacaagacctttcatgagctaaacggaaaaatggttgaggttaaaagagcagtgccaaaggagctctcctcgactactcctaaccgaagcccacttattgggtatggtaacaactatggagtagtccctaataggtcttctgctaatagctacttcaatagttttcctcctggttataataataataatctaggctctgctggccggtttagtcctattggtagcggtagaaatgctttctctagcttcgggctcggattgaatcaagaactgaatttgaattcaaactttgatggaaacactcttgggtatagccggatccctggcaaccaatacttcaacagtgcttcaccaaaccgttacaactctccaattgggtacaacagaggagactctgcttacaacccgagcaacagagacttgtggggaaacagaagcgattcctctggtccaggttggaacttgggagtttcggttggtaacaacagaggaaactggggactttcttctgtggtgagcgataacaatggctatggaagaagctatggggctggttctggactttcggggttatcattcgcgggtaatacaaacggttttgatggctctataggggaattgtatagaggcagctcagtttatagcgactcaacatggcagcagtcaatgcctcatcatcagtcttctaatgagttagacggcttgtctcgctcttatggctttggtattgacaatgtaggctcagacccatcagccaatgcctcagaaggatactccggaaactacaatgtcggaaatagacaaacacatagaggtacactcatcgatgtcaaacttttttccttttgcatctcatctgctacatttatttttgcctgttgaaaagtaattagattgattaacgttttcaggtattgaagcatagaaagaaatcgacgaagagaagtgagaattgtagatcaagaagaacagccatttccgttgcagagtttgaagagttgttatttcgatatcaagtagagaaagaaaccaactttcttcatcacagtgagtttcttgttttgtttttttcgtcgttagcatcacaaacacaaaaaagagaagtttatttttactttaaaaattcttacataagataagatcagattggtagctgcaaagatacaacatggatgataaaaaaagatttggtttcgtctccatagcaataaccagagatcgttgattctcgatcactattctttaggtttctctccttcttcttccatgatttcttgatgttgtgtgctctgtttgtaactctaattgttaaaattttttatgttacagattttttttttcttttggtttttaaactttggattcgaattgttcatgggaacttttggatttttctattagcgtgagagaaaacacattgtgcaaaaggctccaaaatgattattttgttacatttcatactttttacctttgggtttcttttctcttctgcttacagtataatctatttattaagtacatgtggttaattcatgattttaaggtaaaaaagtaaacaagcttatcttccaaattggatttgtttccaagaagacattggggttgttaccaagaatttgagaaagcctgaattattggatcctttgactaaaccaagacacatttgggtccaggaagtgacaatcacattcacacaaataattaaccaatcttaaaccatgggacattgtgattaagagctacaacatcagttgaacttgaacattatgagactacatcttgagcattagcactagcattggaagttaatgggcttcaggcccactaagtaagttttcagcctaagcaatatcttcaataatgattttttatttatttaggatatttacttttaaaaatgtaaaaacaaaaagacaataaaagtttgttgacaaaagaaaaaaaggttcaaaagtcccaacggtcgaatcgaaattcagacagttcaaaaagccgctctccatctccttctctcttacagaacataatcagatctctcttgctctctcaccctcactctcactctcactctcattgtctgaaaaccatg

SEQ ID NO: 19988 - DNA, 3003 bp, Unknown; identical to SEQ ID NO: 19987
  misc_feature (1)..( 3003): 2750-1469P.txt file - cDNA_ID_1823982; gDNA_ID_1620702; Annot_ID_165123

SEQ ID NO: 19989 - DNA, 3003 bp, Unknown; identical to SEQ ID NO: 19987
  misc_feature (1)..( 3003): 2750-1469P.txt file - cDNA_ID_1823982; gDNA_ID_2926189; Annot_ID_140951

SEQ ID NO: 19990 - DNA, 3003 bp, Unknown; identical to SEQ ID NO: 19987
  misc_feature (1)..( 3003): 2750-1469P.txt file - cDNA_ID_1823982; gDNA_ID_2926189; Annot_ID_200896

SEQ ID NO: 19991 - DNA, 3000 bp, Unknown; identical to SEQ ID NO: 4367
  misc_feature (1)..( 3000): 2750-1469P.txt file - cDNA_ID_1823990; gDNA_ID_1620702; Annot_ID_48794

SEQ ID NO: 19992 - DNA, 3000 bp, Unknown; identical to SEQ ID NO: 4367
  misc_feature (1)..( 3000): 2750-1469P.txt file - cDNA_ID_1823990; gDNA_ID_2926189; Annot_ID_140947

SEQ ID NO: 19993 - DNA, 3003 bp, Unknown
  misc_feature (1)..( 3003): 2750-1469P.txt file - cDNA_ID_1823994; gDNA_ID_1620702; Annot_ID_48793
atcgattatgctctgaaaaacagggatgttaaactcgttccatgtggacttgattttggccgaccagggtaatatacattttcatctgcattgaaaaatttcatgattcgtcatctgaacacaaatgttttgctgcatatcttcagatttagcagttttagagaacaccggttccacccttctttagagaagactagacgtttctatcctcacgtgcacaacatggatggattctttgttgcaaaggtatacacttggttaacctatgaatagcttttccctgcaaaacagatgttttataaaatatgaatagtgattaaaccaacgaggtatttactttttcctttctttgttctgcagctgaagaagatgagcaatgcaatgcagccttcaggaaatgatgagccagctgtaacaatggagcaagctcaggtgtcgtctagtgatgatgatgatgagaaagctgaggccattgaggagttggagaagccacctgttgccagtgggcaacccaagagagagagtaacactaaagaagacacgaacaaacgaaaaaatccaaggtcaaaggaaattcacaaaggcaaaaggaataaaaacacaaaaaccgaaagtggtaatgtggaagaacccaggaagcaaaagaagaagagatcacaatggaagaatgagattgctcaagctaggtaaaaaaactaagtgtttccttgacagacaaaagagaaaaccttcttatgtacattgttgtatcatacacccatttacccataaatggttgaatatgttgcagggaagaaaaaagaaaaaccatgagagagaatgctaaggagacgccaaagcacaggggataagaataggtttgagatcgtgatgcatcttgaagagtagaatatttcggtgttctggccatggcgaaggacacaagaaaagaggcttcattggctgaggccaaggtatctatacaatggctttctagttttgattaatttactgcgtaaagaaagggtgacacccacatggattagctgttacatgtccaaaagttttgtatcaatcacataacttgatttttgtgagaggctgtttctattttccgttttcaattggagttgtaaaatttattgaaaacaaaaacgagtccctactttctctcacaagtgtgtttgaaaggctattcatttttctgctcctagcaattatttaataaaatacataaatcttggagggttgggtccataccaccacataaggatagaatttctcatagtattgatttgacgaaaaaataagggaattgggagtgagctggtcattgttagggagagatgtgaaggttttctgaagtgggacttgagtgttggagaaacatgacaatccaattcaactcttcttcatccatctttatcagattctcctccgttggggaccttacatttacttctctcacactaatcttcttgtttctatttttagattataagcccatattataactgctagtgcttgtagccttgtatacacaaactcacatgcatcacatataacatcgtataattgctgtattcactttatatttggatatccaagattatagaaaagagattcctttgcaggacccaaaagatacagcttttaaaagcaaatgagttcattttaatttcttgctaaccaaaatggtaagtaattttgtggacttatggtatggataaataacaaaatctcaataaaccattgaaaataggaaatcaaaaaatatatttctgcatataatttgaaaagaaaatttgcatggaaataactatgtttttgaacaaactaaacatggaaataattattaccgcaaagtacaaggcattacgataagcatccttgaaagctttgtctttttttttgggaactcgaaagctttttgtcttccagttgtaagaaaaatacaggaaaaaagaattgaaaagccctaaataaaaaagtcgaaaactttagctttgaccaactctttcctctcttttcatggtagacccaactctctcatttcttactctctgattcatctctctctctctcttcatttccatggaaggaaggtgatgagctttctcaatctctctttactgattcttaatgaaagtcatctcctttctctttggtatcccttttcttcttctctgcttaattcctgaccaaaaattgtgacaagatctttcaatccaaaagctatatacattaaggtaacgatttatgaagtatttctcctcaatttcatttcttttgtttctacgagtctgcatagatccagaagagctttgcttgattgttcttactttcctgagatctgtttaaacttagcaaaaaaaaaaagtctactttgcatgaaatgtgtgattagggtttatgctaattttggttaattggagaatcagagagtgttccctgatgtggaagtagtgaattactttgggttgagtaaatgtatgtctctcaattgattgtcaacgagatttgagctcgagatccgtaaccaagttgagctaaagcttctttctttcgacttgttctctatatgaaaattattttttctttgactcagttatttttcttaatttgatttctttgagctcgatcttatgattcatactgcaatgattgagttgtggcatcagctctgatggtatcttctgtttttaaaaaatagcaactttttagtgtttttctgctcagctctatgttaaaggatgtttcttcattacggggagaaatgaatgagagctcttgtttattgatcttcccatgattctagttctaaacgagccttctgttatctgaatttgaagtgttttaagcttttttattctaataagccgtcttcttctctgacgctatgttttgctcactgcagagctcaggtcactatctgacgggatccgtgacaatagtggttactggagtcaaaagcagctccttgaatcttgagtgttaagtagataggtaaggtaaccgttcatg

SEQ ID NO: 19994 - DNA, 3003 bp, Unknown; identical to SEQ ID NO: 19993
  misc_feature (1)..( 3003): 2750-1469P.txt file - cDNA_ID_1823994; gDNA_ID_1620702; Annot_ID_165116

SEQ ID NO: 19995 - DNA, 3003 bp, Unknown; identical to SEQ ID NO: 19993
  misc_feature (1)..( 3003): 2750-1469P.txt file - cDNA_ID_1823994; gDNA_ID_2926189; Annot_ID_140946

SEQ ID NO: 19996 - DNA, 3003 bp, Unknown; identical to SEQ ID NO: 19993
  misc_feature (1)..( 3003): 2750-1469P.txt file - cDNA_ID_1823994; gDNA_ID_2926189; Annot_ID_200890

SEQ ID NO: 19997 - DNA, 3000 bp, Unknown; identical to SEQ ID NO: 4361
  misc_feature (1)..( 3000): 2750-1469P.txt file - cDNA_ID_1824002; gDNA_ID_1620702; Annot_ID_48791

SEQ ID NO: 19998 - DNA, 3000 bp, Unknown; identical to SEQ ID NO: 4361
  misc_feature (1)..( 3000): 2750-1469P.txt file - cDNA_ID_1824002; gDNA_ID_1620702; Annot_ID_165114

SEQ ID NO: 19999 - DNA, 3000 bp, Unknown; identical to SEQ ID NO: 4361
  misc_feature (1)..( 3000): 2750-1469P.txt file - cDNA_ID_1824002; gDNA_ID_2926189; Annot_ID_140944

SEQ ID NO: 20000 - DNA, 3000 bp, Unknown; identical to SEQ ID NO: 4361
  misc_feature (1)..( 3000): 2750-1469P.txt file - cDNA_ID_1824002; gDNA_ID_2926189; Annot_ID_200888

SEQ ID NO: 20001 - DNA, 3000 bp, Unknown; identical to SEQ ID NO: 4360
  misc_feature (1)..( 3000): 2750-1469P.txt file - cDNA_ID_1824006; gDNA_ID_1620702; Annot_ID_48790

SEQ ID NO: 20002 - DNA, 3000 bp, Unknown; identical to SEQ ID NO: 4370
  misc_feature (1)..( 3000): 2750-1469P.txt file - cDNA_ID_1824006; gDNA_ID_1620702; Annot_ID_165112

SEQ ID NO: 20003 - DNA, 3000 bp, Unknown; identical to SEQ ID NO: 4360
  misc_feature (1)..( 3000): 2750-1469P.txt file - cDNA_ID_1824006; gDNA_ID_2926189; Annot_ID_140943

SEQ ID NO: 20004 - DNA, 3000 bp, Unknown; identical to SEQ ID NO: 4370
  misc_feature (1)..( 3000): 2750-1469P.txt file - cDNA_ID_1824006; gDNA_ID_2926189; Annot_ID_200886

SEQ ID NO: 20005 - DNA, 3000 bp, Unknown
  misc_feature (1)..( 3000): 2750-1469P.txt file - cDNA_ID_1824010; gDNA_ID_1620702; Annot_ID_48789
taattgcatattttaaagacttttcatggctttttagctcaagctttactctgtttctctttgctcttgttcaggagatcaaatcaaagacctctctgtttccgatatgagtacccgttattcctctcagttgcaatcatcagccattaactccatcactgtctcctcatcttcttccttcgcttccacgcaactggatgataacactcacacggctccggagagctctccatcttcttccttcttcatgagacttgccatgagggtatctagagcaaggtggttcattttcttgagaagagtctttcattaccagaacgcctcaagatccgatcttggcaccaatcctttcaattctatcgcttggatggtatcagagctcatcgctttacttttacagatcactgtgataacatccacactagctttgtccaaaaacgagaggcctgtttggccgatgaggttatggatcactggctacaacgttggatgtctgctcaatcttatgttactatacggtcggtatcgtcagcaagatactagccatgaaaatgcatttagcttcggcgatattgagcagcaacaaagaagcagggaagagaccaccaggttactaacaaaaatctagttttttcaagtttgatcataaaatgcaaagatttctaggaaaatgacttatttttgtgtgtgttttaggtgctcgcatttgatgaacaaatgccggacatcgctggagctattctttgcgatatggtttgtgataggtaatgtatgggtttttgattctcggtttggttctttccactatgctccaatccttcatgtcctctgcatctccctactcgcttggaacgctctctgttactccttcccatttcttctcttcctcctgctctgttgtgttgtacctctcgttagtagcttcctcggctacaacatgaacgttggatcttcggaaaaaggagcttcagatgaccagatctccagtctcccaagttggaaatacaaactcattgatgaaacttctgattcttctcaagcaaacaatgatccggtaagcactaatttgaattctgaaataggtcaaatagtcagaaatcaatcttgatatcaaaactgaaacccaccggtttcattattgcaggaatgttgtatatgtttggcaaagtacaaagagaaagaagaagtgagaaagcttccatgttcgcataggtttcacctcaaatgcgtagatcaatggcttcgtatcatctcgtgttgtcctctttgcaaacaagatctccctaactgaaaaatcaaaacaatacatgagtcacaagattgaatctctgaccaagtaccatatatgtgtttttttttttttctgttgccgcctaaacacgtttacttgtgtgaatgtcgttatcattcctttttttttcttgtgtacaaagtagctcaccagtaactgtaattttacctaaaaaaaaagttaaaaaacatgatcaatctgttgttttaccagtagagtttgtccctctcttaccattaatcaaagttttaattgttggttaatgtaactaagcttatactggtttttgctataatattttttccaaagacaatttaaaccgaattcaaacccagagaccaaatcagaccaaagcaacagtcagaatccgaataacatgacacgccgtcgtataggaacgattattgaaacgatggtgtttaagacagcgcataaatggacacatgctccactagacgacgacgtgtgaaagtgaatgtaacaaggagttttattacaactgtatcaacatcgagtaaaaataaacaaaattatttattttttaaatttaaaaagtataaaaacgccaacaaacaaaaataatttggtctttttcttagcatatttaaaattttgcaatatattcattctgcttatagaaaatcgtgtcgaccttttttctctcacttacccaataagagcttttttcgcgttttccaccgcaaccaccgtcaccttcaaccgccggagccgccgcaaggaaggctcatcatccgccgtggcgtaaggctttttcttcttctctttctcccttttctacgatttcgcggtcggtcgcttcctcgtaatctcgtgtgtttattccgggaaaatcgcgatgggaaacaagttaaaatttgagattgagaatcaagcaactaatttcttcgcaagctgatagatccatgagctgattaccaagtttatataacgagattcatcgttgttgtatctctgaatccgaacgatttggaatctaaaactcattggatcgctttttctcatatccgtcatttctccttagcttaatcacttctctgattcatatcgcgattagattcaggtgtcgatcctcagaggattatattttctgacgattaatccgtctggatagttttattatgttcttcatgatgcattttttttccccgcaaaattcatgatgcatttctgacgtgaaattgggtgtttttgattcctcattttatcctagttcatgtattttttggggctgtttcttagatttgggtttcgtgttttagcttaaagatagttcctaatccatgaatacattggttaatctggaaatgaatctggagttaagattaatgcataaagtttacgaccgtttataatatgcgtctcctctgtttgtgtttcatagtatctggtgctttagtctaattcagatctgatctgagaatgatgaatcttgtttgctcctgtcaattcttctttaactgttttgcaatttgatgagctaataactgactatatctcatttccttcccatcgcagaattttttgaggtgtacaaagcattgcctatttgacgaaccaggaaatggttaaaaggtacttatcttgttcaaatgcatatgtctttagattcttccaagtggttcgaaagttcttacattttattgttatttaacaggcatggagagttttgatttacaagatatatcatg

SEQ ID NO: 20006 - DNA, 3000 bp, Unknown; identical to SEQ ID NO: 20005
  misc_feature (1)..( 3000): 2750-1469P.txt file - cDNA_ID_1824010; gDNA_ID_1620702; Annot_ID_165111

SEQ ID NO: 20007 - DNA, 3000 bp, Unknown; identical to SEQ ID NO: 20005
  misc_feature (1)..( 3000): 2750-1469P.txt file - cDNA_ID_1824010; gDNA_ID_2926189; Annot_ID_140942

SEQ ID NO: 20008 - DNA, 3000 bp, Unknown; identical to SEQ ID NO: 20005
  misc_feature (1)..( 3000): 2750-1469P.txt file - cDNA_ID_1824010; gDNA_ID_2926189; Annot_ID_200885

SEQ ID NO: 20009 - DNA, 3000 bp, Unknown; identical to SEQ ID NO: 4385
  misc_feature (1)..( 3000): 2750-1469P.txt file - cDNA_ID_1824054; gDNA_ID_1620703; Annot_ID_48808

SEQ ID NO: 20010 - DNA, 3000 bp, Unknown; identical to SEQ ID NO: 4385
  misc_feature (1)..( 3000): 2750-1469P.txt file - cDNA_ID_1824054; gDNA_ID_2926174; Annot_ID_140257

SEQ ID NO: 20011 - DNA, 3003 bp, Unknown
  misc_feature (1)..( 3003): 2750-1469P.txt file - cDNA_ID_1824065; gDNA_ID_1620703; Annot_ID_48805
tgacaaaaaattttgggcttttatttatctgtgtactattaaattaaaatgtgaatatatataaggacaaaattgattagacgttttacgagggtcttctgtttatttttggcttttgattgtttctatcacttttgtggaccaattcatgttttcttataaactaataaaggataaatattcgaacaatcaaactacttttatttaggccatgagagttataattgtattagtctaaacaaattagaattcttttacttaagaaatttgtagccacaatcaacatagtttcttttgtaacatctctactagaacaataatattgacattttacatatgatttgagaaaaaaaaatgaagtagaacaactaaaaagaaactatctagctaatcaaacaggggacacgcacacgatatattagccgtaggcgacccaactgagctaatgctaatggctcccaccacactaatagatcagtcccaaccaaaaacctatgtggtgtttggaattagaggggctattaaaattttagttatacccgaaaaggaataaaaaatgcgtcaatatctttaagcagccccaagattctaatcttaggcggctatgatgactaaaaaaaccaatcaaaggaaatgtgatttggataatttttagttaaatgtcaatatcagtcccaaccgatacgttgatgagactattactatatcattcctcgatatgcatgcatacattcaagttacagcaaattgtctcgttactaaaatattcattatttactctttaagttatgaaatgattgaaaaatattcatttttatatctaaataagtagtatatatataaaagtagtaaattaataatgtttttttttaatcaaaattcaagtatgccacctagtacaacaaaaactatactcctgtatatttgtaacaacaattcatacagtcaaaatttcatttgttaaaaacatgagatataattaataaaatacaatttcttgatttctagctatggaaactaatattctcccttgagttggattaaccgcatgacacatttatagatccaatacggtagtatgcgttgtcaatctaactattgacagtttacgctcttgctcattaaaaccaaatagactatcgtagattttgtctaagagttgcacaaaatgtcttctatcctttcttttcacaaggattgcatatgtttgactttcttcctcgtaacatcaacgcctacttcgtaaatttttattttattttgtctcgataaataataaattcatatttcatgacaattgttagatcctcagaaatctgaaataccagtatgctagaaatgccacatatttgtaacttcttttagattcaacttgttgtatttcagcttttgcttcttagtaaaattaatttcggtggtttatttttgaaaaatcacacatacgacatcatttgatacaagtgtaaaaactgtttagtacaatttttcaattccttgaaagctaaaagggtttcatattctaaaacgcataacaaatacgatacatattcaaatgcacgtagatgtatataccgagatacatgtggtttaacctgctcaatggtgaaaaatccaactctacaaacgttaacaccataattaattgttttcatagtctaaacgcaactaatttcctgtaaaaagtatcagtaccaacatggcctatatcaagtacacaaaaacatcattaactgttattccaatttcattgagcattgagttgtatcagcatcatccatgttggttcatgtgggtcattcacgagaccaatggatggtgacagaaaacatgcattttcaattagcaggtgagttaataaatgaactaataccacttttattattataagcttaatgagtgtatttggatattttttgttttagttaaagtaaacatacataatgatgacaaaaaacaaacgatattttattttgtcaacatttcctatacgatgcatagacatgatcaatgcagtgagatattttgtcaactaatcatatcaatgctcaatgaaatcaaaatggatattttgacggttcacggtttgattggtctaacacaccggtccgacaaggctttggaaaccattttttatatccatctgattaccaagaaaatatactgtataagataaacacaatcaatcaatagtatataagaccattctctaaacactatctttaattataatgtgagtggatcactcgtatctcggatttcagcccaatttgttttaacatgataggcttgttaaacgagaggctggctcatccatcgaattcctttgacatgatccaaagttactcttatcgcaaatagattagactacggttcaagccataacacttaaatccacacttcatagtctcttgaccaaacaacacacttatgcacactatctttttaaataaaacaaccgtaatttgggtcgatacatatagggttccttatgtaagcccaaaatgtaaattggctttaatcagccattaaatgggccaacaaggcctttaaatcaaaacagtataacgacaaaaacgtacttggacgtcaaaaacagatagacacgtggcagtttattgttgatagacaaaaatcgtgaagccgcttcttggaatggagattcttcactttggtggactagagactctttgaggtctcaagttaactctttaaagtttaaaccttttgacttaattcaaagccgtacaactttttttgttcgccgccgcgtcgccggaaaatcatcaccgttagtcttcttctcttccttggtttatctttttgctgctaaaatcaaatttagggtttaatcacttcactgttgtaacaattactgattcttactcaaattgattcgttgaggcattgtcttttcgaatttgatagttttaactgaatcttcttgtattagcttcaagcttatatactatgtgaatttggtagcaggtatatgcgataaacatg

SEQ ID NO: 20012 - DNA, 3003 bp, Unknown; identical to SEQ ID NO: 20011
  misc_feature (1)..( 3003): 2750-1469P.txt file - cDNA_ID_1824065; gDNA_ID_1620703; Annot_ID_165155

SEQ ID NO: 20013 - DNA, 3003 bp, Unknown; identical to SEQ ID NO: 20011
  misc_feature (1)..( 3003): 2750-1469P.txt file - cDNA_ID_1824065; gDNA_ID_2926174; Annot_ID_140254

SEQ ID NO: 20014 - DNA, 3003 bp, Unknown; identical to SEQ ID NO: 20011
  misc_feature (1)..( 3003): 2750-1469P.txt file - cDNA_ID_1824065; gDNA_ID_2926174; Annot_ID_199731

SEQ ID NO: 20015 - DNA, 3003 bp, Unknown
  misc_feature (1)..( 3003): 2750-1469P.txt file - cDNA_ID_1824073; gDNA_ID_1620703; Annot_ID_48802
tgtttttactacacacatttgcttcctcgaatgatttgaaagtagtgacgggaaggaacgatttgcattccgctgctgagagataatgcttgcattgcacttgaggacacctgatgggaacctctgaagtctttactttcccttcaacgtacgttttcatgcagtgcgaacagaatttgtgagtgcatttcaatgatagcatcatctcagactgacggtcttcacagcagatcgagcagttctcgatcggtttatccccatcaagattagaagacacgattcctaccgctacttgagccaagcttagagcttcatcaagatcacagaaaggagcaagctttagaacaaacccattaaggttacttgttttctccaataccctttctctcagagctactaaaagagggatctcgagctgctcctcacgagttatctgcaaagtcaattcatataaaacgtgagctcaaacctacaaagagatacaaaaccatatgaaagcaagtctcttcaacaagctaaagaagagagactttacctgattatagagcaactcggagtcggttacagcaaccacagagctgagattgttctgtaaagctacttcaagaccatccataagagctaaatagttagctacagactcttcgacataaaaatccaacttcttctgaacctgaatcaactccaaatctcctgacctctccaacacaacaccaattcccgaataaccagaacccaaatctcctctttcgaatatcgagactcctttaaagaccatcttaacagagaactcatcatcaagatcatcttttttctcctcctctacaactttagctatatcatcactaccctttaaccaaagttcttcatcaccacaacaacttctaaactcttcctcatctcctaagtgattcaatggaagctcctcacattcacaagaatcctcttgattttccatgtctggaaacaaacctatctaaactacaaaaaggtacaaactttcttaacttagcaacacaccaatgaaacccatatcggatctgcaaatttcatgaaacaaaaccgaataaaaatgagataaagctaattcttttagatatcatctaatctcaattataccatatactgagagagagaggaaagggaacaaaaaaaatgaactttgcattacagatcaacaaaacagctaagcttgatgaagttacataaacagatcagcataaatcagagaccaaatcatttgaaagtacacagaagataacaaaagaagcagctcgatttgttgacccactaaacaccaaccagaccctcaattattacatatttcaaggaagaaaaaaattctaatttatttaagtagcagaaatcaccagagattttgtaataaaacgagatcggttgaaattaaagtatcattaagcaagaacagaaatccagaagctttcttaccagtggaaggagatttacacttggaaactaaaattaagaagaaaactctaagctataataacatcttcaaaatctctgtttttttccaggaaaaaaaagaaaataaacgcattgttttggatgtttctactgagtttttgtggagagaagaagaagaagaagaagaatcatcggttcttctggttttgctctctcttcgaatggcgtaagagaaaagttttacttttttttgttttgtttctttattctctctttttttatttattaatttattttatttttctgagtttttggcttcactttgctgtcattctcgtactgtacaatgttttatattttcccacaatgaaataattattttcacattactaatcatcaagtatttaatttaaaatatatagtttaaataattgaaactgtaataatggaattggattagaacctgagcatgaagaattatagcttaagaaaccaaagttagcacatggactttgtctcctctcattgagaaaaaaagctgtaacttcattaaaaaaaaatctttctctgacttttaacatccaatagttatattccctttgaataaagttagcaaaaagaagtacaaaaatgaaatttttaataattgtatttctgcaatagaagacactcgaggacagtttatggcagcaggaagtttgaaaatggagacagcaatcattagcttaattgtttataatcttaattcaaatgggaaatgtgaacatggacttatcttttattgcagtgtttgtggcatctgaagaaacagtaattaacagaggaaataaacagaacaaatgcgattactaatgaattaaccaaataaatggagcaaacacagaacaaacaattgaacatcatttctaatttgaataacacttctcatttgaatcttgtacatcatttctaattttaatttgtaatatatgggcctactgagacatatcaatgtggcccaatatcaatagatggcctactcagatttttcctttgaacacaactaattagtaattcctaatttgctaataatgaaaacataaacaaattttgaagtaggaaataacgatatattaccaatggatatgacaaagaaaacgacaaattttgtagttttttaacagtttgtaaattgtaacatattcaattcagcgatgtcggtagttcaattttaattcaacattaaaccaatttagcaatacattttgacagtaaaataatacgacatttcatgtatcgtttggcatgatccacaccttccaggcttctcttcgattaaacaaaactataggataatataaaatacaatttaaaacctttttctatctgataatgtacatacacaatcaataaaatcaggattccgattctctagtgtaatcttttttctattgatttagtcataacttgactttccaaatcagcagcaccgagaacaagccggcaaatcttctatataagacaaccaaagacaaaacaatttatctcatcaaaaattcaaacatcatatattataaaacaatctcaatactaatg

SEQ ID NO: 20016 - DNA, 3003 bp, Unknown; identical to SEQ ID NO: 20015
  misc_feature (1)..( 3003): 2750-1469P.txt file - cDNA_ID_1824073; gDNA_ID_1620703; Annot_ID_165146

SEQ ID NO: 20017 - DNA, 3003 bp, Unknown; identical to SEQ ID NO: 20015
  misc_feature (1)..( 3003): 2750-1469P.txt file - cDNA_ID_1824073; gDNA_ID_2926174; Annot_ID_140251

SEQ ID NO: 20018 - DNA, 3003 bp, Unknown; identical to SEQ ID NO: 20015
  misc_feature (1)..( 3003): 2750-1469P.txt file - cDNA_ID_1824073; gDNA_ID_2926174; Annot_ID_199726

SEQ ID NO: 20019 - DNA, 3000 bp, Unknown; identical to SEQ ID NO: 4378
  misc_feature (1)..( 3000): 2750-1469P.txt file - cDNA_ID_1824077; gDNA_ID_1620703; Annot_ID_48800

SEQ ID NO: 20020 - DNA, 3000 bp, Unknown; identical to SEQ ID NO: 4378
  misc_feature (1)..( 3000): 2750-1469P.txt file - cDNA_ID_1824077; gDNA_ID_2926174; Annot_ID_140249

SEQ ID NO: 20021 - DNA, 3000 bp, Unknown; identical to SEQ ID NO: 4419
  misc_feature (1)..( 3000): 2750-1469P.txt file - cDNA_ID_1824094; gDNA_ID_1620704; Annot_ID_48847

SEQ ID NO: 20022 - DNA, 3000 bp, Unknown; identical to SEQ ID NO: 4419
  misc_feature (1)..( 3000): 2750-1469P.txt file - cDNA_ID_1824094; gDNA_ID_2926206; Annot_ID_141725

SEQ ID NO: 20023 - DNA, 3000 bp, Unknown; identical to SEQ ID NO: 4405
  misc_feature (1)..( 3000): 2750-1469P.txt file - cDNA_ID_1824120; gDNA_ID_1620704; Annot_ID_48835

SEQ ID NO: 20024 - DNA, 3000 bp, Unknown; identical to SEQ ID NO: 4414
  misc_feature (1)..( 3000): 2750-1469P.txt file - cDNA_ID_1824120; gDNA_ID_1620704; Annot_ID_165193

SEQ ID NO: 20025 - DNA, 3000 bp, Unknown; identical to SEQ ID NO: 4405
  misc_feature (1)..( 3000): 2750-1469P.txt file - cDNA_ID_1824120; gDNA_ID_2926204; Annot_ID_141672

SEQ ID NO: 20026 - DNA, 3000 bp, Unknown; identical to SEQ ID NO: 4414
  misc_feature (1)..( 3000): 2750-1469P.txt file - cDNA_ID_1824120; gDNA_ID_2926204; Annot_ID_202085

SEQ ID NO: 20027 - DNA, 3003 bp, Unknown
  misc_feature (1)..( 3003): 2750-1469P.txt file - cDNA_ID_1824123; gDNA_ID_1620704; Annot_ID_48834
actatttggatctttttgtggctcaagctcctgctaaattcaatccatccctcatctcaagatcggcaaattttgtaagtagtcttgtttccatctcttgaatatgatgaagttgcatctgacatactgaatttactatgccatagtaagcagatcgttgttagtttactattttcttaaaattaaatgtgactattgaaacatgcatttgagaatactattttatctgtttcacaaatgatatttaagaaaattgaaacaaatttttataatcttatttacaacttaagttttcttatgatatgaaagcactccaccgagaaacagtgatttgaatgagatggtttaatttattttctgcttcttttcagctaactaggaattggtttcctgcaaaggaagcttcacttaagcgtagaaacatcttagaattgctttacaacctccacaaaggtcatgatccaagtattcttccagctaattccaaaagtgaaccacctcattgtggagtttccaacaggaatgatcaagaaactgaaagtgagaatgtgattgagtgctgtaactggataaaaccatttgatggttcctcatcaaccgttacagacatttcccaaacgaagacttgctcgccggatctgattcttagcaaagaagtttcttacagcggaggttatgaccctccgtcttctaagctccgaaaggtcttcatgtcacctattgtggtaaaatttcattttctatatcttcagtttagattctactgctaagtatcttatgttgataatgtttctatacaatttctcaaaccaggaagaagtgcaagaaagttgtgagaaaaaggaccatttggaaatggacatacagaaatccactggtcatgagatagaaacattgcgaaaagagggatgcatgctttatattgaggacagtgatgatgaagaagctgtttcagtagaatacgtctctgattctcaagattcatatgaagttgagatgaaagtagaagatgatgatgacgatgagcttatagttactggagaatcttcagggattcatggaagcagagaaatcaagtctgattcagcatcgatcgaaagagtgaacaaaagtagagattcaactgctgcctcttgttataatgactttcttcttgtgttatctgatgatgagaggagctcagacgacaaagaaaacatcttaataagttcaaatgtgatggccaagccaaaaacttgatactttaatgaagatgaatatcgccaatctaatgcgattattatttttatggttttctaatctctttgcccataatgaatatcatgtcaaattttatattcaatagtgctcgtctcttatacgaccagtatcaaagctttgtttttcaacagacaaaaaacaaaagaatctgctgttattatccaagtgggaggatgaaaaccgagagctcacacaatgctttaatacaaaaagaaactgatgtcgtcgtccattcacattcacacgtcttcgtctctactctgatgctccaggagcaattgttccaactcttccttgcgtcgggctatctcctgcaataagggtcaatgacttagaaaccatttgagtgatgataataatgatgcagatagactatcaattgacacttgcctcaagatccttgactgcttgttctcttgaaacttccttttgctgtcgagcacgcttcagaaagccgatgcagagaactccctgaagttcagacaacgatcaaagattgacagtgaaaacataaacgggaactcagatattgaaaaacaaaggaagtgattgcccaagaagctcatttttcaagttagaaatagccctacagattcgctaaccaccacatcaagcatctattgttcagagttgggagttatccaagtgatcctaaaggtctggggacaaagtgtcaacatgagttcttacaacaaaccaagaatcgttttcaagtgaaatgcattcttataagcaagatgcaaccacaaggcacaaactaatacgaaaagattcaacaataagcgagagcagagagggaataagcagatgtgatataataggatgaatggtgatagcgtacagaaatgacatagataacaccacaagcaagaagcaagtagcttgcgatgttctgtagaagcaggagatccttcttttgagtcatatagtcagggaaagctcttgtcatcacagcaacactgaaatgaacaaagtaaagatatatacataaaacataaaatcatacagcaaccaaggaatggtctcatttttgagtacctggcctggaattagctgaagcagcactcaaaaaacacatcataaaagaacaacacgatccattccaacacaagaggtacaaaagaaggttactaagctgtatagatgtacttacaaaatttgaagcattcctctaccagcccagtattcaagaacctgtaaacagatttgcaaaattagaatcaattcatgttagaaaatcaaaggaaagagatagcaaaagatacgaaaccttggaaaatttgagaatgaaaccccattcagtctcaacgagaacaacaaaacaagcaatcaccacagcataacaccggaatattccatcgaagagctgctcggagaggaaaagataaaagctttacacagagatcatcttcaagtaatctaatgcctgcgcagcgagagaggaaaaagagagagagagagagagagattatacatcgtggctgtcacggaaggagcgaacggcagcgagaacgttaacgacaacacagagaatggcgatgagagaggtaacgaggctgaagcatctacaaacaacaaggaaaggatctgctctgtttccgagcttcaatttcgcggatccggaagaaggtccggcgggggattcttcgatttcctcagtcctatccatctaaaaccaatttcccggtgagaaaatccgccgtcttaagtggaatttggaatcgagacgcgaaaaacgaaatg

SEQ ID NO: 20028 - DNA, 3003 bp, Unknown; identical to SEQ ID NO: 20027
  misc_feature (1)..( 3003): 2750-1469P.txt file - cDNA_ID_1824123; gDNA_ID_2926204; Annot_ID_141671

SEQ ID NO: 20029 - DNA, 3003 bp, Unknown
  misc_feature (1)..( 3003): 2750-1469P.txt file - cDNA_ID_1824127; gDNA_ID_1620704; Annot_ID_48833
ccaattccccatcttgaacctgagttctccccaatggtataaaacccatctttgaggattttcgcactggtgtcttaagctccaagcaacaaatgggaccatggcggacagtccatgccacatattaccgtaatcgtaatgattatacgagacaaatgtcaatccctcctggagactggcattgacaggaagagcttgaggccaagccagtgcataagtagttccatatgatccatcatgctcatcaacccctttcaagcacaaaagccttcctttcgaagattccgaaggaaattcttgatattgaacctcaccttttgtttggttatcgtagagagagctcataaaccaagtatgaccttcaagtggtttgtttgaaaaacgaaggtctttcaggggaaggaatgttaccgactcacgtagtttctccaccaagtaagccgtctcgttctcagattttatttgttcaggttcttgttgttgttcttttagatatgtgaatagtgaaggaggaagtaaaatgggttgttgggtaatgtgaaatgaccagatttgaagaagaacaaaaactgtgacgacaagacacaagacgttcaaggagaacttaggggaggctaagcaagtaactagattccttgaaacgctgcgtttagtcatgttttgaatgggaagagtgaatgaatgtgaagactgaagaaagagaatggtttttatcagatgacatgggtgaaatgaaactcgtgaggcaaaataaagctaactttatttgccaaagatgttgatgcattgcatgtttgaaaaacgaacgttatcacatctgcgccaacatttgtggcagtttttagcatcgactaacacatgcgtcttgttttattttctaaatttgttcagaaagtttttaagaaagaaatatgtatttattttgataaattgacaacccgaaattttcatataaacttaaagaatttagatagtgttttactgcaactttaactaaaaatcatgcacttataccaacttatacgtgtatatatcaaacgtcaccaatttttttatatattactatgagtaaagaaccaagtaagcactttaacaaaccacaaacaaatttaaaatacaacatattaataatcaaaaggaaattaaaggtacaaaatacaaatcatcaaacgggggtatgcgtaattaaacaaacaaaaacacaccacaatgaaacaactaattacaacaatcttataataaaatatacatcatcaatcacatgaagtgatgatagttcaaggactcgaagtagttgcagaaggcgggggagagaagaacggaatggatgggagactagtcggcagagagggaatggatgggagattagttggaagagaaggaatggatggaatattagtcggaagagaaggaattgttgttggaaatgaaggcaaagttggcattggaggcattgccgtgggaatggtgggaagatttggttgtggcaaagctgatggcattggaaatggagacattgcagtgggcattgtggggagagttggtaaagacggttgtggcaacgtcgatggcaatggaggtagtcccattgttggaataggcagatttgggatttgaggaagaggttgttgttggagaaggcggcgtgaggctgagcaagtgttgatcatcatagaggaagagaggcacactagaaaagcaatgcggaagagcttgtatgatgccattttgctttggttgtgaatctctaattatggttaagcctttctaattgcttctcttgtattgcttgctttgtgttgatgagaaattcaaagatatgcgattgagtttatatagcggcaagagtctctatggataacaaagaccttttattcaaatatcatatatggtttggttaggtgtactttatggttggcttgagctattgttagttcaacttaatgtgtgtttaatagattattttgacaattcaaggatttttattgaagttagttcaacaatcaaaactatctaactctaatacacatgttaagtctataaccaaacttttaaatgtcattttaagcttataaataccaattaccaccgtaagtatattataaaatctgatgtaacaacataaattttgtgtaaagctatgaaatatgaaataatctccaaaacaccaaataaaacaaacaaaaattatgatcattattttgtcacagctgtaccaaaaactccaaaatggaatttcccggtcaaaccggatacatggtttgccaaataaaaaaccggaaagacgaacaactaatggtttgacggatatgaccggtcgaaccggatagacaagcaattgaattttgaaaatctgtggtcattcccgaaaagtcaacctaactagacagaatcgaaattcaaaattccgtctctttggtacagaatacgctttggaccttctcgagcccgtcggaactgtaactcagtattattctggcgccgatgactctccggtcagttcaatcccgaagtaagcggaaaccgattgatgtatttgattactctgacgaggatgaccgtgttgaagaggagtcgaagaaactccttcgcaaattcgattccccagttactaaaaaacaccactgcgccatcgataagtatgaattccttcgatgctgtgagtgtttcttctctgaatttctcattgaattttgtttttggctgtgtcctgcaaaatatttgggaaggaagatcttatttctcattgaatttccccaagtttaacatggtaacacaagagaaggaatatgttattttttgtgttaatatctttctattgcagttgcgaaggatacccaaagcgagagtaaagtattgcaacacattgttattgatgttgaaggtaatagtaggaaaattatatcttggagaacagttctcaactacaaatgatgaaaattgtgtagaattccaaattttcagatgctagtgtgtgtggtagaatagaaataaccaattatg

SEQ ID NO: 20030 - DNA, 3003 bp, Unknown; identical to SEQ ID NO: 20029
  misc_feature (1)..( 3003): 2750-1469P.txt file - cDNA_ID_1824127; gDNA_ID_2926204; Annot_ID_141670

SEQ ID NO: 20031 - DNA, 3003 bp, Unknown
  misc_feature (1)..( 3003): 2750-1469P.txt file - cDNA_ID_1824143; gDNA_ID_1620704; Annot_ID_48829
aagcgaattcgaagaagaagagacgcttagattgttaccaaagtgtaaacatgcttttcatctttattgtattgatacttggcttagatcacacaccaattgtccgctttgtcgtgctcctatcgttgaggccaacacaatgattgatgatcatagtgaggggctagaggagataagtgtgatgattccagaagaaaatggagatgataccgatgaagaaatcgaggaagaaagagatggctttgttagtaatattagtagagatcatggtgagtcacaacaacagcgagtgagacgatcagtgtcgttggattcgttatcgggtttaagggtaagtgaagttgttgtgggtagagaaaaggagaagttgaagagaggcaataatattggatctgggaggtcaagtttattgaagagatctatctcttacagtggaaagtagtactagctagcttcagtgctaataataaaaacaagaagtccataaagtaagtaagtttcttgaagaagaaaatcaaatcaaacccaacaagatatagattgtattcatatgtatgaaggtgatataagattacgattatcaaagctagtcactcttgtaaagttaaaagagagttttgacaacttctactactctgcttagatactctggatttgtggattaagtataaatatacaccaaacttcgttttgtatgttacttatttattgttcctcaagaaataccatctggattttaattatttttagattcaactgtcttatgtgaatggatttacatttggcgttgtggatctctaacactaactatatgaaacgctgcgtttcattaaaagaaggtaaaaacgacaaagagaatcttcgtcttcatcgatcattgttgtgtaaaactcttgttcctcttcctcttcaacgtgaacacttctatttctcagagaacattcacctatatgtctttcttcaaggagaagtcttcctctttccagatttaggttagattcatgttataactttttctaagatttctgatttccgaatttgaattttgtttatgatttagtgtcggtgtagaactgaatgatactaatgcaaatgattgagatcgatttgatgtaaaattatcaccttctcgtgtaatttaaaggtcgaatcgtccggggtcacattgtcgcaggtttatgtttatcctctaaattagggtttcttttgtgaaattggggattttttttgtctgcttacaaatcatgctgttttatttctcttgaaattaacttcatgctgtttttgacatagaatacaacagacaaactagatttaacagaactgttaagatgaacggaacataagatgacttctaaaaatggataaattttaggtcaatttttctttccattttcagttttctgaccctaggtgagatttgttttggacttttcatgtattgtacatgtgagttaatcaaataaaatctaggttcatgcatttacaaacatagtttaggaagtaaaatcacatgttaagttttgatcttaaactcttgttgttattcttgttgttgtttgctacttgttagaattatgaatctttgacctatagcaaatttccataaaatcaatcatgttaacccttaatccaaatcctccatcaaagagtttttttgcattagttagcttctcatgaagcgaatttggttttgggaaaagaatttgtggggtggggtccaaaactgacacgacacaaaaactttggtttctccgtctttgttggagaaatgcattcacatccacttcttaccaaaattaaataaatcaatatttaatttttttaaggccttcttgttttttcagatgaacactcttcagatgccttgtgccttattgatccagattcgaagtacccaactttactctctagacctttttcatggcagccactcccacacacttctctgtctcccatgatcctttttcttccacgtctctccttaatctccaaactcaagcggtatgttgtcaattcttcttccccccctccctatcacactgtttcatctaattctgactattggttttcttaactctgttgcattttttatttcagatctttggtcccaatcacagtttaaagacaacccagttgagaattccagcttctttcaggtaatttcttggctttactaacttttcagtttggaattgggataacgatccgtaattatgatatagttgtgagagaatctatgataagaatcttagagaaatcacttggtgatgcattgtactttgttgaagaccctttttgtttgtacagcttatgtttttgtttcttaggtttctataagtagtgtgtcttttataagatttgaaaagaagagtcttttttgtgatgcttcaaatggcaaaatctcagtgaagatgtttttataataatcaaatgttcagatttagtatgtttttgtggtgtttgcagaagaaaagctacaaacttgcaagtgatggcttcaggaaagacacctggactgactcaggaagctaatggggttgcaattgatagacaaaacaacactgatgtatttgacgacatgaaacagcggttcctggccttcaagaagcttaagtacatgtaagttgcagagtaccaccaattgtcatttttcaatggttaatagattacttatttcctttcttcttcacctgatgatattctcttgagcagggatgactttgaacactacaaaaatctggcagatgctcaagctccaaaggtagctttactcttcaacgaaattttattgttcatggaaggcttgagatatcttctgtggtttgaattttgtctggagaaaggaattgttactaacagtttaagcaacagtttctggtgattgcttgtgcagactctagagtttgtccttctgctgtcctgggattccaaccgggtgacgcattcactgttcgtaacattgcaaatttagtacctccatatgaggtataacatttaatg

SEQ ID NO: 20032 - DNA, 3003 bp, Unknown; identical to SEQ ID NO: 20031
  misc_feature (1)..( 3003): 2750-1469P.txt file - cDNA_ID_1824143; gDNA_ID_2926204; Annot_ID_141666

SEQ ID NO: 20033 - DNA, 3003 bp, Unknown
  misc_feature (1)..( 3003): 2750-1469P.txt file - cDNA_ID_1824147; gDNA_ID_1620704; Annot_ID_48828
tgaccaaaaagaaagtaaataactaaaatgagaaaatgaaaaccacgagctcccaaatttcctgcggcttctttagcctcttgtttcgtttatgtaccactttctcgactccacactttataaaccaaatcctccacgaaactccaaacacattgtccaaagatcaatacacactgttttaagaagaatttgaaaagaaaaagaaaaaaagaagatgaatgccggaaagcaagcttcgtgggcggtggcgacggcgatcgcagccgtggaagtgctaaaagaccaaggcgttgctcggtggaactaccttttccgcttactccacaaagaagcaatggctcgcgtccgtaccattacagtcccatctcgtccctctcctcctacgtcttcatcttcggctacttccatcagatccaaacctttgtccaccacaccctttgagacatcctttgagaaagctatgggtcttagctgctttggtcccaccaccgttagattctagatctctatgtactgtgttgtatgtacgcaaatcagaatgtgcatgcgtctatgacttgtttttgtttacccatcacatcattagctaggtccactaaatgttgtacttgttggagtcattattctaacattttgttttcaatattgaaataaatctggttttatatagacataactaaaacaaaccggagtgtttaagccggtttatatttataccacaaagaatcttaatccgctaaatttacatcaccgaaggatggacccttgtgagtcacacaattggtgtgcaaattagaagaaaaacatcaattcattttttattacatggaaacaattttagaattttttttgctatgatacaatgttaccaacccatcattatttgatttatgataataaatttcattatgtaaattttacacatgacctagtgtataaaatagacatactagctggaccataatcagacgaacttaatatcggttaatacactaccggttcattaagcatttagacaaaaaaaaaaaagaagaagaagtccatatacatgcatatatacgaaagtcacatcagaagatcagacatacaagtacaacgactagtcagtggacgcagtttgttgtgtggtgggacaaggtgagaatatgcccacagatatcgctattgctctctttaaccattttggtccaaaacactttgccaacttttttaataaagactgatacaaattttagattgatacaacttaacattaaaaccacccaaataaaacttcgtaatatagataagcatcattgtaccacaaccacacaccaagccaataagtcaacaactactcctaacccttttaaacctaatcaatacaatttaatattagaccgactacgtgatggtgcatatgcttctttttaccaaaacatatatattcaagcaacaattaatacatatttcgattctcaatttaatcaactgaagaaatttcggtcacttgttttaatttttttttgtaaagcttataatttttattttgtaccaacatttaaaaatcaattattttggtgaaattaggatgatagataccgtcaacctacttttgttgaccaaacttgattctaaagaaagaaagcaaaagagagagaacaaaaacgaagacaactctcatcttcttttctctttctttttcctctttctccattgcttgttgattgatgatcttgaagcaaggatcatgaggttccttcacagatttctgttggaggatatgcccaaagaaaccttttcggactctctctgtaaaaataattgcatccaagagttgaaaactctaggatactgttcatcctattgtcttgacgagtgtccttccatctgcgagatcgtcgtaatttcaggtctttcaccacctgcagagatccacccgacgataacttaaagaggatcttgatcatctctgcttcatctatcatcacaactctgtttctccttactttacttgttctctgcttcaagttttactataggaggagaagatcaataacaacatcaagaagatggagtatggaagaagctaggaattgggattttgatggaccagcacctgttattgttgatcatccgatttggcatatcagaaccatagggttgaatccaacggttataagttccatcaaagtttgtcagtatagtaaaaaagatggtgttgtggaaggaactgattgctccgtttgtttaagcgaattcgaagaagaagagacgcttagattgttaccaaagtgtaaacatgcttttcatctttattgtattgatacttggcttagatcacacaccaattgtccgctttgtcgtgctcctatcgttgaggccaacacaatgattgatgatcatagtgaggggctagaggagataagtgtgatgattccagaagaaaatggagatgataccgatgaagaaatcgaggaagaaagagatggctttgttagtaatattagtagagatcatggtgagtcacaacaacagcgagtgagacgatcagtgtcgttggattcgttatcgggtttaagggtaagtgaagttgttgtgggtagagaaaaggagaagttgaagagaggcaataatattggatctgggaggtcaagtttattgaagagatctatctcttacagtggaaagtagtactagctagcttcagtgctaataataaaaacaagaagtccataaagtaagtaagtttcttgaagaagaaaatcaaatcaaacccaacaagatatagattgtattcatatgtatgaaggtgatataagattacgattatcaaagctagtcactcttgtaaagttaaaagagagttttgacaacttctactactctgcttagatactctggatttgtggattaagtataaatatacaccaaacttcgttttgtatgttacttatttattgttcctcaagaaataccatctggattttaattatttttagattcaactgtcttatgtgaatg

SEQ ID NO: 20034 - DNA, 3003 bp, Unknown; identical to SEQ ID NO: 20033
  misc_feature (1)..( 3003): 2750-1469P.txt file - cDNA_ID_1824147; gDNA_ID_2926204; Annot_ID_141665

SEQ ID NO: 20035 - DNA, 3003 bp, Unknown
  misc_feature (1)..( 3003): 2750-1469P.txt file - cDNA_ID_1824151; gDNA_ID_1620704; Annot_ID_48825
atgctacgagaagaaaatattaccataagcgtttccaatcgcgaagatatttgaggtagagcagacaacgatcagacacaccaccagaagggaccagttaagaaccggtatataaatctgtccaatgaatttctttgaggtgtgaatgattttaagacgtgggaaacagcctagtgctattgactgtttgatgcatgtaaatgtggctgttgtcattgcacgactggcaattaaagcagcaacattagaaatgagaaagactggccagaacaaagaacctgaaaataaaaaagagtgataaacagttagaaacgtgaaatgagaggtaaaatcaagccagcaaatgaaggaatacccttgttgatcttgacgtactgtggaagctagtggatcttacttggaactgacgaaaagaaagcatccccggcagcgctggaagttttcagagaggtatgcggcttgacccaaataacccagcaagaggcaaggtaacaccagaaggataaaagtaagctgcagataaacaccagtactgaatcaaaagttcagatgactctaagaaagacaactatcagaagagcaataaatgagtatttatctccttaaagtacctggatagagtgaacagagaaatagctaagatctgcaaacatggcctccgatcctgagacaagatccacatgtatagaaatgagcaatgacatttagtcaaaaagtcattcaatgtatttaagctttctaaaatatttcccagaatatgaaacttaccagttgcacataaaacgcaacccccaagtgcataccaagcatttacagagtttctcttgaaaaagaaatagatatatgcaggattgaacgctttaaaaacgctgctgtcatattttacgaggttgtaaattccaatgcccgctagacaaaaaaaccacagaagtaaagcaggacccaaaacaagccccaatttgctggttccatatttttgtacactgaacaagatcacaagaaagctgactgatatcacgaccacctgatctgcaaatgaagccatagtcagaaactttacacaaaaaatagtcactaatcactcatcaagataagattatgttttttgaaagctttgtacaatcattagcccctattcagggggcagaagagtttaccctcttctttgttgtatctataatctaattgaagtcaagggacccaggatgcaaccattaaagacccataaaaagttttctggtccaaggaatacatatatccaaggaacgattacaagttttgaaagccagacgaaatcatgctcgtgaccatacataggcgctaataaacgtcaactagaattagttaccttgttctataacaccaactccaaccttcagaccaccgatagcagacattactgtgtccaaaaaagagggtaaaatttagctgcagattattcatgcaacgataatgctcacatgctttttctctatacttgatatgtgacataggaacaaaaaatgtagcctgacagcatataagtacctgacattgctggcgtaacaacagcatcagcaatcaccatagcagtgccggcaagaactaaaatcagaagaagctttttcaaggccattgacgcctcaagtctttctttaattatcaatgatctttcaagttctggagacggaaccttcaaaccaaagcctgatatgcgagcatctgatggaagttgatttgggataaggctaacatttgcatgccggcagatcaacgaatacaaagcaaacgtcccacctgcaattcatttccaaaacttaaacctttaaaccttaaatgaacttcaatctacaccatataaagaggaagagatataccttcgccatcgtcattggcccaaagaacaaaatgtacatactttacaagaggaatcaatattaaagtgtatataaccaatgacaaggctccaataatatcttctttgtcgttaattggagatcttctgaacatgacagtgaaggtatacaatgggctagttccaatatcaccaaatacaaccccaagtgtctgcaaagcaagtatgagtttctttcctataccagtgtcctgaaaaaacacattaccaagttcaacaactcaatcagatcgaaaagtaaacaacatgaagaagaagaagaacattcacacacaaatgctaacctcgatttcgtttttctgagttccaggaatctcaagagcatctacatcgaaagagtcaacggcagggctagtgcgaatcaaacgctgctccacattgtcatcctcctcatcggaatccatttccgggtgattatgctcatcatatccatcatcgtcgtaatcttcattaacctcataatcatctttctcatcgaacacccatcgcgacaatgacgtcgttgaatcgtctccgccaaactcctcatcaatctcagacccatcgcctccactgctttcttcttccacgtgaaacatcaatcaccgttggaaaacactgaagatctcgagattgtgattcagattcgtatctctgatccaaggaaacaggattggaattggtgtttttgagagattgagagatggaagagagagattgatctacatacactggagaggacctggcacgaatgagaaagaagcttacacgtgtccaatcatgattggattcgagactcacggtttaaggaaaaacaaaccagaccaaattaggcttaaccgctaaaaaaccgggttctcgttttgaaagattgagagagacgatctacaaaggaggacaggacccggcacgaatgagaagaagcttacacgtgtccaatcaggattgaacgatttaatcaagcttaaccgtatgtaaaccggattttagctgggtccacaagtagtcaaatatagattttttaatagtcaaataattttcataggggcgaagttcaagatgagttactacactcatcaaagctcacaaaaagagaagagaagagacgaggatcaatcaccattctcatg

SEQ ID NO: 20036 - DNA, 3003 bp, Unknown
  misc_feature (1)..( 3003): 2750-1469P.txt file - cDNA_ID_1824151; gDNA_ID_2926204; Annot_ID_141662
aatgctacgagaagaaaatattaccataagcgtttccaatcgcgaagatatttgaggtagagcagacaacgatcagacacaccaccagaagggaccagttaagaaccggtatataaatctgtccaatgaatttctttgaggtgtgaatgattttaagacgtgggaaacagcctagtgctattgactgtttgatgcatgtaaatgtggctgttgtcattgcacgactggcaattaaagcagcaacattagaaatgagaaagactggccagaacaaagaacctgaaaataaaaaagagtgataaacagttagaaacgtgaaatgagaggtaaaatcaagccagcaaatgaaggaatacccttgttgatcttgacgtactgtggaagctagtggatcttacttggaactgacgaaaagaaagcatccccggcagcgctgaagttttcagagaggtatgcggcttgacccaaataacccagcaagaggcaaggtaacaccagaaggataaaagtaagctgcagataaacaccagtactgaatcaaaagttcagatgactctaagaaagacaactatcagaagagcaataaatgagtatttatctccttaaagtacctggatagagtgaacagagaaatagctaagatctgcaaacatggcctccgatcctgagacaagatccacatgtatagaaatgagcaatgacatttagtcaaaaagtcattcaatgtatttaagctttctaaaatatttcccagaatatgaaacttaccagttgcacataaaacgcaacccccaagtgcataccaagcatttacagagtttctcttgaaaaagaaatagatatatgcaggattgaacgctttaaaaacgctgctgtcatattttacgaggttgtaaattccaatgcccgctagacaaaaaaaccacagaagtaaagcaggacccaaaacaagccccaatttgctggttccatatttttgtacactgaacaagatcacaagaaagctgactgatatcacgaccacctgatctgcaaatgaagccatagtcagaaactttacacaaaaaatagtcactaatcactcatcaagataagattatgttttttgaaagctttgtacaatcattagcccctattcagggggcagaagagtttaccctcttctttgttgtatctataatctaattgaagtcaagggacccaggatgcaaccattaaagacccataaaaagttttctggtccaaggaatacatatatccaaggaacgattacaagttttgaaagccagacgaaatcatgctcgtgaccatacataggcgctaataaacgtcaactagaattagttaccttgttctataacaccaactccaaccttcagaccaccgatagcagacattactgtgtccaaaaaagagggtaaaatttagctgcagattattcatgcaacgataatgctcacatgctttttctctatacttgatatgtgacataggaacaaaaaatgtagcctgacagcatataagtacctgacattgctggcgtaacaacagcatcagcaatcaccatagcagtgccggcaagaactaaaatcagaagaagctttttcaaggccattgacgcctcaagtctttctttaattatcaatgatctttcaagttctggagacggaaccttcaaaccaaagcctgatatgcgagcatctgatggaagttgatttgggataaggctaacatttgcatgccggcagatcaacgaatacaaagcaaacgtcccacctgcaattcatttccaaaacttaaacctttaaaccttaaatgaacttcaatctacaccatataaagaggaagagatataccttcgccatcgtcattggcccaaagaacaaaatgtacatactttacaagaggaatcaatattaaagtgtatataaccaatgacaaggctccaataatatcttctttgtcgttaattggagatcttctgaacatgacagtgaaggtatacaatgggctagttccaatatcaccaaatacaaccccaagtgtctgcaaagcaagtatgagtttctttcctataccagtgtcctgaaaaaacacattaccaagttcaacaactcaatcagatcgaaaagtaaacaacatgaagaagaagaagaacattcacacacaaatgctaacctcgatttcgtttttctgagttccaggaatctcaagagcatctacatcgaaagagtcaacggcagggctagtgcgaatcaaacgctgctccacattgtcatcctcctcatcggaatccatttccgggtgattatgctcatcatatccatcatcgtcgtaatcttcattaacctcataatcatctttctcatcgaacacccatcgcgacaatgacgtcgttgaatcgtctccgccaaactcctcatcaatctcagacccatcgcctccactgctttcttcttccacgtgaaacatcaatcaccgttggaaaacactgaagatctcgagattgtgattcagattcgtatctctgatccaaggaaacaggattggaattggtgtttttgagagattgagagatggaagagagagattgatctacatacactggagaggacctggcacgaatgagaaagaagcttacacgtgtccaatcatgattggattcgagactcacggtttaaggaaaaacaaaccagaccaaattaggcttaaccgctaaaaaaccgggttctcgttttgaaagattgagagagacgatctacaaaggaggacaggacccggcacgaatgagaagaagcttacacgtgtccaatcaggattgaacgatttaatcaagcttaaccgtatgtaaaccggattttagctgggtccacaagtagtcaaatatagattttttaatagtcaaataattttcataggggcgaagttcaagatgagttactacactcatcaaagctcacaaaaagagaagagaagagacgaggatcaatcaccattctcatg

SEQ ID NO: 20037 - DNA, 3000 bp, Unknown; identical to SEQ ID NO: 4398
  misc_feature (1)..( 3000): 2750-1469P.txt file - cDNA_ID_1824155; gDNA_ID_1620704; Annot_ID_48824

SEQ ID NO: 20038 - DNA, 3003 bp, Unknown
  misc_feature (1)..( 3003): 2750-1469P.txt file - cDNA_ID_1824163; gDNA_ID_1620705; Annot_ID_48878
gtgtctcgccatggcggctaaaccagcggcggttgttatctcggcagacgggacttacgctgacgtggctgccgggacgatgtgggtggatgttctgaaggcggcggtggatagaggcgtctcgccggttacatggacggattatttgtatctcagcgtcggcgggacgttgtcgaacgctggaatcggtggtcagacgtttagacacggccctcagattagtaacgttcatgagcttgacgttattaccggtacgtaaataccaaaacttcactaatctcgttacaattttttaattttttggtaatataaattttgtacggctcaactcttaattaagaatgaaacagtatctatgatcttctagatgctctttttttgtctgcaagctttaattgtagtaacatcagcgatatatatatcacatgcatgtgtattattgatgataatatataatgttttagttacaaatttgattctcaaggtaaaactcacacgccataaccagtataaaactccaaaaatcacgttttggtcagaaatacatatccttcattaacagtagttatgctataatttgtgattataaataactccggagtttgttcacaatactaaatttcaggaaaaggtgaaatgatgacttgctctccaaagttaaaccctgaattgttctatggagttttaggaggtttgggtcaattcggtattataacgagggccaggattgcgttggatcatgcacccacaagggtatgtatcatgcatctatagtgtaatcaatttataattttaatgtagtggtcctaaatccaaaatttgatttgatttggttggaacgtacgtatatataataagtcaaaaggctgattttgaagacgaatttatatacttttgttgaattaaatctgattttgcttacgttttattagattctgcgtaataaatcctaggacttgctcgagtgtaatcttgtcttatgcttgcaaatcttgttgatgtcaatatctaatcttttttattatatttccctacgtaagttttagatatagttattttaaactgctataaattgtgtacgtatagactttagataaaaagttgtggtcgcttgcacctatttgtttatcgctatagtgattcaaaggtctatatatgattcttggtttttctttttgaaaaaaatagaccatacaatccaaggaagatgatcttaaatggactaatttatggatataaattgatatacaaatctgcaggtgaaatggtctcgcatactctacagtgacttctcggcttttaaaagagaccaagagcgtttaatatcaatgaccaatgatctcggagttgactttttggaaggtcaacttatgatgtcaaatggcttcgtagacacctctttcttcccactctccgatcaaacaagagtcgcatctcttgtgaatgaccaccggatcatctatgttctcgaagtagccaagtattatgacagaaccacccttcccattattgaccaggtactaaaatccattattcatgatgattatcttcacacaatcagtatcatcaccaattaccatcatcacttgtcatatatgatccaaagtaaatatatcacatgatataaataaatcgttcaaatctttttttttaaagaataaaagaatcattttcaagcattactcatacacatctacgaatcaccgtgaccatatataaccatacgcttattaaataatcatttttgtttgtaggtgattgacacgttaagtagaactctaggtttcgctccagggtttatgttcgtacaagatgttccgtatttcgatttcttgaaccgtgtccgaaacgaagaagataaactcagatctttaggactatgggaagttcctcatccatggcttaacatctttgtcccggggtctcgaatccaagattttcatgatggtgttattaatggccttcttctaaaccaaacctcaacttctggtgttactctcttctatcccacaaaccgaaacaagtaaatatttactttttgattttgttttatttgaaagtatatcccaataatgtatgttaaattgttaacaagaatttattttattaatagatggaacaaccgcatgtcaacgatgacaccggacgaagatgttttttatgtgatcggattactgcaatcagctggtggatctcaaaattggcaagaacttgaaaatctcaacgacaaggttattcagttttgtgaaaactcgggaattaagattaaggaatatttgatgcactatacaagaaaagaagattgggttaaacattttggaccaaaatgggatgattttttaagaaagaaaattatgtttgatcccaaaagactattgtctccaggacaagacatatttaattaacttatcacatgtcttaattaatttgttatgtaactttagaacgtatttttataacatatacagacaagtacgttcatcgtctaactaacaaatattatagtttagtgatttggttaggctacttacgttaatctttttcgttcttgtatgaaatatattgtataagtcaaaagacaaagaaaaatatattattatagcggtataggtctctcagaaattaagaaccaattatttcttttattaagaacttttatgtggttaaaaattactaagaagtatacaaaattttctaaatttgaaagtaaattaagaacctgttttattaagaaaaatttcgataatatctgtcaaaaaaaacaattcccataactttttaactattttcctttttacaaaatcttctcaaaaaaactgtgacagactaatttatgaaacgacatacatgttgaaatgctaaattgaaaacggtgtgttatttggaaattcaaaacgttttcgtttagaattagtacaaagttctcttcattggccaaaaattcaaaacgctgtcgcttttaaattagtacaaagttctcgtccttagccaaatgcatctatg

SEQ ID NO: 20039 - DNA, 3003 bp, Unknown; identical to SEQ ID NO: 20038
  misc_feature (1)..( 3003): 2750-1469P.txt file - cDNA_ID_1824163; gDNA_ID_2926196; Annot_ID_141289

SEQ ID NO: 20040 - DNA, 3003 bp, Unknown
  misc_feature (1)..( 3003): 2750-1469P.txt file - cDNA_ID_1824167; gDNA_ID_1620705; Annot_ID_48877
tgctctcgtagcccagacgcacattactttaacaaaccgaatcatatctcctaaaacttgccaccctttgaaaggtaaatgctccacgcttaaatgaaaatcatacaaatctaactttcttgtatcttaactaaatcgataatcagtcattttgtcatattcagtgaaactattagagtactgattccatttccatagactatcaccttatcattgataaattttgagtctttatatcatgatagtatatagagctcacacatttccaaaaggttactagatgagtcccatgactttcttactttttacccagaaactttagtaataagaaaggcacatatttcaacagattaatctagcaaagagatcatgaaagtgatgaacatgtagcttcaggagctttagaagacctatctctagagaatagcaattgagaaagcattgtgaccaaaccatatatataagcagtaacaatgttggtcaagcttcatacacagtgaacaaacaagaggagagcctcacacgattcatagttcagaacctagtcatgactatcacacactaatcaagctttatgaaaatcaagataaatcataggtagatcgaatctatcaggaactgtttcactaatctgacatcaagtaatataaattgagaacaagaaggggcaatttcgaagatctagagatcagatcaattattagcttacatgaagaagatagcggtaatgacgagaccaatcgcaagagtgaacaccgataaagtcggatacagcgccaccggaatcggactcgcaatcggtttcgccgccttctcaccgggaacgagcacaaacacaccaaacaaaatcagaaatcgtaaaagcaacaaatagagagatcaaattagctgtgactgaaagcacttggacggatctagatttaccattgttgctaagctcttcttcttcttcttcgatctgaggaacaatgaaaaagctatttgactgatctcgctcgcttgatcgcttcactaaacaaacacgagtcgcttccggtttgtacttaaccggcttgttataacacaaccacggttattttatgggccagtttttctgtttaaaggttcgatttaataggcccaaatatacttattaaggcctttgatataaaatgtgttcatatctttatcttcttttaacgttgtataactttattcaaagtgcaatgtgatcctttaccattttcgaaaattgaaatccacttcaatgtagacatctccaactccttgtcaatcaatttccggattgaagattgggtactctctctagatttagttcccacctgaaaatatgggaccggatgtaatagtaacagatttttgtattggtcaacaatgacttatagatttcgtttttttcatggaaaggacttagaaattggttagggtttaatttgttgaccaatacgaaaatatggtcccaaagaagtgttgccatactaaatgacgaaaaccggctgccgaatatttctataggtaggacatagaacttacatcaatttgcgaccacatatattggaggtagcattttaatcgtctctagacttaaagggctatagcagatagaggagacggtttactcactcgtttgctatttgcagatatttacgaattttggcacatggatccaagaaaacaattctgcctgttgtgtgtggatagattttatgcagaaaaaaagtactagtccatcacatttactttaaaaattaaatcaacggcctagtatttttgttcgattataacaaaactattataaaaaaaaaaatgtacttatatttaacactattgattaattaataaatgaatcttccgactgttttctttgtagggcgtgatgtaatcacgggacggtgagtcggtgatatcattcgtgtgcttcactctctaaacatatagcgaagtaaattgacaaaaaaaaaaaaaacaaatagttaaccgtcgacaattcaataatggatagagtttgtgattaaatcatctataacatatatatatatatatatatatattaattaaatgtttgtctcactttgcatgtgatacgaaatgaagaaactacaaaaaagtgaagttcgaggtggaataagccttttgctttctcacgccacactaaaacttgcgtatgtgtttcgattctgcgccggtcctgttgattatagaacatgtaatttaataggagaaagtaactgttagtatagtattaaaaacgaatgtatataattttactattataggtatgatcgacttttgtactataaatttcaataacattccttcaatgaaaaaaaaaagaaagagttatattgtaatagactatagttttgtgagagagtttcaagtaacgtttgcaattggacgaacttttaaagaatattaactgcaaaaacactacttgggtgtagaaaagtgttatttatgaaccggcccacagagtcggagtttggtcggttccacaaatttcaaatttacgttgtgatctacatacaataaattatcacatcttataaagtcaaatgaaactacctcaactatactagaaaatattgaatactaaattataaaatacagaattagaaacttatcaggggtgttaaaatcaatttacccagtagactttttattattgttgaactacgtttaaacaacatatagatatttcgaagtcaatgcagtcaaatatttcatacaaaacactttcgacgaacacaacttgtatctttttttctctttggtgtcaacaagacttgtatatatatcaacatcaatgaaaatacgcaaagatatatatgttcacgtgacaatttattacattaaattgtatatagtctctctatggttctatataatctcatactttctacctcatctctatagtaatcccataatcaacaagacactctaatagtaatatctcaacctccgtctcgttttcccattaacctacccgtttgttagattatg

SEQ ID NO: 20041 - DNA, 3003 bp, Unknown; identical to SEQ ID NO: 20040
  misc_feature (1)..( 3003): 2750-1469P.txt file - cDNA_ID_1824167; gDNA_ID_1620705; Annot_ID_165269

SEQ ID NO: 20042 - DNA, 3003 bp, Unknown; identical to SEQ ID NO: 20040
  misc_feature (1)..( 3003): 2750-1469P.txt file - cDNA_ID_1824167; gDNA_ID_2926196; Annot_ID_141288

SEQ ID NO: 20043 - DNA, 3003 bp, Unknown; identical to SEQ ID NO: 20040
  misc_feature (1)..( 3003): 2750-1469P.txt file - cDNA_ID_1824167; gDNA_ID_2926196; Annot_ID_201472

SEQ ID NO: 20044 - DNA, 3000 bp, Unknown; identical to SEQ ID NO: 4429
  misc_feature (1)..( 3000): 2750-1469P.txt file - cDNA_ID_1824171; gDNA_ID_1620705; Annot_ID_48876

SEQ ID NO: 20045 - DNA, 3000 bp, Unknown; identical to SEQ ID NO: 4429
  misc_feature (1)..( 3000): 2750-1469P.txt file - cDNA_ID_1824171; gDNA_ID_2926196; Annot_ID_141287

SEQ ID NO: 20046 - DNA, 3003 bp, Unknown; identical to SEQ ID NO: 16106
  misc_feature (1)..( 3003): 2750-1469P.txt file - cDNA_ID_1824196; gDNA_ID_1620705; Annot_ID_48858

SEQ ID NO: 20047 - DNA, 3003 bp, Unknown; identical to SEQ ID NO: 16106
  misc_feature (1)..( 3003): 2750-1469P.txt file - cDNA_ID_1824196; gDNA_ID_2926196; Annot_ID_141269

SEQ ID NO: 20048 - DNA, 3003 bp, Unknown
  misc_feature (1)..( 3003): 2750-1469P.txt file - cDNA_ID_1824207; gDNA_ID_1620706; Annot_ID_48903
tgacaaaaaccctcgatatgaagcatctgacaccagaacatgttttttcaacgcagacgtgtaccaaggaggtagaaatatggcgtcatgtttgaggacaccgctggaagtaaacaatgatgggggtttatctgatgacacaatggagtctaggagctcaacaggagttaccatatttggcacaggtcttcagaatgaagttggcgaatacaattgctttttaaatgttatcatacaggtaacccttcacttttcataaacggtttgagttcttgggaatatagtatctataattccagcttaaagacttatttttgctgaaagctattttgttttgttttgatcttagtctctatggaatttggagctgtttcgagctgagttcttacggagttcaacacgagagcaccatcacgtgggagatccttgtgttgtctgctctttgtatgaaatctttaccgctttgagcgctgcttcaagtgaaaaacaaaatgaacctgtggcaccttcatctctcaggattgctttaagtaatttgtatccagatagtagtttcttccaagaggtaaaagaatttgattactggttttaaatgtttatcctaatacaatgtaaaccttcatttcattaattagcctaatcctgggcgtcatatggtggacaggctcagatgaacgatgcttcagaagtactggctgtgatctttgactgccttcatcgctcatttgctcaaagttcaagcgtgtctgatgtggattcctcagacagcaactgtactggttcatgggactgtgccaaccgcacatgtattgcccattctttgtttggaatggatatttttgagcaactgaattgctacagctgtgggctggagtccaggcatttgaagtacacttcctttttccataacatcaacgctagtgccctacgcaccatgaaggtatcgtatgagtgttcatttgattgcgttttcacatatataatttgattattcactgtggttttgtcccactttacgcctaataggttacatgcgctgaaaattcatttgatgaacttcttaaccttgtcgagatgaaccatcaactagcctgtgatcccgaaaccggtgggtgtgggaaactcaaccatatccaccatattctcactactccaccacatgtatttactacaggtaaaacttatttttaggattttgatgaatggaaattttttcagactgctgatatttgtgtcttgtcactaattattttggggctggcagttttagggtggcaaaacacatgtgagactgtagaagacatagcagctactcttgcagccttgaataccgagatagacatcaacatcatgtaccgtggtctggaccctaagagcacatatagcttagtttctgtggtacgcatttcttcctcttcttccctatgatattatcagaagagtcgttaaaacaccagctatgtgctgtgttttccttgtgtgctttcaccctaaaaacctcaaggtaacaaattgttcttttgctatttctgcaactccaggtttgttattatggacagcattatcattgttttgcacatagtcgtgagcacgatcagtggatcatgtacgatgacaaaaccgtcaaggtaagattatcaatgcaatgggttttgcgggcagcagatacactcgtggacattatcacccagtttttgtaatatctttcaggtgatcggtagctggatcgatgttctttcaatgtgtgaaagaggacacttgcagccacaggttcttctctacgagagacgttaaaataaaaaagaagcaaaacaaatgcagaccaagtagagttctgttgctacaatttaggagatctcgtaagtacatactacaaaggaagtaagtacgtttttttgacaagcagaagtaaactcgagaggaaagaatgtgattttacactcatctcagtggttctaacttctaagaggatggggaagacgattttgtctttaaaatttaagcaaaagtgttttcagtggaagaggtcatagaagaagatatcatgtagttttcttggttacatccttgtcacattaaggattatatgttcatataaatctatttcatcggtcatctctatagatcatatcatcattatacatatatcatatcttgtcaactaatgaaaatgaagtcagaagttaggagagaaattgcagaaactctaatccaatgaaatctctacatatcattcttttaacatttactatgtgactatgtagtagtatatgtttcttattttcttttcaatccgactgtgtttaacacttaggacttaaccgtaataaaacgacatttgaaattaggatttgtgatcgggtaagtgattcgaacattagaaagcaaactaacctatgaggctatgactttagttggtcgagagtcggctttcatatgcggcatttgcggggtcaatcccgcaaagaggcagcctgaaggcactcactagggatagctcttacaatgagcaagttgacaacctcatgctccttgccgatcctgatgaatatctgtcacagtgggcaagttgtgccagcatgtagcggttccaaaaaacacagcggttcaattcgcaaaccgagtagttcgcttcgtctggtaaagtaaaccataaaataccgatggttcaactagaaataattactaatcgaagtaaaccggtttgtaatcgctaatgtaaatctcttttttggtttagtgacattcttctgctccgtagcgagagagagagagagagcacaacaacgactcctgtgttactctctctacctctatcccctcaccaacaatctccgccgtaatacgtggccgggatctctcaggcgacgccgtctgttgactgtaatttaatatccgattttgaccatctttgcccatttggtggcgcgtatatatatatacgtacgcgtagagtattcttcatgccgataaaattaaggtatttaagctgaatcgtggatg

SEQ ID NO: 20049 - DNA, 3003 bp, Unknown
  misc_feature (1)..( 3003): 2750-1469P.txt file - cDNA_ID_1824211; gDNA_ID_1620706; Annot_ID_48902
caagttctggagatattgctaatggaaatgatgtgtcttctggtgcggatggatttctttcatggatcttcacaggaccctctagcgaggaacaagttgtgtcatggatgcgcacaaaggaagataaaactaatcaaggactggagatcatgcagcatcttgagaaggagttctatcacttgcagaacctctgcgagagaaaatgcgagcacttaagctatgagggagcactgcagactgtcgaggatctttgtcttgaagaaggccggaagagggagacttcagcagaatttacccatgaaagctatgaaactgtgctgaggaaacgaagagaagagctaaatgagagtgaccatgagttgttgtttatcagtagcaggtttgagttagatgctataacaaatgttttgaaagatgccgaaactcttaaccacaatcaatttggatatgaagaatcatatggctgcactagttctcagcttcgtgatctggaatctggtgaagctgatgaatgggggataaaggattccttacatgaggctgacagtttcatagagattgcgattcagaaacaaaaagagcagttgtctgcagaggtaagcttttctatctttacgcaacaccactgcaataatcaattaatgcctttctgattttaaaataatctgtacatgtgctatcacagcttagcagaatcgatgcacaaatgatgcgaaatgtcactgggatgcagcaattagagctaaagcttggaccagtttcctccaacgattatcagatagtattgttacctttggtgaagtcctacatgcgggtaagtatctaactcttttgaccttgttactttttcttccattgtgttgctgtgttctttcaggttctaattggcatttccatcttaatctccccatttccctctctcgctctctctctctctctctctctctctctctctctctctctctccaggcacatttggaggcgttagcagagaaagatgccactgagaagtctgatgctgcaagagaagccttacttgttgagctagctcttgattctaagaaggaggctcgaggaagaaatgataattcaaaaaacacgctggaaaagtccaaggacaagaaaaagattaaagacactaggaaagtgaaggatatgaaggttcgaactaatctgttgtctactttttaggtacttcttgtctatatttgtaactaactttttaatttttttgttataggcaactattggaagcgaccatcgctccaatgctgattcagttgaacacaggtgaagatctgccttgttcataatttttacttaagcgggtgtaacctggaaaatctttgtttctgaaaatgttggtggtttataatatgtcgttgatttacctgctaatttcttgttccagcccccttccggttgcacctgtcggcgatcattcagaggctgacattgtttctgaagctgttgaagctttaaaagaagaggaagaggaatataaacgccaaatagagctagaggaggaggagagaaaacttgaaaaaaccctagagtatcagagaagaattgaggatgaagctaaggagaagcacatggcagaacaacaaaagaaatacagctcttcagttcccatgaatgttgcaaagacagtgtataatgggtgcacagataatgaagttgattatttagttttacaaggacaagaaaaatccataaatcaggtaacaatagagtgacaaggtggtggagttatgttttttcaatcatcgcttgaaattaatttctggggttctttgctttaccaggagaaaaggaatggacgacttgatgacctggaaggagccagtgtgaatacaaatggagttttcccgtcaacaaatcattctgcgatatctgatactgcaaaggtgcagaatgtaaaatcccaaaaaggttagcattggtttcgaatatgaaaatatgtgtctactgacctttctgaggcacttatattgttttttcttttttttttgttgtagtagtgcctaacggcacagctatgcaagctggtattttccaatctgatcaacgaactgggaggagaactagacgccaaaaagcttcaaacaagttagctgatggaaaatatccggtcacacctcctgagaccgaaaatagtaaatctcagttgtcaggcaccaacggcgagagacattctgaaactctacgtaacaatggtggtaagtgacattttttttttttttttttttttttttttgtcctagaatcattttctttttctcatgttttcaaagcactgatagttgtgatctatagatgatctgatttttcttcttgagcttattgtttttttctgaacataattattaatttattagatgtgaccagtaaaggcacaaatgaagccgttagatttcttaaaactgatacttctgtaaccggtgtatcttgtttatgcttttatgtcaacgaggaattacattatctacattgattaccagcaattgttttctaacatcattcatcttgcattctagatgtgggaacaaagacattaagacaattacaagctgaagacgatgacgaagaaaggtttcaagctgacatgcaaagggcagtgcttcaaagccttggtagtttttcaacatccttgtttatatatctgatatcatgtctgacagttaacattttgcgatattttgctaagtgcccattttgtcactattgtctgactgactgtcatttgtatgaagaatggtgtattgtgtataccacttttcttcatcccagtgcactttttctttttatctgattactttaggtgtctgaaactattttttctccagcttacttatgccaacagctgctacgttttattttagaatttttagcatatttgttctgtaatcattttggggtgacaaaaaccctcgatatgaagcatctgacaccagaacatgttttttcaacgcagacgtgtaccaaggaggtagaaatatg

SEQ ID NO: 20050 - DNA, 3003 bp, Unknown
  misc_feature (1)..( 3003): 2750-1469P.txt file - cDNA_ID_1824215; gDNA_ID_1620706; Annot_ID_48901
tcgggtttagtgatttaagaaagtttccattataccctgattttatttctgttttcataatttgagccgagtaatttgttaatgaacaaattggtaactagtttgtccacattcaaaaaccaaacaaaaccagaaattttattgtagacttgtagttttgggccttttggttttctgtcccgcatgagaatcgggtcgaacggttatgctcgagtgactagacaaagtagttcactagtgagccatgcattatttatttattttttttcactaagtgttgtcttcatttcattaagttcacggttacaaaaagtgttataatggctctgccatttacagctttgaagacatacacataaacaggtaaacaagcaaccatggcatcagaaaccaacaaggttagccatgttgcataccagaaagttacaagtaaacgttaaaacataacaactgcagctatagagtatgtcttgacccaaaaagtgttatgaaggccatactactgaggcagattattccaaagcatggatctgcatctgttgaaatcaatgcagtcctaaataaaaaaaatgacagaattcatagagtgtttatcttttctttggagggttcagaatccctcccttcatgtgcgctttgtcttgttcatcatgagttcctttctcttcttgcctcttccttgtttcccttgtttccacccctcttgaagattgaccaacttcaaaaacccgacgagaacccgttgagagtgctgttccaactgaaggcgtgatattagaatcagttgagacctgttgaccttgacagagcccttgatagtaagtccctcgaccctgatgattaaggccttctcttggagcaggaaaattcggatgggctgcaagaaactctccatgattcagtggaggggtaacaattcttggtggagggagcacaggtgctggaaatgaagactccgtcatttgagactgagaattcatagacgatctaagcctttcatcatggaagacagctctttcccttccataattaggtagccttggtctataagggcaatagttcctgtgatgtgtaactctgaagcagctactacaaatcctcctcaatctctcatattggaacctgatgagagcagtttccccagaatcaaaagtgattctttggaagaaacgaagcctatcagtgattccaattctaactctgactctaatataagcaatttgagtcatcgttgcatcatggaagtccagcgtgatgatctcaccaatctcatgagcaatctccaaagctgtctcctcacaaacatagagaagaggaatgcctcgcatctgcacccaaagatctatggtagtcacaaaatttaagacaggagcaggctcccatctatgatttgcaacaaaccaattattgaaaagccacagttcccttctttgcactgaaagtaaatcaacttcattctgaaacaagaactgaacataagtagcatccagcattctaccactgaaagccatgcattatttaatctacttattcgagaaaatttatctcaatttggaaatatacgatgcatttgaatagcaatccattaatataggattagatacacccattaaacacgtgttaaattgataagcaataaataaattttaaaaaatgaaaatgatacagaatcaaccatcttagttttaaaatgatattttttttaattgataaccaaattgataaaaaaaatctcaatctaatgtaattttaaaatgatatttttttggttcatattaactaatcattaatatatatattcaatcttcaacataaagaatgaaaacaaaatattattagaaatatatttaaaaattgaatttcacaaaatgaggttatatgataagacgagtttggatcgatattaagacggtacactataccacaagtaaagtcttagaattattaattaaaatataattaaataatctttaacactaaacaaaacaaacaatcttaataaaacatatgtaacttaaaatttaaactttttagttataaaaattgatctagggtgtactgaagggtaaaatctaagggttgtacataaaataatatagaaatagagttatatatttataaaatacaaaaaatagattatatataactaatctatcaaaaaattacattttcagttttttttttaataaatagtcccgcattgtaccgcatgttaaaatctagttttaatagatagaaattagtaattgttccaaaaaacaaaacataaaatgtaattatataaaaatggtctacatcaacttggtaacataaggtagatttgaatcactctattttggatagtcactatactattcaaatgttgatttggtaaaccgaaattgtaattagcttcgtttttcagataacaataaccgcaacaagtagataacacatggtttaagcgtctcgattgtaagatatacatttcagtagcttgtcaattgtcataaatgactacaatatcagcaggtgaaaactatattgatccatacagaactaactaaacactaaatgcattaatatttcataccaaagagcaagtttagttagtgcacaattcaaatgcggtttgctaaagtgcagacggttcaaccgtaccgcttcaccgcctttttctataaagcgaaccggtgtgtaaatctgagttgtttactaaaatctccttttctcctattttggcatttcggtttaatgattattttcccctggcttcgaactccacacagagagcaaaacgacgactcttgttctactctctctatcttgttccccacaccagctttctccgccgatcttccgccatactacggtaccggaatctccgagatgccaccgtatgttgactgttaattaatttccggtttgactatctctacgcatttactggggcgtatataatacacacacacacacgcgtatacatgccgattaaattaggggttttaagctgaatcgtggatg

SEQ ID NO: 20051 - DNA, 3003 bp, Unknown
  misc_feature (1)..( 3003): 2750-1469P.txt file - cDNA_ID_1824227; gDNA_ID_1620706; Annot_ID_48898
atccttattactatgatacgagatatactgcatctaatgtaattgatacaaaaacgatatataaaaatactcggaaatttttcctgtaactctcctttgatccactatattgtattgttttaactacttaattttttttttggtaaggtgttttaactacttaattgttttctctatttgttaaaaattgtattacatatcaaatcttatatctctgatttcctttttttatttggccgcatcttttatccaaaatgatccaaaagactccaaagacaagatccaaaagctttttagcgttttaaggcgaagttgtaaagagatattgatagtttattactatatatgatgagaaattgagaatcataattatcctctatcggtacttagcattcagtcaacaatatttgaccaaagatcaatgaagtaaaaagaagatatatatgtacacagtttcttaaaatatatatatatatatattttaatttctctgactaattaactaatctttgtgaatgggtcaagagataaagaagcgtgcaagaaaagataattagagcataatcaaaccaattaactaaggtttcttattcgtcatactcatcatacgctcatccatactaagggactaattatgggaggagccactctttgagggattacctagaagctataataggttacgtgcacgtaaatgacattttggaatggattgatagataagttacaccatgttatttgtatcatcactttaattttgtagagtccgtaaaattttaaattttgttaatgtttttagtaatgttaagcacacttgtacaaattaatattttccgaaaattttatacggtttgctttttaagaagtgacatacctttagttagatttataattggtcaagtatggtttgtcacccctctttagcttcagttcgactatcagaagattttatgtttatgctaaattcttttctttttttaaatatgagtttattatttttagctcaaccatacataagtaaaccttaccaataaaccagtatcttaatctcaaaaaacaaattgtcaaacatataaactcccattggtcactttatattactgcaatacgagatttaccgtttaactaccaatttcaaaaacgttataattttttttctttcatttttcgtattgttactttttactgtttttaattattttgatattgattacaacttatctatctttcaaaaacgttgtatcgttttctattattaaagaaataggatccgaattgagattaaaattaaaagagtcgttgagggactaattaaacatgttaataaagataagatgtggatcccggttccggggacgggagagggaaggtcatgtgccattagggtaggaaccaccgagaggatgtgtcacgtgtcacgtgtgttggacttaggtgtcagaatggttttgaatggaaaaacaaaacaacgattctcagtagtcaataccccacacgatatcgtcatctttgttgtcttcattctttaaaataaataaattgaaaaggtactagtagttgtctagttccgtacggtacccgtccgtactctctagagcaataaatctttccatgaattttctttttctatctttctttcttttattcttaaaaatctatacttttgagtcttgacattgtatctatcttgtaaccttcaaattgtgagattagtagaaaaattgatggaattagtagaatcgcgagatctaatcaatttatatgaagagatataagtgaaacatatatatctgaaaagatttttttttttatacgagtacatcatcgaccatgtaatgtttgttctacggaaaaatgccaataaggtaaagaagttattgtgtaattgattttacgtcattttaatgaatataaataattatatgcaatctcacttcctctaaaaatcccacattcgttcttcgcaatatattatcataacttatctcgttttgttgcatttttcttccaaatgcatccatatagtatgaaagataaaacatatatataggattctataactctttttttctttatattttcacaaagatatgacaacatgaaactgtcttcatctacttcttctaatcagtccaataatcaacatttcaaactgattaggaccaccgtctgatccatttcaacaaaatccttctcttcatcgttccggttctcacgactagtcctgtggttcctatgtctctttttgactaatcaagctttttattgatgtatcacaatttttttttctttacttctgaggcacctatgacctatctaatgttatctcttaagaaaattttaatgagagatacatttgcttcatggacttcgatgattatgggcctattatatcattttaggcccatttgaaaattgaagttttgtgggtctcaaattaagtcaatacagtcagatgttgtgtgtccgagagcaagttaataatcatggacatgttaaagaatggaatcctctttttcttgtttattcgcatgtctgtttcttacagcattggtttgtctaaagactaaaattaacacgttatatgtttacaaaataaaaaaaaaggtaacatgctatgtagttttgtaattataattatgattatgatattgtaaaacaaatttggaaaatataaataagatggaaagagagaaaactaaaatagaataagactgaagaatacaaaaatgtaaaaaaaaaatcagaaacttttccatatatataaaattaagaatgtgaaaataagccaaaaacagataaaaagagagaattgggtaacaaaataataataattactcttttgtttaacgtaacggtggaaacagccttccctcttccctagtctcccacgcttctgtttcgcattttcccccattttctccggcgacggccaatcatcatcaaccgccggcgaaaacctcagattcgtgaatctgattcattcattccgtgattaagatg

SEQ ID NO: 20052 - DNA, 3003 bp, Unknown; identical to SEQ ID NO: 20051
  misc_feature (1)..( 3003): 2750-1469P.txt file - cDNA_ID_1824227; gDNA_ID_1620706; Annot_ID_165308

SEQ ID NO: 20053 - DNA, 3000 bp, Unknown; identical to SEQ ID NO: 4435
  misc_feature (1)..( 3000): 2750-1469P.txt file - cDNA_ID_1824231; gDNA_ID_1620706; Annot_ID_48897

SEQ ID NO: 20054 - DNA, 3000 bp, Unknown; identical to SEQ ID NO: 4435
  misc_feature (1)..( 3000): 2750-1469P.txt file - cDNA_ID_1824231; gDNA_ID_1620706; Annot_ID_165307

SEQ ID NO: 20055 - DNA, 3003 bp, Unknown
  misc_feature (1)..( 3003): 2750-1469P.txt file - cDNA_ID_1824247; gDNA_ID_1620706; Annot_ID_48893
cacattccttccttccattaagaagagtttagcttttctactttgttgattggttttgtgatttccgttttcacaaaaactttgtatagatcgatttgaagcaatttgagaaagtgatgaagtacataaagtcaggtatcgaaagcaatgctactcttgaatgtggtggtgatcagattggagacaaaggttacttcatccaacctactgtcttctctaatgttaaggtaaaaagaaaactcttctaagacatctttaatgttcttctattaccgattctccatggcattaatctcgaacgcttggttcaactacaggatgacatgcttatcgctcaagacgagattttcggtccagtccaatcgatcttgaagttcaggtatatagagctaccaataaaactgatccagtagacaaataagtcacaatttggtaaaaatggctgagttgttagagatttggtaaactgaaactaatttcgaaccaaccaaacctaaactttttttaaagataaatgtattcaattaaaaaacagaaaccatgatagatttggtttaacactggttatgatgttgggttcagtgatgtggatgaggtgataaagagggcgaacgagacgaagtacgggctagcggcaggggttttcacgaagaatctggacacggcaaacagggtttcaagggctttgaaagctggtaccgtatgggttaactgcttcgacgtatttgatgcagccataccatttggtggttacaagatgagtgggaatgggagagagaaaggcatatacagtctcaataattacttgcagatcaaggcagtcgtcactgctctaaataagcctgcctggatctgatctctggagtgtggtttcagcatcataaatgctcaaacaaaagaaatagactctataaagttacaatagtaataattaaggtcatggtttgtaatttgagtaacggattgtgatacttctaataaatttttcattgttgtttattcatcacatagctgttgttacactgagacttgtgtgttcattttggttttgcaagatttctattgaaactgaaaacaaacatgaaactgaaaaatgcaacgaaaattagaaaatatatatcttaaagtaattaagagttaaaactcaataattaattaaaaacttttcagttgtttaaatatatactctgtttctatataaatgtagtttaagagtttttatttttttcaaaataagtgttgttttcaactttctatacaaataataaatatttaatattttaatcaattatatttaattaataatatttttatataaaagaggtagattaaatgagactttcatgatttttttaatatgtgtataaaaaccttaaactaatatgaaacaaaggaagtagttgttaattattaaattcatatacagtatattcttagaataaaatatcaacataaaattgatcacaagtatgaaaaaaatactttttattaaaaggtttatcagataaatatatttttccttttgtaacagacaaaaaattatactaattttgaatatttattatatttcttaataaatttcgatacaagttttctatttaaataatatttttaacatgactgaaaaatgttgaacgcatcagaagtgaccaaatcgtgaattttaacttgttcgtcagccagaagtttccgtttctctttagtttcttcatcgcgatttttgctacttggctccaaaatccctcctttttcttctttctcacttgcatcattagctcacgatttcgagtatcgattcaaccattttgatcttcaatctatcttagggtttctccttaattcttctctcggattttagctcttctcgactattactcacctctctcatggcgatgagaggtgtcgatttcaagtggtgagctctctctctctctctcttcaatcttcattcacttgggtcgatctaaaggggacggattgcgaatttgattatcgattcccattttttttgagttttggggttttctgatttttgtaaattgtgcaggtacgatgggttcttcttgtcgatgcttgcgactagtgtgtatccttatgctacttggattctgtcaaatttgttttttttctttttcggttttgttcttgtttggatcgagctgagaattctcattcttaaagctaattctccaccattcgatataagatttgatgatcgagatacagttggttaatcagaagaaaaaagtttatttctttgaagatccgattgattagttttggttcttgtgggataggtgaactggattttgttttattagggtttaaggtgatctagataacctctccatttcgtttccttaatggttattttgcgtcgtagaatcattgtagctgtcaactggaacagatatcgagcttgtgaatacccgttgcatatatggattgtggtagctgcctcagttctattctttttgttgctctttcttattatcagtttcagtttcatttgtgtttgtctcctatgacttcaggtcgattacaccaccgtctttatcttccgtgtcttcatgtttgttgacaatggtcttgcttctggacttggcttgtaagttccatctaaatctccctagttctagagttacaatgagttttaaaggtttttactttttggaatcttccccggtttcccagagttatctgaacaagttttttttttgcgtaaaattgtctttgctatccttattccttagataggcgtttaattcattgagaagtattagattatgataaatataagctatttgggaagcatagaatttctttgtagctccagtcgaataggctcttctagttgcaagctttatcttagaagtagctagttgcaacgtttctctatctctctaggtagcaaattttatgaatatatggtttcttatgtcacattgatttctggtatgaacatctgttagggattttggaagtcaacagcggaacgccatg

SEQ ID NO: 20056 - DNA, 3003 bp, Unknown
  misc_feature (1)..( 3003): 2750-1469P.txt file - cDNA_ID_1824251; gDNA_ID_1620706; Annot_ID_48892
tcacttcctctcctttctttgataaatacttctactgcctttggtggggtctccgtaacctcaggttggttgatattcatctgtcttaaaacaaataaaaccgctgcttttggcgacttgttaactgatctttttttcttgatttggttttgtgtagttcctatggacagagtcttgcagcgagtacactgagcagtgagactatattcagttgtttcatttgtgtcgcgggtcttgttttcttctctcatctcattggaaatgttcaggtaaaattcaaatgaaaattagctctctccatagtttttaatggagtctaagtgatttctctgctttttgaagaactatctgcaatcgacgactgctaggttagacgaatggagagttcgaagaagagacacagaggaatggatgcgacataggcaattgccagatgagttacaagagcgtgtaaggcgattcgtccaatataaatggctaacgactcgtggagtcgacgaagaagccattctacgggctctaccattggatcttcgtcgccagatccaacgacatctctgtcttgccctcgttcgccgtgtaagccacaccagaataacaccacatttccattacgttccactcaagtaagaaaccctaattttacgttcttttaatttttcaggtgccgttctttgcgcagatggatgaccagctcttggatgcgatatgtgagcgtctagttccgtccttgaacacaaaagacacctatgttatacgcgaaggcgatcctgtaaacgagatgcttttcattattagaggtcagatggagagttcaactacagatggtggacggtcaggattctttaactctatcacacttagaccaggagatttctgcggtgaagagcttttaacctgggctttagtgccaaacattaatcataatctaccattgtccacgagaaccgtaaggactctctccgaagtagaagctttcgctctccgagcagaggacttgaaattcgtagctaaccaattcagacgtcttcacagcaagaaactccaacatgctttcaggtaatcctcgtatggtctcataagcaatataggtttcttgcttcacacgctataaggtttcttgatctttatgttttgactgtaaccagatactattcgcatcaatggagagcatggggaacttgttttatacaagctgcttggaggcgatacatgaagaggaaattagcaatggagttagctaggcaagaggaagaagacgattacttctatgacgatgatggagactatcaattcgaagaggacatgcctgaaagtaataataacaacggagacgaaaacagcagcaataatcaaaatttgagtgcaacaatattagcgtctaagttcgcagctaatactaagagaggtgttttagggaaccaaagaggatctacaagaattgatcctgatcatccaactttgaagatgcctaaaatgtttaaaccagaggatccaggattcttctgatagttgttgtgacaaatgcatttaggatttctgacactaacttgatttgctgtaaccaatagtcaggtatacaaagaaacattattacagattgaagtaattgtgacttgacgtcggtcgatattatgtcgatttctatccaacgcactcttggctcctacagcatttattggtacacaaagtgggctttgaaactcataaaacaccttgtgtttaagtctaattatgttttcacataatttaggtgaattaaaaaattaattaattataaattgaatttgggcaatgaccatattttggtcaaaaataatgagaatgacacttataaaagaaaaataaaggatatagtcatagactcattccactatttgattggacgaaaatgatttttgattacacacttcaacttgtatttttcttcgtctacatgattttgtgcaaaccaaaaaaaatatgtaatccctttcagtttattgcttgatatttttaatatataaactgattaaatctcgcaatcgtgtcaaaaaccatatatttgtcatttatgccataatttaattttaaagatgaatatgtgaatatagaatgaaatctgaaaataatattgtaaaaagcacatagaaaaaaaccacctttttctcaactttaatcattttcttgattagtaaccttttggagcagtagaattttctcattgtattcaaatggtacgaattaaatcttcttattaatagcagatgattttttttctttatttgtcgaaagatttcaagggacaaacatcacaatccgcaaagtaacctatatttacaagaaaagatgaaaaacataccaaatagatgacacaactaccgcttagaaaacgacttcacaccataactagcaacttttgcatttatatagatatttcctttattttcattataatttttccacattgccacaaaaaatgatatccacaattaattaattttaatttgtagttggatctaaatctaatatgaaagaaaaaagaaaaaacatattgagtctgaatcatatggatacacataccaaaaaatcagagatcacggcaagacaactttttgtcttatcttttagttttttatttgtcaacgttgtttgttgtcttactaatttattttaattattttttcccgaatctcatttttctaagagggaaaaagaaaaacatttcttttttctcttatgcaataaaaatcgcttcttttgtctttgatattaggaaacggacaaatcagtctagtcaaatagagccattcaaagtacggcaacacaaaccaagagagtgtaagttaagcgacatgtgttagagatatccggagatctcaaccgttggattctttctccttcaaatcaaattataaatcccatcaaacagagagagagagagaagaggaggagaattcgaagaataaaagataagaactttgacgttttgaagcttaaagcttgaaacttgtttcatccatg

SEQ ID NO: 20057 - DNA, 3003 bp, Unknown; identical to SEQ ID NO: 20056
  misc_feature (1)..( 3003): 2750-1469P.txt file - cDNA_ID_1824251; gDNA_ID_1620706; Annot_ID_165299

SEQ ID NO: 20058 - DNA, 3003 bp, Unknown
  misc_feature (1)..( 3003): 2750-1469P.txt file - cDNA_ID_1824265; gDNA_ID_1620706; Annot_ID_48887
cgaagccattctaactcaacaaaagcaaataactttcaacgaagaaacgcacaaaaaccagagagattgtgaaatagagagataaaatgaagtgattaacatgaggaagtgtggagaatgtacttcatgttatttttgaaaatctcaaatctgtagtcttttagatcgagcttcacaggaacatgatgatggcttgtccacctgctgtatagctttagtaatagatggatgagccaccatttggttccaatgaagctcgacctaaaagaaaatagatatgaagttttcagaaataacgcgaagttgttgggcattcgctgctaggcacctattgaggggattaactacgaaagtacgacccagttggtgatgttttctgcacaagaactaatttctgcagacaaagtcaccaccaagtttggcactcaaattcatcaagaaaaatgcaacccttttaaaggcacaaaatgtgaggtaaccatctatcaattcagatatgtagatgtagatctttcaacgaggcagccttatcaacgctattgcaatccggctttttttatcaaccacacattaattaaaagatgattccatgattggttacccaatctggaagaaaagagtttagatacgtaacttcagaaaataataatttagaaaaacgcggtagacaatccgccctaatattactcaaacgagaaatagaagatatcgaaaaagaggaaaaatattacggagcgatccaaactcatctagaagattggagaaagcgtgtcattcttcaagagactgcaccatcgagactagctctgtgcaatctgattcaaatgtctggcagtcgatccttcgtgaaaggatattcttcataacccaaattaaagcttccagctccgagtgaaggggagaagggctcctccagaggcactttgcacataagagtactgtttgatcaattccttgaaaacaccaccatcctaatcccatggttagatccgaagatttccatgatccatcaaccctacatctaatagaatgagtcagttgatccatagacaccctggtaacattcgattcaatcggttccagttgggccgcatcccacaataattgttcactcaaagcgacatttagaatatctaaaggttctgattgtaaacctttgaaaacctttttattcctatctttccaaataaactataaaatccatgcataaaagttatttccctctctctcatctattggagatggtaatccacaaaaaaagtaatgaagatttgaaaattccgaggttaaaggaaagcttcctgctattacaggaatcgaagacatttcccagacttgtcgagagtgaggacactcaaaatctattttttgtagtcaatttttaaaaaatatagtcagcctagtataactattcatgcttatggatatatttcgcaaggagtgatgacgaaaaactctggaacggatttgaactacgcaatgcctttggtcaagtacgggatgaggcagaacgggatataaatattggatagctaagaattcgtatagtccccaatgtggagaaggcgaatatattaggatcgagagagggattgctgattcaaacttggttacagaagagagacagagatgttgttaggattaaaacaaaattggttacacaatatagtgcgaccaaaaaagaaaaacatgcaattttacaaaatatggttgaaacaaaaggcccatgtcttttggtcctcaaaaactatttttgtgaattcagttgatgatacaaaaatagaaattcggtaaaataaacaatgatgcggttagatgtggtaagagataccgattaaatataacgacatgataagaaaaaataaaaatggactaaaaatactattaattttaaaaagaaaacaaattttgacagcaacattaaacataacaattttgctgtggattcaatggatgcttggtttcgttttgacggtaaaagaacaacttcgttttttctaaaggggcataaggttttgtgaaagaattataaaaaaaaactgttttgccaccatttttgttaatcgacttatcatatagcacttgtttttactagtgatatgcaatattacaactttttgtggaagaatatacaaacacacaaatcaaaaatccaagtagttattcatctaacttatttgtagttgatgaatggttatgtgtggttgagacaataaatataaccaagttgtaccgaatgaattggccatcactctattttaaacacaaaacagtgactatacacaatttcttaaacccgattgaaaaataatataaattggacaattaaaaaaaaacttctgacaagttttttggtttatttcggttcttcaaaccggcttgcatagaatcaaattttaattgtaaaacaaaaacaaaaaaagtaaagtcaaaaggagtaaggaaacgtggtcaaaaccgtccgtcactcacccacctcttaatctctccagtccctatgtcacctgaaaaagattggagatgacgtcacgcccatattgttttttcatttaagtcaccgcactgtcacgttatctttgccccttccatccacaactcctctctctaacccgacccgatccgcccgaactcgtccaagtcacctttcccctttttcgccccgtctctctctctctctctcttcttcgatttattggtgtttggttcgcttacgcgatttctcgaagaaaaaatctcgtattcctggatcgaaacaaggctgattcgattactcgctgtcgctgttgttgattttggatctgtgttttgttatcttcggatcgggaatcgaagccctagagatttgatccatttcgtcgcgaaattaggttttttttttcaccgataagtttttggatctaaagttatcgaatattgtcagggggaaaaaggaattttgaggatttgttggattttgctgaggatattgatgttgttcgaaggagaagatgatagaaggctatg

SEQ ID NO: 20059 - DNA, 3003 bp, Unknown
  misc_feature (1)..( 3003): 2750-1469P.txt file - cDNA_ID_1824265; gDNA_ID_1620706; Annot_ID_165293
gcacaaaaaccagagagattgtgaaatagagagataaaatgaagtgattaacatgaggaagtgtggagaatgtacttcatgttatttttgaaaatctcaaatctgtagtcttttagatcgagcttcacaggaacatgatgatggcttgtccacctgctgtatagctttagtaatagatggatgagccaccatttggttccaatgaagctcgacctaaaagaaaatagatatgaagttttcagaaataacgcgaagttgttgggcattcgctgctaggcacctattgaggggattaactacgaaagtacgacccagttggtgatgttttctgcacaagaactaatttctgcagacaaagtcaccaccaagtttggcactcaaattcatcaagaaaaatgcaacccttttaaaggcacaaaatgtgaggtaaccatctatcaattcagatatgtagatgtagatctttcaacgaggcagccttatcaacgctattgcaatccggctttttttatcaaccacacattaattaaaagatgattccatgattggttacccaatctggaagaaaagagtttagatacgtaacttcagaaaataataatttagaaaaacgcggtagacaatccgccctaatattactcaaacgagaaatagaagatatcgaaaaagaggaaaaatattacggagcgatccaaactcatctagaagattggagaaagcgtgtcattcttcaagagactgcaccatcgagactagctctgtgcaatctgattcaaatgtctggcagtcgatccttcgtgaaaggatattcttcataacccaaattaaagcttccagctccgagtgaaggggagaagggctcctccagaggcactttgcacataagagtactgtttgatcaattccttgaaaacaccaccatcctaatcccatggttagatccgaagatttccatgatccatcaaccctacatctaatagaatgagtcagttgatccatagacaccctggtaacattcgattcaatcggttccagttgggccgcatcccacaataattgttcactcaaagcgacatttagaatatctaaaggttctgattgtaaacctttgaaaacctttttattcctatctttccaaataaactataaaatccatgcataaaagttatttccctctctctcatctattggagatggtaatccacaaaaaaagtaatgaagatttgaaaattccgaggttaaaggaaagcttcctgctattacaggaatcgaagacatttcccagacttgtcgagagtgaggacactcaaaatctattttttgtagtcaatttttaaaaaatatagtcagcctagtataactattcatgcttatggatatatttcgcaaggagtgatgacgaaaaactctggaacggatttgaactacgcaatgcctttggtcaagtacgggatgaggcagaacgggatataaatattggatagctaagaattcgtatagtccccaatgtggagaaggcgaatatattaggatcgagagagggattgctgattcaaacttggttacagaagagagacagagatgttgttaggattaaaacaaaattggttacacaatatagtgcgaccaaaaaagaaaaacatgcaattttacaaaatatggttgaaacaaaaggcccatgtcttttggtcctcaaaaactatttttgtgaattcagttgatgatacaaaaatagaaattcggtaaaataaacaatgatgcggttagatgtggtaagagataccgattaaatataacgacatgataagaaaaaataaaaatggactaaaaatactattaattttaaaaagaaaacaaattttgacagcaacattaaacataacaattttgctgtggattcaatggatgcttggtttcgttttgacggtaaaagaacaacttcgttttttctaaaggggcataaggttttgtgaaagaattataaaaaaaaactgttttgccaccatttttgttaatcgacttatcatatagcacttgtttttactagtgatatgcaatattacaactttttgtggaagaatatacaaacacacaaatcaaaaatccaagtagttattcatctaacttatttgtagttgatgaatggttatgtgtggttgagacaataaatataaccaagttgtaccgaatgaattggccatcactctattttaaacacaaaacagtgactatacacaatttcttaaacccgattgaaaaataatataaattggacaattaaaaaaaaacttctgacaagttttttggtttatttcggttcttcaaaccggcttgcatagaatcaaattttaattgtaaaacaaaaacaaaaaaagtaaagtcaaaaggagtaaggaaacgtggtcaaaaccgtccgtcactcacccacctcttaatctctccagtccctatgtcacctgaaaaagattggagatgacgtcacgcccatattgttttttcatttaagtcaccgcactgtcacgttatctttgccccttccatccacaactcctctctctaacccgacccgatccgcccgaactcgtccaagtcacctttcccctttttcgccccgtctctctctctctctctcttcttcgatttattggtgtttggttcgcttacgcgatttctcgaagaaaaaatctcgtattcctggatcgaaacaaggctgattcgattactcgctgtcgctgttgttgattttggatctgtgttttgttatcttcggatcgggaatcgaagccctagagatttgatccatttcgtcgcgaaattaggttttttttttcaccgataagtttttggatctaaagttatcgaatattgtcagggggaaaaaggaattttgaggatttgttggattttgctgaggatattgatgttgttcgaaggagaagatgatagaaggctatgcatgggagggtttgtgagcggagacacaaaagtcgtcgtcggcacatg

SEQ ID NO: 20060 - DNA, 3003 bp, Unknown
  misc_feature (1)..( 3003): 2750-1469P.txt file - cDNA_ID_1824269; gDNA_ID_1620706; Annot_ID_48886
gctgctaaaattaggaattgaattcatgccactaagaatactgttagggctattagaaagtgactcaataaagctctcatgacgatgtgttccattgttatcctcatctaaattctccaccggacgcggaagatctctctgatcaggcttttcactcccaattcttcgattggattccatttcctccttatcccctttgttaatcatcgcaactaataacaacaaaaacccaaatcaatataaacaaaatccacatgtaaagatagatcatttaattttaccttgagaaagccattgttcacgacgaagacctagcttgctctgtttcaatttggccgacctgttcgtctgcaaacccaaagagtgaaatcaaatctttgaagagagaaatgagatttgaggaaggattgaaaacaatacccttttcttttttccgaaatccctggcggttggagctgaagtagcagaagcgttggtgatcgaatcagaaatcatggtggttgcagatgattccaaagcaacaacaaaatcaaatacaaataaatttcaaaatcacgaaatgaagatttctcaaaaaccctaatacagatttgttgcgagagagaagaagaagaagaaacgtgcgattttttatttttttttgctttgtttgttgtgtctgtgagagaaaacgagagagagagagataaaataaggggataacggaaactcctcgtctccgcacagaactttccttctgactaaagtaccctttcttttgacttttgcacacgctcgaatgtaggggtggttttgtaattgtgatggatctacacgtgtgagaaacttctgttcatttaaaaacggtggcgtacggtggactacacgtgaggatagttcatatgattcacaaatatcagcgagcttctagatcaatcagctgggtttcttctggttacagaaaaaattaaatgatttagaaaaacatcaaaaccacaaagtcaaagttgtgtctctttctttcaatttgatgaatcgatcaaacacatttttatcttatattttgatgtaacaacaaaacatgaaattaaacaggttaaaatagcttatgaaaattggtattagggagctaggaaactgcagatgagagttgaacaacatttaggtaagtttttaactaagtcatgattagtttattgtattttgaacattaacctgcaaaattaattactactataataagaaatcttaggtagcaacatgaaaaaagtaagaatgctaattaacaaattacattaaattttagaaagaaaaaaaataacatgttaaacaatattttttattgcatcaacatagttctaagttatgaaatgacataggatgataaaaatcgattttagtgaaatgacatgtaacttgtaatggtgaatcagttacatggtttaccatactttagagtgtatataacttcaatcgatcagtgaaccatttaagattacgtaaagatacatcaagtgcattaagagagaccaattgatctactcgacacaaacagagagtataagctagtgtctaagattgaccgataaataataataatacaaggatttggatttaatccttcaagccactctaacaattccaaaggcatgaagacagattatcaacatgaaaagctgaaacatgtggaatgttttttaattccacaattgtccaaaaaaaacaagcttttatgactttattacaagctaacacactgttcaatatgaaatcaagaaaagaatgaaaaaaaactgaaattaaagaataaatcctactcgaaatagacaaaccaacacgatggttcaaaagaaaaggtgaagttgagcagaatctgacttaacacaacaaacaaacaaaaacccacagaataatattcgggaatctacctgaaaaagagagcaagacacgcatcaatggaaaaagacttttatggatcagagatacaaacagagttttgatatgttatctcacatcaattgcagttcttgtgtacaaaaggtaacgccacacacactctcgatgaaagaaagagatttctgagtaaatggaatattaaaaaaagtatgtttgtttgctgcaatgcaaaagtcgaggttaaattcaaaaagcaaacatatacatacacatatgtgtgttacctttttcctagacaacaactgatcaaataaattactttattattagtatgaagtctgaactaagcattttccaaacagtttacattggctaatcgatcgaagtaaacgaacaatgtccagtgagcttaattatgcactagtgactagtgttataaacttcaaagggagtccaaatttcagcttataaaacctcgtaccgaattatgattatattagcgaaactggttttgggttaaaaacataacacatgtttatatagatagatattacatgctaacaactcatgatgagtagtaatgtgcaatgttagaaagtatggttcgttttcagaatccacctaacggttggaataactcgaaatgtacccatgagtttcctatctatatttagaacgacatgcataatcttgattgtgacactcagtaatatttctctctaacccgacccgacccgcccgaactctcccaagttacctttccccttttcgaccgtttctctctctctctctattctcttcttcgatttattggtgttttgttcgcttacgcgatttctcgaagaaaaattctcgtattcctggatcgaaacaaggctgattcggttactcgctgttgctgttgttgattttggatctgtgttttgttatctgcggatcgggaaattggaaaaaaacctagatatttgagccatttcgtcgcgaaattaggtttttttttttcaccggtgggtttttggatctaaaggtatcgaatattgtctggggaaaaaaggaattttgaggatttgtttgattttcgctgaggaaattgatgttgttcgaaggagaagatgatagaaggctatg

SEQ ID NO: 20061 - DNA, 3003 bp, Unknown; identical to SEQ ID NO: 20060
  misc_feature (1)..( 3003): 2750-1469P.txt file - cDNA_ID_1824269; gDNA_ID_1620706; Annot_ID_165291

SEQ ID NO: 20062 - DNA, 3003 bp, Unknown
  misc_feature (1)..( 3003): 2750-1469P.txt file - cDNA_ID_1824273; gDNA_ID_1620706; Annot_ID_48884
gcgaaatcccaaccgagagtgacatctcaaaccaaaagatggagtctatattaaagagacgaagactccaaagtcaagctacaaaatttccaagcaaagattacacagagaaaactttccgaccaaatgtgaatgtttatgaaagtttctgcgaaactccagtcatgtcggatgtacaaagccatacaccaatgtaaaaccgacacgtggaaagctaagattcctagcttttctttcttcatgagtctccaatagccaaagagtcaactccaaaaaaaaaaacccatttttgcattgaaatggtctcatgatggggtattttgggtaactaattagtcctgtctacatcttcccataaattaacagagtaggagcggattaaagaagcaagacgattcaaaagaaaaaagagagaagaaagtccactaaagaaaagagaatagatatagatcaatggcgtttgaagctcttaccggaatcaatggtgatctaatcaccagatcatggtcagcctcgaagcaagcttacctaaccgagcgctatcacaaggaagaagcaggagcagtcgtaatcttcgctttccaaccatctttctcagagaaagatttcttcgatccggacaataaatcttcctttggagaaatcaagttgaaccgtgttcagtttccttgtatgaggaaaatcggtaaaggtgatgtagctactgttaacgaagctttcctcaagaatcttgaagctatcattgatccaagaacctcatttcaagcttctgtaagaagattgaaaacatccgaatatatttttctttttttttcttttttggtctcttatgcttttacttcttcaggtggaaatggctgtgaggagtagaaaacagatagtgttcacaggacattcctcaggaggtgcaactgcaatcttagcaacagtttggtatttggagaaatacttcatacgcaatccaaatgtttaccttgagcctcgttgtgtgacatttggagctcctttggttggtgactctatcttcagtcacgcacttgggagagaaaaatggagccggttctttgtgaactttgtctcaagattcgatattgtccctcggattatgcttgctcgaaaggcgtctgtagaggaaactttgcctcatgttcttgcccaattggatcccagaaagtcttccgtccaagagagtgaacagagaataacagagttttacacaagggtgatgcgagacacatcaactgttgcaaaccaagctgtttgtgaattgactggaagcgcagaggcgtttttagagaccctttctagtttccttgagctaagtccttatagacccgccggtacttttgttttctctacagagaagagattggttgcagtgaacaactcggacgccattcttcaaatgctgttttacacttctcaagccagcgatgaacaagaatggtctctaattccatttcgaagtatcagagatcatcatagctatgaggaactggtacagtcgatgggaaagaagttgtttaatcatttggatggagaaaactcaatagagtctacgctcaatgaccttggagtggtaagtctctctctctctctcttttcatactgtgcagctccatagctccattcttgcaatcatttaaacccttcagagtgtttcctttttctgcagagcacaagaggcagacagtacgttcaagctgcattagaggaagagaagaaacgagtagagaatcagaagaagattattcaggtttgtggttgataagcttgttcatgaataatgcaggtacgtgcttcgtctgtttgtgtctaacaacataaaacttgttggttctgtggtttttaggtgatcgagcaagagaggtttttaaagaaactagcatggatagaagatgaatacaagccaaagtgtcaagcccataaaaatgggtattatgattccttcaaagtttcaaatgaagagaatgacttcaaagcaaacgtcaagagagctgagttagccggtgtttttgacgaggtgcttggtttaatgaagaaatgtcaacttccagatgagttcgaaggggacatagattggatcaagttagcaactcgataccgcagattagttgagcctcttgatattgcaaactaccatcgacatttaaagaacgaagacacagggccgtacatgaaaagaggaagaccaacccgctacatatatgctcagagaggctacgaacattatatactgaagccaaacggaatgattgcagaagatgtattttggaacaaggtaaatggtcttaacttagggttacagctagaagaaattcaagagactctaaagaattcgggatccgagtgcggatcatgcttttgggctgaggttgaagaactcaaaggaaagccatacgaggaagttgaggtaagagttaagacattagaagggatgcttggagaatggatcacagacggggaggtagatgataaggaaatatttctggagggttcaacgtttagaaagtggtggattacgcttcccaaaaatcacaaatcgcattctcctctgcgagactatatgatggatgaaataacagatacctgaaccttaggtggtggagtatttaagctattagaacacttgcttctcttaatttgtgcaataagaaatgtttatcaatctggtttccacttcatgatgatcttagaataagaaacatgttgtatgatcattgtgaagtaatgtaatagctctctattctaatgtcaaatttggtttccactttacagtgatcttagaatatatacgttactctactaaagcctaaagccatctcaaatagcatgaaccagtaacaaacaaccttccttagattgaaatggtctcatgatggggtattttgggtaattactcctgtctacatcttcctactatattaacagagtaggaggactaagaatcaagacgactcaaaagaaaaaagagaagaaagtccactcaagaaaagagaaatg

SEQ ID NO: 20063 - DNA, 3003 bp, Unknown; identical to SEQ ID NO: 20062
  misc_feature (1)..( 3003): 2750-1469P.txt file - cDNA_ID_1824273; gDNA_ID_1620706; Annot_ID_165289

SEQ ID NO: 20064 - DNA, 3000 bp, Unknown; identical to SEQ ID NO: 4438
  misc_feature (1)..( 3000): 2750-1469P.txt file - cDNA_ID_1824277; gDNA_ID_1620706; Annot_ID_48881

SEQ ID NO: 20065 - DNA, 3000 bp, Unknown; identical to SEQ ID NO: 4438
  misc_feature (1)..( 3000): 2750-1469P.txt file - cDNA_ID_1824277; gDNA_ID_1620706; Annot_ID_165285

SEQ ID NO: 20066 - DNA, 3000 bp, Unknown; identical to SEQ ID NO: 4432
  misc_feature (1)..( 3000): 2750-1469P.txt file - cDNA_ID_1824281; gDNA_ID_1620706; Annot_ID_48880

SEQ ID NO: 20067 - DNA, 3003 bp, Unknown
  misc_feature (1)..( 3003): 2750-1469P.txt file - cDNA_ID_1824283; gDNA_ID_1620707; Annot_ID_48923
cttttaatgtcggggaaaatggttttgacaagctcaaattcaaccattgttttgtcaatatattgccggtttggtctgaactctgaactctgaagaataaataaacaagatatgatttcgggcaataattattaatgctaattgttttaagctaaaggggaggggggagaggaagaaattttggttctttattatatcaacaaaaaacataacgaaaacatgaatctaggtatatcattttaatctgcatatccgaaaatgttccctatactaactaatacacgaatttattataagggaaacaaatagacaggtgatattttaaattagagctctacacatctctttttttgcttggtggctcaacaaaaacttcatcttcttttggtttcaaactctacaaaatcgtggatgcacttacagttatatataattagatatattactgataatatagattatatgatatggatctctctctctatatatacattgtatttaatccattattccatttactcaactcagacaaactatgattaatagataatatatatatatatatatatatatatatatatatatacacactgatacatttatatatcgcatatatatgtttgtaatcttgtatatatatctaacgtatggatgcatgaattttacaaaatgagagaaccatttattggtaagacttttctttgatatcatgaaggaagcagccaaagtaatatatattttatgttctgattattatatttttctccgctccgccaagtcaattgataaatttcgtgcaactaagaaaaatatctgcatcttaagctaagtcatatcattagaaatataaatatagaagtcatattcttatgttccttttctctaatcagattacatttaaaacccaaaagtttgaagatatatactagagttatttggctttgttacgttaacgtgggaggaaaatagcgagtgtttctgattaaagtcaagagcaaatgagcaatacatatttgtctgtatatgtatccatgagttactagtcgaaaaaaaaatgttcattacttttatgttatgtttatttttgtcaacaggtcgttgcagatttgcagcttatcttaaccctaatattttacacatatgtcatgtatgtatttctcagaatcaagttaagaggttaaacaaaaaaggaggttaaccagggtttgtagcttataatatattttatatttattatatgtagtttatattaatttttgtatatataagtgaaaaagctatgtaacaatattgtaaaaaacaacatatcatttaaattatagctccataatatatatagggaatagaaacaactcaaatgtaaataatatagtggtaagactcctaaattatataatccttaggcctcaaaaaagaatgcgttagaatgtaaattaacggtttaaaattttctgagaaaaaagatgatgaggattcggtccacaattctccgattaaccatataaaactctaaactttcatataactcttatcatgaaaccgtaaaagatcgtccataattattgatccagattttttcattaaataatagaaggattcaatatgattttagctagatagatttgggagtttaattagctggtttagctaattcaccagaaaatgttttatctaactagtactaattagcatattgtattttacatgttatcccaaatgaattatttttaattttcacacacacacacatgtatacacttttcatctagaatgccacacatcttcattttacttttagtcattgttagttgtatttttttgttaatgaatgattgaaaactgaaattgcaatataagaatattttgataaaaaaatatatatgacacaaatgcaaataataatagagaattctcaatatagaattgtttaaagaaatctatcatattaatctaaaaaattattatcaagatataaattaaaaaaaaatatcttatctaattctatatgtgcatgtggtatgtgtaataagctactacagacacgtaaacagatattactactttgaatagcaattacatttataactttacaaagaaagactacatatgtagtaaataaatctcaatattcaatctcgtttagccatttgtcatgatatttgtatgtagatatgctatataatatcacaaatatcatattcaagtagtaaaaaatctaaagaaaaaatagttgccaaaacaaaagagataagtaaaactagtcttcgtagttatctctctgaattatgcatggatatcattcccactcttttattcactctactattaagaaaaaaaaacgtgctgtatatgaaacaaaaaaaaaacccaaagaaattgttgatgtcaattgatataacacatatctgaaattaaatatttgatgtagcacaagaaacttaaatttaaaaaccaaataaacttataaagggtagactttaccccacatttgtctctctctacttaagccaaattgctctattcttttgttttctctttataattaggctttataaaccaacttttattaagaacaacaaaaataaaattgttatttatttggcaacagaacgaattattaaccaaattaatccatttgaatggccctcctctctctctgtctttaattagttggtttggtcaaaatctcacacgctctttatgcatgctctttgacacgtgctatcttcgtctctctcaaatgagctgtctctctaataagagtttcttctgtataggaaaggaaaggtctctctctctctatttacttatgagaatagcctataaaaccccttcacatctcccacttgttttgcatcacaaacatttcttccattacattaaaactccaaaaaattcatttttgttttcttttagagttcacaagttcttcgttgttcagctactcccactgtcataacacgaagtgggtttttttctgatcaaagaacaaaaacaaaaatg

SEQ ID NO: 20068 - DNA, 3003 bp, Unknown; identical to SEQ ID NO: 20067
  misc_feature (1)..( 3003): 2750-1469P.txt file - cDNA_ID_1824283; gDNA_ID_2926173; Annot_ID_140206

SEQ ID NO: 20069 - DNA, 3003 bp, Unknown
  misc_feature (1)..( 3003): 2750-1469P.txt file - cDNA_ID_1824291; gDNA_ID_1620707; Annot_ID_48921
gttcttctgttccaattccaattccttctgaaatattcatcgcaattcgtatcggtaatttttccttttgatcgcattttttttttatctttgatcttccgtattaaacgtgctcgatctatatactcaatgatcttatatgtgtatgatcatgtaatttggaagttgaaatgtaaatcatctattccttggtaaattattcttcgattttttttctgatataggttaatggtaattcctgtgatttttactgatgtaatctggtgttgattgttgtgaattcttgatctatgagattatgtcttagatttgccaaatgttaagtttgtttgatctttgacaaaatattgtaggtttaaagtaaaaaagcaatgggaggtggtaaagacaagcatcatgatgagcaagagaaaggatttcatggttttccaggaggtggacattacccacctgctcaaggaggttaccctcctcaaggttacccaccacaacaagggtatcctccagctggaggctacccacctgccggatatcctcctggtgcttaccctgctgcgcccggtggttatcctcctgcacctggaggttaccctcctgctggctatcctgcacctggagctcaccattcaggtatgcattgtctcgttaaagagctcttctttgtagttttggtaaatgttgatgttttctatgcaaaagctatggagtgtccttgtagcttgcttggattatcaacctgctaaatattgttaatcattgaatgttaataggaaaagactttataaatgtttcggttttctatgaaaaaagctaaagattgtgcgtgaagtttgctggatcattaaccttcgaactttgaatgataatagaacaatagtttgtaaatcttactgttttctttgtaaataaagcttagaactggccttgttgtttgctggattatcagcctgctaagtattgtcaagtttgaatgatagtatgacaattgtttctgaaatgttgtttttttttctgtgataaaaagatgaggacatataaacttactgtcttctgttttggtgtatacattgatgttttaattttaaatctactaggagtacatgtttaatcgtgtgtgcttatcaatatgcaactttgtggtctcttatatgcattctgctactttgtggttctccatgtaatactattttcttttttccatcaggacattctggtggtggactcggaggcatgatagcaggtgcagctggtgcagccgcagcagcttatggagctcaccatgttggtcacgcctctcacaacccttacgggcatgctgtaggacatggagggtatggccatgcccctgctcatggctttggccatggtggtcatggtaaattcaagcacggaaagcatggaggcaaattcaagcacggaaagcatggaaagcacgggaaacatggcatgtttggaggaggaggcaaattcaagaagtggaagtaatctcaaaaaccccacctttgatcctctcctccagtatagtctcattacctgaccgatgtttctaataatcccccttcaaacatatttcattttaactatgtcggtttagagattactggttgaggaaataattggagagtgctagtataaaccttatggtatctgcagcagaggtttctttaatctctcaatagtagatgctttgaaacttatctataatttggtattgtaatgacagtttgtgtttggttttttcttcagtatcttctttgtttgatcatttgatgttggtggagttctccaaaatatttatgctattgtagatcctaacctttctatcttgttattcttcgttttttggccattattttcgtttcgctcccgatccaaattccaaagtacttcaacaatatcttatgcaataacgagacaaacacttaaggtcgtgcaagaatagtgtctgtttttcactgattcacttttacagagaacaaactgaattaattttgattattgaatagttgacatgcaataatatttgttaatccaaatgaatagataaaaaaaaaaattccttgagagtaaagaaactaaattttggaagacaatttttaactagttttctctaaaactaggaaagtcagaaaatgagaaaacaaatttgattttattacggaagtgaagggctttccgacaaattgctttgctcagaccaaactgtaaccgacccaagcccaataaaaaagcgaatcgggtcaaacgaaaacagataattcagaaaaccctaaattcgtttctctttttttttcttcattctgagcaaagcagtaactctcaggtgcgtgtgctctccgctggttccttagaacaatcggcacacgctttttcatttcaatcttcttcttctactcttaagtatctcaggtactaatctcgatttctctatttctcgtccatggagatttagatttcaagtcagatgcttttcgatttgttacagatgtataatttttgtaatcgattgattcgcagcttggattgtattgagccatcgacataccttcaaaattcttataattgtattgaaagtgtttgaatttaatgtttttttttttctttctctcgattgttttgatttctgggcaagtgtcaacttttgtaacagattagtgacctttctctttatagatatgtggaagaatttggaatttacaaattcggttcaccatttttatctgaagcactgaatttgcgtttttcaagcttgagtgaatattatttcttggctcttaagattttgcatgtcaactattatttcatcattgttagcatcttgtggtgttcaagttattattttaaatattgtttgtgctactctatagttattccctatgttgttatttcgttcctttgccttagcgtgacatctttatttggtatatttgtatctgtgtgatttagtttcttcaggctgttaaactatagatttcatgtattttgtaggtctgttgagagatg

SEQ ID NO: 20070 - DNA, 3003 bp, Unknown; identical to SEQ ID NO: 20069
  misc_feature (1)..( 3003): 2750-1469P.txt file - cDNA_ID_1824291; gDNA_ID_1620707; Annot_ID_165344

SEQ ID NO: 20071 - DNA, 3003 bp, Unknown; identical to SEQ ID NO: 20069
  misc_feature (1)..( 3003): 2750-1469P.txt file - cDNA_ID_1824291; gDNA_ID_2926173; Annot_ID_140204

SEQ ID NO: 20072 - DNA, 3003 bp, Unknown; identical to SEQ ID NO: 20069
  misc_feature (1)..( 3003): 2750-1469P.txt file - cDNA_ID_1824291; gDNA_ID_2926173; Annot_ID_199650

SEQ ID NO: 20073 - DNA, 3003 bp, Unknown
  misc_feature (1)..( 3003): 2750-1469P.txt file - cDNA_ID_1824294; gDNA_ID_1620707; Annot_ID_48920
ttaatgcttggaatttgcagatacgagaagcggttaatagaaatgatccggtggaatcacttcttctgtttcgagaaatgaagcgcggaggatttgaaccgaacaactttacttttccatttgtggcgaaggcgtgtgctaggctcgctgatgttgggtgctgtgagatggttcatgcacatttgataaagtctccgttttggtctgatgtgttcgttgggacagcgacggttgacatgtttgtgaaatgtaattctgtggattatgccgccaaggtgtttgagagaatgcctgagagagatgctaccacttggaacgcaatgctgtctggtttctgtcagtcgggtcacacggataaggcgttttctctatttcgtgaaatgagactcaacgagattacacctgattctgtgactgttatgaccttgattcaatctgcatcgtttgaaaaaagtttgaagcttttggaggctatgcatgcggttgggatacgtttaggtgtagatgtacaagttacagttgccaatacttggatttctacttatgggaaatgtggtgatttggattcagcaaagttggttttcgaagctattgacagaggtgacagaactgttgtgtcttggaattctatgttcaaagcatattcagtttttggtgaagcatttgatgcttttggtctttactgtttgatgctgcgtgaagagtttaagccggatttgagtacgtttattaacttggctgcatcgtgtcagaaccctgaaacactaacacaaggaagattgattcattctcatgcaatccatctcggtacagatcaagatatagaagcgatcaatacctttatttctatgtattcgaaatccgaggatacctgttcagcgaggcttttgtttgacataatgacttccagaacatgtgtttcttggactgtgatgataagcgggtatgctgagaagggcgacatggatgaagctttggccttatttcatgccatgatcaaatcaggagagaaaccagatctagttaccttactctccctcatttcaggttgtggaaaatttggttcacttgagactggaaaatggatagatgctagagcagatatatatgggtgcaagagagataatgtcatgatttgcaatgctcttattgatatgtactcaaaatgtggaagtatacatgaagctcgagacatattcgataacacgcctgagaaaactgttgtcacatggactacaatgatagctggatatgctttgaacggtatctttctcgaagctttgaaactttttagcaagatgatagatttggattataaaccaaaccacataacattccttgccgtccttcaagcttgtgctcattcgggttctctggagaaaggttgggagtatttccacatcatgaaacaagtatacaacatcagccctggactagaccattactcttgtatggtagatcttcttggaagaaaaggaaagctcgaagaagcattagaactcatccgtaacatgtcagctaaacccgatgctggcatatggggtgcattgctaaatgcctgcaagatccaccgtaatgtaaagatagctgagcaagccgctgagagtctttttaacttagaaccgcaaatggcagctccttatgtagaaatggcaaacatatatgcagctgctggtatgtgggatggttttgcgaggattagatcaattatgaaacagaggaacattaagaagtatccaggtgaaagcgtgatccaggtaaacggaaagaatcacagtttcactgtaggagaacatggtcatgtagagaatgaagtcatatactttacgctgaatggtttgagtttgtttgccaaagataaacacgtattgtataaagatgtgtacaaagaacaaagttatgaacttttcatttgatgacaatgactttttagtggatttgttgttattacttttaggatatagttttgtgatggggaatctagtgttatcaacatgtgtttgaataattaatattacaagatatgtaaaaggaaaaggtaattatgatttgtggaggaccagattcttttggcattactttattttattcaccactaatatatttctggaatttattaacttaaaaggataaagactttttagacaactttaaataattacataacattaagaaaatatatttttccttaaccatgttcttagaactccgtgtccattgcgcgttcccacgacgtagatattttctttattatactttaccctttttgattttcgtattctcgtttaaaccccagtactttcttaaacacccaacagagccacatgtatccaacaaaaactattttttcatgcatcataagtgcaaaacactcataaaaaataaagtgattgtattcatgattaatttgtaactgttttgttttacgtttttttgtatttggagtatagatacgattaaaattacaaagactacaatgctttttatttatgattgtcttaaaatacgaggactagaaaacaattaaaatataaaatagataagatatgcttattcaaaaatgtaacgcgttaagtaattaatatttttggatacatccatccatatatatccttctccattagcttttgttcttctgttccaattccaattccttctgaaatattcatcgcaattcgtatcggtaatttttccttttgatcgcattttttttttatctttgatcttccgtattaaacgtgctcgatctatatactcaatgatcttatatgtgtatgatcatgtaatttggaagttgaaatgtaaatcatctattccttggtaaattattcttcgattttttttctgatataggttaatggtaattcctgtgatttttactgatgtaatctggtgttgattgttgtgaattcttgatctatgagattatgtcttagatttgccaaatgttaagtttgtttgatctttgacaaaatattgtaggtttaaagtaaaaaagcaatg

SEQ ID NO: 20074 - DNA, 3003 bp, Unknown
  misc_feature (1)..( 3003): 2750-1469P.txt file - cDNA_ID_1824297; gDNA_ID_1620707; Annot_ID_48919
ttctcaacaaattcactctttctgtactgcataccaagtaggagacatcaaaaaaccaaaactgaaggcatatctaagaagagaacccttataaagaatcatactcaccccatcatgacagccaagagaaaggtgaagaccgggatggatggttgaatggcagcagcataagtgggatttgtgtatgtaagaccgataagaaataacaactggttcccaaataccctatcaaaattgagaacaaagcagaggtggctttactgagatatttaacctctataaacatgaacacaagatattgagactggatagagatgatttcttaccctgctaagcccagaaagaagaatgacaagagaaggcttttattcattggagttctgatctttctacatacatgaaagacgaacactgttcactgattagattttgaaaacttgaacattcaaagtttgagagtggtctcgcttaaacttgacgcattacaacctcctaaaccattctttcatttactgatagaactagacaaccctagctcgagaaaccagatcctatttatcccaaaacccgaagaagagacatggaactcagagaacattatcaaagacattgtatctaaatctactaacagtggaagtaaacggaacacagatctcaacttaagtctaggcacattgctccaactctgaaatctagttcttctataatgcagatcacattgactttaaatcctcaggagaacttctacagattcatcagagaaaaacccaaaagcaaaatacgaaaatccatactaatggatcaggcaattacaaggggactgtgtatagttctcacttcatatataaacccacaaattgatcataaaaccaggaaaccattgaaacccatctcgagaattcagaactaaaaacagaggaaacaaaaacaagttgaaaaagaagagacctttcgcggaagtaagcaagaggagcgagaatagagagagcaagaagatcacggcatacacagaagacaagctggttgactccaacattaagagctactttagtaatcacatggtatccaccattaaagagctgaacaaacgccatagcagtgtgcgccatccgagcgtctctctccgccgccgatccacttccggtcaggatcatcggcgccgtcatctttccgatttactcggcccctctctgacttgtagttataagttatttctaaagcaaagactaaaaaagtaagatcctttacttcgttagcaacgaatctgcttcttctatttgtcgagtcctataggttctgtgcaaattttcatatacaatatctaggagatttaattctcaaatcgatctacttttatttgagtctgtatcattttatcaaaatatattcgtgtattattaaatctggttaggacatcaggctcatactcataggctgcctaatttaggcattaaaaattgaattttcataagtattttgaataaaccatttgactcaaattttaattgaaatacgttaaaatttgtaaataaagtaatcaaactagggccagaataaaatccgaaaaccgaaaaccgcatccgacgacttcaaatcttcaaaactgctcctctcttctctctttaaaatctttcagagaggtaatgttaatcatcggttaggaatctcttccgggttttcccggatctgtaaatatctctctttgtaagatttaaataatttctgactctttgtcggattctgaataccggctaagttcggttttttgtttctcgcttctgcgagatagatctcttcctttacgcggattgaagactctgttttactttaaatctctgccaatctcaccaacatttcgtggagtaatatcttcatcaattccttatgcccatagagtatggagcaaagaaccaactacatcaaatttggtgttgtcaatgatggagctttcctggagtttggatatgctcgaagatttttgaagccaatcctcattcgacccagagattctcgatgtcttagccttgggtttgagatcaccagaaggccggaggttttttatcgctatttggccgattgacggtggatcatcggactttcagcggcggtcggtaatttcagcggtggagctcaatgcctagacacgtggcgtaggatcgtgatacatcgttgatacatgatgtggatcgcgacacgtcatctgcaagtgtcattaaatcaatttgcgttaatgtttatcttttcttagattgattttgggtctgggcctaacttgctgtattcctctatggacttgtgtaacttgcccatttgggatttaatgaaataagccgacaaaaaaaaaaaaaaaaactggaaactgtaaaacgatatgaataatctggctccgaaaccgaacatataaagaattctcctatccaaattaccggaaccaaattcgactcgaatcaaaaaccgaacgaatatctgctaattcgaaataaaattatatatctaaaaatattagttatatttagttatactttatacccaaaaaatactaaataactaaaatatctgagataatttttatatccgaaatttttaagttatatttgttataattatacaatattttgcaaaattaaactaaattttagtaaaattaaacaatttttttgttttttctctctcaaaaactgatccaaaaacgaatcgaatccaacaccatccaaactgaaaccaaaccgaataatcatataattcaaacggataataaactccctcatcctgattattcgaatccgaaagtattcgagctaaatccgatccaaaatccgagtacacaagcttaaatcaaacaatagaaataaataactaatcacagttgcaaattagatattttttgaatataaagtttacaaattgaaattataaagaaacggagggagtaattaaaattaaattgaggtatttcaataaccaaaaagcccatcattgggtaaatcttcacatcgggacatg

SEQ ID NO: 20075 - DNA, 3003 bp, Unknown; identical to SEQ ID NO: 20074
  misc_feature (1)..( 3003): 2750-1469P.txt file - cDNA_ID_1824297; gDNA_ID_2926173; Annot_ID_140202

SEQ ID NO: 20076 - DNA, 3003 bp, Unknown
  misc_feature (1)..( 3003): 2750-1469P.txt file - cDNA_ID_1824305; gDNA_ID_1620707; Annot_ID_48916
caaaacaaatcgatacatggataatggggttattggatatattgtagccaattctatacggatagggagccctacgtttccacaaatatattgggatggatattaaagcattttaaaaacttactgaaaataaacattgaatattatatagtcaatcagccatcgtcatggggttagaataaaacaagcactcctttcaagttgatgctttgttttaatcaaacgtcatgatcccaatactaatattcccattttaacgtcacttaataacgtaattaagtcaagataatttacgattgatttttttagcataagtttaacctaatcttcaaattatgttgataatccccgcttaagttcttctttattttaatcaagtctactaaaactaataatgtattatgactcgattgccttgataaaaaggtaaaactgaaaagcacaagattttctcttctcccacctaacttttggatttctctattgtttttccacaaggaagacctaaatttcttagtttaatggatgattaattgttttgccaaaaaaaataatatcacaatggccaaccatgataaaaatgactgaaaagaaaaaaaatcattctatgataattagctaaaagccatttgagcaccaaaatataatctacagcatgtatttgtaaataattagtacgattatatggatttgattaagtaagagaaaacatttattcaaaacgtaacataattatttattaatggatcatatgtgtgttattcacgtggttgtatagtaacgttattgcgtgaaattcattttatatgcatacttgttggaattcaatacgtactgcataagtgcatagatatgccaatattcaagtgccaatgatgattgtgccgtgttcctaccaatcgttgtggatgagcatatataccatccacttacgagtaaattaaaaagaggcaaaaaaactattattggtttatcttaaatcgtttcatgtaattttcataagattcgtctatcagaatcgaatcttattaaaggaaaccacttaagaaatattaaaattgagtagacaaactaaaatatatagcactcgtaaaatataattaagacaaggagcaacattatccagttttctttatacatgggatctgcgggaatatatgcttatgttctggaaaaataatggagtaattgagttttataaaattgcgtgaacctccaaaatcaatgtatcaaattcagatccacataaaagttatcaacataatcaaaattatctttcaattatattagtgcttccaaattcctagtagtctaaatatcttgttctttgacaaaaaaaaaatatatcttgtaggttcggctttgaggaatctaagaaaattaccggacccaacttaagatatattagtatttagtgacgtgtaaaactaataccataaaaataaaatcaattatggtgatttagtagaatataaataaaataatgttaagtagaatttaatgatgatttatgatatggccaaatgaattaacttataaaatagttaaaaagttgttttgtttaataattgaagaaaaattaagaaattatttaatagattggtaaactaatttatctaaatataattttcaaaaataatataaatgatataaaactttggctaccaaaattgaactagtcctctttgggttggtttgactgtttgagaaaattgcttcttacagtttagctttgttgtctatgcttggccttggctgatcgacaaagtgattcgcataatcgcatcttttggatgcaaagacaaataaagatatactccaaaagatgcgactataacattcttttcaatattaacgctactttatcatcaacataaattacttaatcaacaaaacatgaaaataaggaacaaagctcgaaacgcaacatgcactacggaaaaagaggaattaaaatgaacatgtctacaatttgtcagtgaagttttggatgtttctactatgatatggcttgtttcatgcctaccatatgataagtgttctcgtgattctcgctttatttttgcatttttttcatttgtttgtaaatcacttattattgttgtttttcattttttttttctgcgtttggcgttttactggaactttaagttacagaaaacatgaatagggaaatttgttaatatgtaactaaggttagatattttgtaagtgacgtaataagtaaacagattattccatatcatttgtattataaaaatatgaaaattgtggtataacaagtaattttttaaagtttttttttcagttgttttatgttgctttccaaaaatatattaacacaaaaaggaggcaaaaataatctttaaggaaaaaaaaaactttttttaggaaatttttgaagaattaataaaaataaaagaccatttttcatattttcacttaattaaattggcttaactctgcaacaagtgtcgtcatcagtccttttaaaacaccttgtatcttccttttaccaaatccgccattgaagaataagagagagagaagagaactactcagatataaaaaccctagatttcttctcttaaaacccacatcgaatctcaactcagaaccaacaatgctccaacctttctcttcctcctctgttttctcgagaatcctctggactttcttggtttaagaagattcgttgttgaatcagagagaaagaaagcatccatttttctatcattgcttgcttgctatggaattgggtaaatctcgattctacttatgttgcaattgcttttctcctgttagattttccgattattctttagctggaagtgattatccagacgccatctccatcactttcaattgtattcctataccttcttctgaagattcttcgtatttctcgattcgatgtttataaacttcaaattctcttccaaatcttgaaacgaatttctcccaaaaatctctgtttcttcacaaaaaaacaaaaaaacaatg

SEQ ID NO: 20077 - DNA, 3003 bp, Unknown; identical to SEQ ID NO: 20076
  misc_feature (1)..( 3003): 2750-1469P.txt file - cDNA_ID_1824305; gDNA_ID_2926173; Annot_ID_140199

SEQ ID NO: 20078 - DNA, 3003 bp, Unknown
  misc_feature (1)..( 3003): 2750-1469P.txt file - cDNA_ID_1824313; gDNA_ID_1620707; Annot_ID_48914
ttcacataatacaaatctttagcagatatgcccattatctcttcaccagcctcctggaatgctgtgacgcaagtaagatctgtatggtcctgtatctgaagctgcagtatatacctgtagtcacattcatcaacgcttttatcacacttttcgcaccgccatgtcccatctccattgtctgttacctttttgctgcatggacgatcaccgttcatgataggacaagctgtgtagcagaagttatcaaacttcaagtataaaattgtggcactgactgtgatccagtctggtttttcggaggttcctagtttctcatctttaatttgagatattgtcttacgaacatctactttgccactgccggaaaactcccgagataaggagatacaagggacactctttccttctctctcaaaccagttcttcagtttctcagcttcaacaaaatctgggtcaatgaacagctgacttgatccaatggtgctcactgtctttccattaaattcactaatcctgcccgccttaacagcaagaaccggaaacacaccagaatcacaaagactttgcagcctttgtccttctgcattgcagaagtcaccccacatagttacctcaacacttcggcctgacatatccttcaactgaagtgatcttttcggtgttgcagttccgtttttcctcgttattgttacagtaggactgatagatgacacaataccaattacatcaacgatgcagttattctccatgctctcaatatccccaatggtacggaaatggaactgatggcgcggaattgcagcatcctcttcatagcattgttttatagttgatgcattatccagcatgatctcgtaatcatttcgaagatgattaaagttcttttgtgcaggccgcaaacttcccctcgagataagataaagattaccaacaacaatctggtcatagaattgatcagccacagcgttaaaacaagtaacacgtatttctccgccatcagcatcaagaagatcaaagttgaacactttcccttccccacggggattactgtattgcttaagtgctgctttattcgtgactctggccttgatggtccacctacctgaatatggactaagagcattaactggaattatcttaggaggtgcttcattcctagccactggtcccctgtttgcatacatcggtggtggtggttgaggctgatgaggataacttgttggaggatcacgagcatagtcctgcctagtgactccattacctgaagacggattgctgtatgcccgagtggaaggtgttgttgatgcaggaacactagaaccagtaccaccaacctgaggtgaaatagctgcattacttctccctggctcgatattgtttacttgacggataccactaccttgttgctcagttgtattaaacttaataccagaatctgctccacgttgatcattatgctttcctcctggaacaggatgcccgataatatcagaaatctgttttaacacctccagttgcggaacaataacaatcctggcatcaaaaacaaaactttataagattatgtgaaattttggtaatgtagtctctaacatgaagcaactatcattggctatatatccaaacttcaaaatcatgttcacaaccaattaccttcgacccttgatgacatcaccgacgaaacgagtaagtctaacaatagaaccgggttgaagagtcccttctttgacaagattgttgagatcagttcctagcattccttgatgcaagtatgtcccatcagataacaccatcctaaacctctctcttgttggatcttgttgagccataatctgcttcaaatccgtcacttgcaacaccggaatcatatctgcttcagtcgtcacttctccattcattatcttcccgattgctcccgccgtcaaacttacctccatcattacagattgacactaaaacccaaattcaaaagcgttacaaacctcaagaaaatttggataatcagtagaagcaattcgagattcgaggaggaaaagggtgaaatctttataaatgaattcaaaattgaggagacgaaaaacgatttgtttgaattgacagagaccagaggttgaagaagatgaaggatttgagattagcccctagagtgaaaggtggaaactttacgctccctttgagagggaaactaaagaaggagggtttcaagaatttggaaatcacaatcgagccacgatttggtgttattacggatctaccccttcacaaaattcccttacaagcttcgttaagatgtagactggtaaggctcaaagcacatatataggcccatttgaaggcccaaaatggcaagtaaacgaacatattacgtggaagacgtggcaagtgtactgctgagtcagcaatctctctccatcacattcacattgatcaaccctgtccgaaaaaattattttattattattttttgttgtaattgcatttaacacactcgcatcatagtcaaagactcaacgcggaagggaaaaaaaaaaaaggcgcaattgaaagaaaaaaattgataatcggtaagatttgatgtcccggcgtccgtcgttttgatcaccgtgagaaatggattcttcgaattgttgttctgagtaaaactcactcaccgtcaccggagaagaaagtgtaaatggattccgaagaaacgacgtcgtcggtaacgactacaaagaagcaaaagagggttttctcttcgttagctttgcgattccgtacagtgatagttttctcgatcattagcttcgtcgtcttgtcgtttctattaggaatcttagtgattttcatcggtgaattgtgggtttattcttcttcatctgcttctgcttctcttcattctcgctgcaaaattgtttccagctgtaagtttaaagctttgattctatttactttatcatcaattgattgcagaaattgataggtttcttgtgttaaatgatctcacttctaatgattgaaatg

SEQ ID NO: 20079 - DNA, 3003 bp, Unknown; identical to SEQ ID NO: 20078
  misc_feature (1)..( 3003): 2750-1469P.txt file - cDNA_ID_1824313; gDNA_ID_2926173; Annot_ID_140197

SEQ ID NO: 20080 - DNA, 3000 bp, Unknown; identical to SEQ ID NO: 4458
  misc_feature (1)..( 3000): 2750-1469P.txt file - cDNA_ID_1824332; gDNA_ID_1971812; Annot_ID_58142

SEQ ID NO: 20081 - DNA, 3000 bp, Unknown; identical to SEQ ID NO: 4458
  misc_feature (1)..( 3000): 2750-1469P.txt file - cDNA_ID_1824332; gDNA_ID_1620707; Annot_ID_48905

SEQ ID NO: 20082 - DNA, 3000 bp, Unknown; identical to SEQ ID NO: 4458
  misc_feature (1)..( 3000): 2750-1469P.txt file - cDNA_ID_1824332; gDNA_ID_2926173; Annot_ID_140190

SEQ ID NO: 20083 - DNA, 3000 bp, Unknown; identical to SEQ ID NO: 4466
  misc_feature (1)..( 3000): 2750-1469P.txt file - cDNA_ID_1824336; gDNA_ID_1620707; Annot_ID_48904

SEQ ID NO: 20084 - DNA, 3000 bp, Unknown; identical to SEQ ID NO: 4483
  misc_feature (1)..( 3000): 2750-1469P.txt file - cDNA_ID_1824344; gDNA_ID_1620708; Annot_ID_48946

SEQ ID NO: 20085 - DNA, 3000 bp, Unknown; identical to SEQ ID NO: 4483
  misc_feature (1)..( 3000): 2750-1469P.txt file - cDNA_ID_1824344; gDNA_ID_1620708; Annot_ID_165387

SEQ ID NO: 20086 - DNA, 3000 bp, Unknown; identical to SEQ ID NO: 4483
  misc_feature (1)..( 3000): 2750-1469P.txt file - cDNA_ID_1824344; gDNA_ID_2926210; Annot_ID_141955

SEQ ID NO: 20087 - DNA, 3000 bp, Unknown; identical to SEQ ID NO: 4480
  misc_feature (1)..( 3000): 2750-1469P.txt file - cDNA_ID_1824360; gDNA_ID_1620708; Annot_ID_48942

SEQ ID NO: 20088 - DNA, 3000 bp, Unknown; identical to SEQ ID NO: 4480
  misc_feature (1)..( 3000): 2750-1469P.txt file - cDNA_ID_1824360; gDNA_ID_2926210; Annot_ID_141952

SEQ ID NO: 20089 - DNA, 3000 bp, Unknown; identical to SEQ ID NO: 4479
  misc_feature (1)..( 3000): 2750-1469P.txt file - cDNA_ID_1824368; gDNA_ID_1620708; Annot_ID_48938

SEQ ID NO: 20090 - DNA, 3000 bp, Unknown; identical to SEQ ID NO: 4479
  misc_feature (1)..( 3000): 2750-1469P.txt file - cDNA_ID_1824368; gDNA_ID_1620708; Annot_ID_165376

SEQ ID NO: 20091 - DNA, 3000 bp, Unknown; identical to SEQ ID NO: 4479
  misc_feature (1)..( 3000): 2750-1469P.txt file - cDNA_ID_1824368; gDNA_ID_2926210; Annot_ID_141948

SEQ ID NO: 20092 - DNA, 3000 bp, Unknown; identical to SEQ ID NO: 4479
  misc_feature (1)..( 3000): 2750-1469P.txt file - cDNA_ID_1824368; gDNA_ID_2926210; Annot_ID_202563

SEQ ID NO: 20093 - DNA, 2037 bp, Unknown; identical to SEQ ID NO: 3918
  misc_feature (1)..( 2037): 2750-1469P.txt file - cDNA_ID_1824374; gDNA_ID_1620674; Annot_ID_48214

SEQ ID NO: 20094 - DNA, 3000 bp, Unknown; identical to SEQ ID NO: 4477
  misc_feature (1)..( 3000): 2750-1469P.txt file - cDNA_ID_1824374; gDNA_ID_1620708; Annot_ID_48935

SEQ ID NO: 20095 - DNA, 3000 bp, Unknown
  misc_feature (1)..( 3000): 2750-1469P.txt file - cDNA_ID_1824374; gDNA_ID_2926210; Annot_ID_141945
ttccccatccatagccgcaaatatgagagtcttgactaaatctgattagtaatttgaataagtaaagggtagcaatgattcttgtcatagttaggccaagcttcgtctcctttcacaagcgtctcatggcgcttccaaacttgtgcatcgtagttttcagttaaaatgtagtgtaaaccaatgtccttaatctccttcatgaacttttccaaggagtcacctctcttaggactgaaaaataatgcttcggaggcttttttggctttaagcagcatcttgatggttctcgcaaggtccttatgaaattccttgaaaaatgtactgttgaatcataaaaatatgtgtcatgataagggatgagaaaaaaacatatcgaaaaagcggaagactaaaatggagagcaaggtaccaatcgcttgcaactatgatgtcgaaagtgttggttaactctgaaagttgatgctgattccagtgcaactccatggcttttacgcttgtgccaccaaatgccatggagttggtttctatgttacgtttaatatctggatgttaagtacatcaatgaatccaaaacgttttgagtaccgagattccatatctcaagggtttcagccatagaagaagacaattctaatgaaacagtatatgcacaacacaaaaacaaaacatgaaggatacaattgactacttgggggtttccatcggagattaccacttctgatgcctcggttgcagctgcaataactaaaccggctaatccataccctgatccaagctcaattactcttttacctctgcaacatcccaatgagccgagtaaaattaagtagacgaagttataaaagaacaaagaacacagatgcaaatcagtcttaaacctgaaacgttctggctgagacttgcaaaagtaggctagtacttcttcagagggccactgacctggaaaacaacgacagtatgaattcagagaatcacaatttagatagcattagagttccctaagcaactaaatcttttttattcttaacttgtttgaatcatggttaatgccacgttgtatattgacagactaaaagtttaagcagatatagtttggttagcgattgtatcagccgcaaacaagccaaatacacagagcagagcagcaacattgtactactaagtttcaaaaccaacaaagacactaatttatgtgacaagtagagagatacagtgagattgagaacttacagacaagtccagtattatcaatgttgtatcgattagatatctcgaagtcattgagatcactacaattatccactctttgtctgcatatattttaaagaagctcttaggagtggcaaatctatcgaacaaaacataacattgtttcatttgatgaaaacttcagatcaaaatcctaacgttagatagagtttgggagagccagtgatgggaagtgtgtagcaaacggatgcttcacgagacttatccgattgaggagaagagtccaccacttgacaaggaatcaagttgaatccttgagttgctttccttgaaatccgtttggtctcagtttgagattgagaatctgaggaaaattgaaagatgatccattagctatgcgaatgtgtgaaatcgaaaagtggatgcaggaaggagaaggagtaggggagtatcaaccagatctacggagaagcgcttggcgaagaattttccatctaagagcagaggaagaagaagaagtgggatccattgaagaatcgttatagctttctccgccggaatctgaaatttctcttgcagactaaacagcaaaacagggaagatgacgatttcgcttcccggcgaactttagtttggtttttttgcctttttaacacagtactttttgggggtcaaacaaagtacagtgaaaattaaattgtcaactgtaaagtacagtaacatttagattctgatctcactgatgttaattattttaaaattgaggacttgttttgtaatttaatattaaaagtgacacaagatgacaacacaactgctataactcaaaagtcaaatgacaattgtcaagggataaaagctgtatgttagaaataaatcttattcactctttagatttggtgcacaattttttttaaaatctatagattttcttaatcttacttatttatacagttttaattactctaaaaactctattgattttttttttgacatctaaaactctattatttaattttcaaataattgtacttcatagagtgatatgagattatgcaattgatttcttcttaaacaaaatagaaaataacatgtgacagaatattatgtttttagtagacatatatttttatacaaaaaatagtataagtgttatatccctttaaatcttattcttatttttatacaagaaaaaattttcatcatcataattgattataccttttaatcattttttttgccttttatgttttctaatagaaaaaaaaaccaaagttttcctccatggtttaggtaagatcctactgttaaatagaatttcatttggcaaaacaaagtcaatacagattaccattatcatagtcaattacacatcttaattacttgaataattcttgtttagtgtgacactaaaaaaggtggcaaaacaataaacaaatgtacaatatacactcaacaaaaagaaattttggatataaacaaatttaatatttggataaagcgcgggaaaatctcctaaaatagttaaaaaaaaggttaaaccggcccggttcatagtcaaaaagtatgctcctcttgaaacacgcaacgcccacgtcttcctatctccgagactccgacagcaaggttacttaacagttaatcaaactagattcgctttcttccatcactaatcttctgactttttctatttctgccccaaatctttttcaaattcatataaataaccaaacacttgttcttcttcattcccccttcgtcttcctcctcctaaatcaccggcgataaatg

SEQ ID NO: 20096 - DNA, 3003 bp, Unknown
  misc_feature (1)..( 3003): 2750-1469P.txt file - cDNA_ID_1824383; gDNA_ID_1620674; Annot_ID_48210
accatcttttaaaataaaataaaaatctaaaagtaagaggtcgaatctatctgaacgcgcaatctccgccgtcaaatttggtagagctagtgaaaagtggtcccacgtctccgataatctatgcttaaccaatcgtaacgtaccacgtatagcgattactttggtaattgtagcgtttagtgaaatcgttttggcgggcgtaattaataaattcaaaatcagagcccaaattaaaaacaaatcaaaaccctagcgcctctttttttgttccatttctctctctctcactccctctttgctcaaatcgattctccctcgcttatcgccatttctccctcgcttatcgccatttctccctccattttcgctctctcgatatcgagcttcctctttccgcctatcgaatctctaatctgaagctgtctttctcgatctggatgtttatcgaagaaggaggtctctgttaatttaggtaataatcattctccgtgacttttttttccttttcgatttctagggtttaaatttgctcgagattctccaacttctttgatttgatagtttattcaagtgtaatcgattgaatgatttggctgaggtttaacttttcaatttcgttatccatcagttaatcgttttttacccagctagagcaaagtctgaagaatctggacttttcgatatctaatttatcataatttattgattcaattctggattgatgattttcatactgctttcactaggtgtatagggaaattaatctattgggaagtgttgtagtagctgttaggaggataaagaaggcatatggggaaggtatctccaaaggatttggattcaaaaacctcggtgaggaaaaagaagttgaaaagttcaagtaacaagtatttaaagccaggggctttggttcagctttgttacagcaaagcatcggctgctaagtcatgtaatgaattagggaagaaacgagtacctgtgtttgatactaagtcctgcaatgatttggggaagaaacgagtacctgtatttgatattaagcatgcgaggaacaataaaatggcagtggaacagttgaattctccaaaaagccctcttatgttgtcccctgtcaacgttgttaagcggagtactctggtgaggccaatgaagtttgatgatctgcaggtggagagtaataatacttgtaagaaaagccctttaatgttatccccaatgggtattgttatgcaaaacactctgttgaggacaccaaaaactccccaagctgatccttgcgtttcagaatcacagcttgagtctcttcccatggatttactggtaagtttttcgtttacatttaagttaataggttctttttggtagtcatctgaatgtatgaagttagttcttataaagatcacactttctgtaacttccaggttaaaatagtttgtcatctgcaccatgaccagctgaaggctgttttccatgtttctcaaagaataagaatggccgtatgttcttctttcccctgtttaagtttgcatccataaaagctcaattttttgcagttttacttgatgtgtattaatctgttttgacttttctttgaaacagaccatacttgcaagacaatatcatttcaattatacaacaccagaccgctcaagacaggaaatgttgagggtcatgaccccagttccaataaatcgttggccatttcgtaggtacatgttttacttcaacttttacccttttgaaaagagcatcaaacaactcgtttggctcataacaaaaccttctttgatctaaattagcagaggagatggaaacccaacaatggtgtcaagcccacatacccccaaagcaccaaaacatgctcctagaccaccctctcgaaccaaactcgcggagatgaagcaaatcactgctgttcttttccaagaccagacaccatttccttcaagatgcatcgttccttctgttctccagaggccgactttgttcaaaccaatggctccaaagcaccctcgagtgctcttctatgaggatgaactatgtcaagctgttgctcaaaacaacctcacctgattacacttagctgcagtcatatcggtttcctctctctgttgatagtaggttttgtcttcattgcataattgatcattgctcttgatgatcatcattacctatagtaagaagcatgcaagttttgtagcagtgctagttcagggttttaggtttacatgggaatctcctagtatcatttaaggggttttcaagtttttactctcttgagtttgtcataataagcgtctttgatttggtcagttgagtcttgtgtatattttctgcatatcttatctggatcagttgcttttttttttttaatataatttgattgcttatccttgctttcatcttattggttattgagttctccaatttatcgtaccgcgattcaaaccgtacttaaatgttaaaccggatattattaaatcgattgaactgaataagattcggttcaagtttggttatatttttcttaaggcctctgatttagttgggcctatttacgatcttacaagcccaaacttattgccgaagatccattattgaaaagtctcgacgcgtgtaagcttactatatccctgttgccaaacaaggcttttgtcccttgtagggccaatcctttatttggctataaataaaggatgtatgtcttctaaacaaacactttttctaatcggagagcttcgaagggttctgagatctcgcggctccttcgatcttctccgctcaactattacctccgatcgttggcttatgtctactgtaacctcttagatttgattttggcgcgttattagaaacccctaacatctttaaactcactcgaggtctctcgtgatcgatctagggtttcgcgagatctgagatttcatattttccgattcaccttcgcaatccaattttttttgttgcttggattttgtttgtgtgtaatcgtgtggtaagatg

SEQ ID NO: 20097 - DNA, 3003 bp, Unknown; identical to SEQ ID NO: 20096
  misc_feature (1)..( 3003): 2750-1469P.txt file - cDNA_ID_1824383; gDNA_ID_1620708; Annot_ID_48931

SEQ ID NO: 20098 - DNA, 3003 bp, Unknown; identical to SEQ ID NO: 20096
  misc_feature (1)..( 3003): 2750-1469P.txt file - cDNA_ID_1824383; gDNA_ID_2926210; Annot_ID_141941

SEQ ID NO: 20099 - DNA, 3003 bp, Unknown
  misc_feature (1)..( 3003): 2750-1469P.txt file - cDNA_ID_1824387; gDNA_ID_1620674; Annot_ID_48209
tccatacatatgcatacgtgggaagggtagacattggtagtggtggtggtggtcctggtggactatgactactacgccctctatcttttcgagagtgcctatataccatgcgttttactctatatatgtaaccatttcttttttccaaaagtatattactgattttaacatttaaatactagtttttataaagtgttttatactgttatagttgctccatgacggaaatgatcaaaatgtttacttatataaaccttgtaaatgtccattcgattcttcttttaaaacaactcacacattacacacacaaaactgcaaattaaactccgatgctaatcaagtccaaacaataacataaccttttttttgtatgtactctagtagtttgtattaatatttgttgctttatatggattagtgaattgtatacgatataaatcaataacataacaaaaagtatcaggaatacattacactaaagttgatgtcaactacccatttgcactatagatcgtttgtctagtgctgtaatgtattttaaaagagcaagtagatcacatcaaatttgttctttaaacgtagtgggaatgtatcatatacacgcctataaacggttttggtatatatgagtgtgttttactatgcaacaaacaaactaagttaacctaatttttgtaagcaaaatttcaaacgaactaacacaacatgatctatgtaacatgtcataattgtaaaagtaagagaggagacgtcttattattggaggtaaagaagatagacaaactgttgttttagtcgttaggtgaattgtctccatgtgatttagttgggaataatcgtgcttcttactttatgttaaaaaatatgtctcgaaatgtccttatctgtaacaataaatgggacagctaaattttccatacacatttaaaaaacaaaatatcactactaaaacctaagtatttatacagtacttttaactaatttttgtttggggttatcgaatgtctaacactttgtcggaatcacatctaaaaaaaaatagtttaacgaagaaagtacttctcagaatctgcattgcttctgagcacataaaataaataactaaactataagcatcaacacactttgtacctatctttttcatttttcaatgcttttaccaataccgtttatttttccctttctcagttagtttccaatacaaattaagttaaacctagactaatatacaaattatatgtgtcgatcaacattactattgtttataatttgataaaacgactgtatattattacaatcatatattcatatgcatttacaaacacttattatatactaaatacaatataacttcataaaataaataaaaagttatgtgctaatcaactaacctgtaacatatactaataatagctttaaataaacacatttaatatatgctaaaatacgaataaattatacccaatagtaattatttctgtaatttaatagcagctattaagttccagtttttttaaaaaaaatttaaatccaaaattgtttaaggttgtgtttgcacaaatggattgttactttaaaactttaaacaagaacataaacccatcattatacaaatgggctgaactaattgattagtaagcccattctatttctcacgtaactcagttattgcgttattggcccaaaccgaaatggacttttcatagacaactggtactctcgtcgtctagctgtgcaattaaagataccagaccaaaatacccttcacgtgatacaaacaacgagaaaaggaaattaataccaacacgagaaaaaatggaaattcagatttcgttttgtgatatatcgaaaagcttttagttatatagtttccaaaattttgaatctattcactcaattaataatccagtacgttattaatatcctatagagattaaaaaaaaaactcacaagaaaagccactctcgtaattaataaggcgtgatttaggttaatagtgtccttttctaacattcaatttaatcatgctaagtaccccaacattggacccgcacttcatagctcatactggaaattcctaattacccttcattcccaaagcgtaaaagcccacaaggataaggatacaaacgtcattacacgaaatgattaaagaataaagtaaaaaagaaaagtcgtactactacttaaaccatcttttaaaataaaataaaaatctaaaagtaagaggtcgaatctatctgaacgcgcaatctccgccgtcaaatttggtagagctagtgaaaagtggtcccacgtctccgataatctatgcttaaccaatcgtaacgtaccacgtatagcgattactttggtaattgtagcgtttagtgaaatcgttttggcgggcgtaattaataaattcaaaatcagagcccaaattaaaaacaaatcaaaaccctagcgcctctttttttgttccatttctctctctctcactccctctttgctcaaatcgattctccctcgcttatcgccatttctccctcgcttatcgccatttctccctccattttcgctctctcgatatcgagcttcctctttccgcctatcgaatctctaatctgaagctgtctttctcgatctggatgtttatcgaagaaggaggtctctgttaatttaggtaataatcattctccgtgacttttttttccttttcgatttctagggtttaaatttgctcgagattctccaacttctttgatttgatagtttattcaagtgtaatcgattgaatgatttggctgaggtttaacttttcaatttcgttatccatcagttaatcgttttttacccagctagagcaaagtctgaagaatctggacttttcgatatctaatttatcataatttattgattcaattctggattgatgattttcatactgctttcactaggtgtatagggaaattaatctattgggaagtgttgtagtagctgttaggaggataaagaaggcatatg

SEQ ID NO: 20100 - DNA, 3003 bp, Unknown; identical to SEQ ID NO: 20099
  misc_feature (1)..( 3003): 2750-1469P.txt file - cDNA_ID_1824387; gDNA_ID_1620708; Annot_ID_48930

SEQ ID NO: 20101 - DNA, 3003 bp, Unknown; identical to SEQ ID NO: 20099
  misc_feature (1)..( 3003): 2750-1469P.txt file - cDNA_ID_1824387; gDNA_ID_2926210; Annot_ID_141940

SEQ ID NO: 20102 - DNA, 3000 bp, Unknown
  misc_feature (1)..( 3000): 2750-1469P.txt file - cDNA_ID_1824391; gDNA_ID_1620674; Annot_ID_48208
catgttgtgttagttcgtttgaaattttgcttacaaaaattaggttaacttagtttgtttgttgcatagtaaaacacactcatatataccaaaaccgtttataggcgtgtatatgatacattcccactacgtttaaagaacaaatttgatgtgatctacttgctcttttaaaatacattacagcactagacaaacgatctatagtgcaaatgggtagttgacatcaactttagtgtaatgtattcctgatactttttgttatgttattgatttatatcgtatacaattcactaatccatataaagcaacaaatattaatacaaactactagagtacatacaaaaaaaaggttatgttattgtttggacttgattagcatcggagtttaatttgcagttttgtgtgtgtaatgtgtgagttgttttaaaagaagaatcgaatggacatttacaaggtttatataagtaaacattttgatcatttccgtcatggagcaactataacagtataaaacactttataaaaactagtatttaaatgttaaaatcagtaatatacttttggaaaaaagaaatggttacatatatagagtaaaacgcatggtatataggcactctcgaaaagatagagggcgtagtagtcatagtccaccaggaccaccaccaccactaccaatgtctacccttcccacgtatgcatatgtatggagacttgccaaaacccttctaagttgtaatctggataatcataaaacaaaattttaagaattagtaaaacttatcgcttgaaatgtatagaaaaatagtaatactattaagttttgtgcatttttcatatcttaattttttgttttttttttgtcaaccaagatatgtaaagataaattatatttttgagggtttctttgtttgtttgtattgttatcttttggtctcatacttatgaaagaacactattagtttaccgtccgtttcgccagctgtatagaaaaacaatcatggtaatccacgtgcagcaagaataatatgggtgtgaaactaattaaactaaagcatatgtatattgaacaaaaaagagcataattacaccataactgcaattcaaagacaaatcaatttcaaccgaaaaagggcctaaaggtgaatttgtgacgctttatttctttaaccattatcattatagttactgcaattcaaagacaaatcaatttcaagcgatcacatctcatttttttttatcccattatgtttctctgtttaattattttaaacatgcaacatttccatactatgctttcttcataatccgtcttacattaacatggaatcacaattatagtctaataacaagtatatgacctatcaagctaagttagctttactctcaacattacgaacgccaatacgccacctgcaagttttcccgatcaggagtttcaaaattctcagtggtcacacggatatacataaactttagattttagccattggaattgttcatatatacatatacaacttaaaacaaatatcaatatttgacgtcgttgcgccttatattacgacgaaaaaattacattattcgtttcaaacgaagtcattttatgccgacaaccaataaaaagacaacaaagtcacatttttaaaatttttgtaagacaatacttaacaggaaagtgataatctcaacggctttttataatctcaaactccaatatattattaaggtatcattagtcctacacaaaggttatttatttagcaatgtcacgtatacccatcaacgtgtaacaaactacattaactacttgtagctagaatttatgaaactttatggttaataaataaaaacagaaaagtcaccaggggcacattggtaattagagagagttttgctgggcctatgggtaaaaatacatggagaaaaaagcaggatgggggggctcttgagctccgacgagtggcaagtgaagaaggtgtgggagaaagaaagctaatgagagaaatacataaatcgacaaaaacaaaccgtcttctcatctctgcctctggatttaactctcccttcacagttgcatagaatcttcttctctgctcatattttgaagaaatctccaggtggttttgcattttcctggaaacgtatctctgtaattcctagacttgagtagtgttcttcttcttcttcaagcattttccattttttttttgggtaattttgttatagtatatagaaatccgtgaagagaaaaagtatatcggttgtcttcttcattgccatcatgtgagcattccaatattgtttcctctctctctctccatttttttaatttacttaaaagttttctgtgattttcaatgtcttttttcttccacttgacttgactctcggcggaggagtttgtcgccggcgaattgttcaaatcgtcggaggttgaaactgttcatatttgtgctacttttactttctggtctttgaattttactctttcgctttcgtcagcttcaagtctttcaaagacaaatcatctttagggattttcttaaaaaaaatttgtttgctttattggtgttgaagatctttgacgtagaaagcctatagacctggagaatctctttgattggtatcttatggactctctttttctctttgttgcttttgttgtcgcagtcgaagaaactgctccctcttttagtcaattctcgcttcactccctcaatataatgcgatttctcaaccggaatatctgaatctctcggtggttacctctgatatatcgccaggaactgaactcctactcgatctctatcaacaatgccgtccttgtagaactttggatccaactctctgattccgtcaatttccattaatatcagctcagcgaaggtaaaatttccaacaatctcgataattccatgtttttggatcttcaagttatgtttcctgtgcataatgatgattcggtttctatcgaccaggaactttgagtagaagaagataatg

SEQ ID NO: 20103 - DNA, 3000 bp, Unknown; identical to SEQ ID NO: 20102
  misc_feature (1)..( 3000): 2750-1469P.txt file - cDNA_ID_1824391; gDNA_ID_1620708; Annot_ID_48929

SEQ ID NO: 20104 - DNA, 3000 bp, Unknown; identical to SEQ ID NO: 20102
  misc_feature (1)..( 3000): 2750-1469P.txt file - cDNA_ID_1824391; gDNA_ID_2926210; Annot_ID_141939

SEQ ID NO: 20105 - DNA, 3000 bp, Unknown; identical to SEQ ID NO: 3925
  misc_feature (1)..( 3000): 2750-1469P.txt file - cDNA_ID_1824395; gDNA_ID_1620674; Annot_ID_48207

SEQ ID NO: 20106 - DNA, 3000 bp, Unknown; identical to SEQ ID NO: 3925
  misc_feature (1)..( 3000): 2750-1469P.txt file - cDNA_ID_1824395; gDNA_ID_1620708; Annot_ID_48928

SEQ ID NO: 20107 - DNA, 3000 bp, Unknown; identical to SEQ ID NO: 3919
  misc_feature (1)..( 3000): 2750-1469P.txt file - cDNA_ID_1824395; gDNA_ID_1620708; Annot_ID_165362

SEQ ID NO: 20108 - DNA, 3000 bp, Unknown; identical to SEQ ID NO: 3919
  misc_feature (1)..( 3000): 2750-1469P.txt file - cDNA_ID_1824395; gDNA_ID_1620674; Annot_ID_164203

SEQ ID NO: 20109 - DNA, 3000 bp, Unknown; identical to SEQ ID NO: 3925
  misc_feature (1)..( 3000): 2750-1469P.txt file - cDNA_ID_1824395; gDNA_ID_2926210; Annot_ID_141938

SEQ ID NO: 20110 - DNA, 3000 bp, Unknown; identical to SEQ ID NO: 3919
  misc_feature (1)..( 3000): 2750-1469P.txt file - cDNA_ID_1824395; gDNA_ID_2926210; Annot_ID_202550

SEQ ID NO: 20111 - DNA, 3003 bp, Unknown
  misc_feature (1)..( 3003): 2750-1469P.txt file - cDNA_ID_1824402; gDNA_ID_1620674; Annot_ID_48205
attctttctccatgtgtttcggtcatgatggagttggaaggatcagttttggggacaagggtagttctgatcaggaagagacaccgtttaatctcaatccttcacagtaagtggtgattcacttatgcgctaaattggaaattctgttcctttgtggatggcacctttaagccgtggttaaattcattgttgcagtccaaactacaacatcacggtgactcgggtacgtgtggggactactttaatagatgatgagttcacagctctctttgacaccggtacatcatttacttatttggttgatccaatgtatacgacagtctctgagagtgtaagcatctaaacaccatcatattcgtgtttcttccgcatgatgctgagttttgataactctatgattcacattatcttcttcagttccattctcaggcccaagataagcgccattcaccggattcaaggattccatttgagtattgttatgacatgaggtatgagtttgtatctatccacgctcaatgtctatttttcattgtcactcaaatcttaacatttttcttgtaaacggtgtgattagcaatgacgcgaatgccagtttgataccgagtttaagcttaacaatgaaaggaaacagtcacttcaccatcaacgatcctataatcgtcatctctactgaggttatactctctgtctacttctttctctattgctccgtctcttcttcaaccaaatctgttatctgtgtgctgatactattagaatctctgcatttcctcagggcgaacttgtatattgcctggccattgtcaaaagctctgaactcaacattattgggcgtaagatcagtttttcttcctatcaatcatggaacatccgctaaataatgacattgtttactcttaatgaaacagaaaactacatgaccgggtatcgtgtagtattcgacagggagaaactcgtcttagcttggaaaaagtttgactgtaagtttcctcttacgtgtgttatatatcactaaaaccctctgtttcctaacttatgatctgtgaatatctcttaacgcaggttatgatatcgaagagacaaacacaactgttgccggaacaaacaaaacagcagcggtagctccagcaatggcagctggaataaagactcataacaattcctcagagctacacaaaacaaaccaaaccatctccaaaagtaactcctccccaaaccaaatatccaaaacagtagatgtatggtcttttttcagatttgtgttcatattacttccacttgtgtagatttgtaagccccatccaaaacacatgccaatagtattttttttgtatcataacgacactatagggattttttcaggaaatatatgctcttcatacgcatcttactatctttgcaaattctcgtcttttttctcttcaataatgaggtagttaaaccgagataaaccgaaccaaaagggaatttggctgtaatgttgaacgccgaatattctaaaggaaattaaatgggttccacattgataacctgcctcggcaagtggccaacgctcgacacttttacacgaccgagacaatgaatctttcattttttcgtcattttattctaaaattccaatattggttcgagtcttagatataatttttagtattggatttgaaaatacactcattaatcattgttaaatatactaaaatcactctgatagcattgtttagtatatcatcatatgataatgcatcgtttgtccatagttaaaagttaaaactgtattctataaactgtaaatcgtgtgataatgttaacatttacagactatgtatcaatttgattattaaaaagcaaccaacgactattatgaatatacagtagtttttggtgagtatgaatatacagtagtttgttaagatagttttgaacaaatccacatttttacgatcatatctcataataaccataaagccatatatacattgctatttatcatatccaatgactaaagtgaatattgttaaatatgctagtagtatttgttaacaaatttatcttatgcatatattaatattatatattagccttaacaacaaaaaaatctatgacttgattttttcccatatatactaattagaagattatgtaagaaataagaaaaaatggatactgtatccctgatttggaaaacagagattttaatccttctataaatattttcatttatttgcaatcttacaattacatatgttttatataatggtatatctattatagtataatataaattcaaaattaagtcgaaagttgaccacataacttagcgtttttctctcttcggaacttttttttttgtgtaatttaatttatacaggaaaattaatttaggggaaataaatgatttaattgtttgacctattttaagagaattaaaaaaagaaagatttttttatttttgtgaaaagattagatcaaatcttacatggtaattttctaatgtcaacgtcaacaatcctgccattagctttttggccaatcagattcatccaaccaaagaaaaacaaaagtgtgtttttttccttgtgtttacttcaagggtaatttagtaacttctaatatccgcggtagccaagtaaaaccaaaaccaaacgaaaaaaaaacaaatggaaagaacatataaaatcgaataaaaaataaaggagagagagagagagagaagagaagagaagaggagactacactgctccatcatcttctccttctggggatttttttttggaaaaatcgttctgttaccttttttttgcccattactcaaaccctaaccctaattttctgaaatcgcagagagagagagagagaggtttcttcgaattctttcatcatcaattcgctaactttgtttttttggggttaaatcgattaatcgttattttattagatactgtcgatcggagctaatcgactctctcttaacaaaccctaattttttggtcctctctcatg

SEQ ID NO: 20112 - DNA, 3003 bp, Unknown; identical to SEQ ID NO: 20111
  misc_feature (1)..( 3003): 2750-1469P.txt file - cDNA_ID_1824402; gDNA_ID_1620708; Annot_ID_48926

SEQ ID NO: 20113 - DNA, 3003 bp, Unknown; identical to SEQ ID NO: 20111
  misc_feature (1)..( 3003): 2750-1469P.txt file - cDNA_ID_1824402; gDNA_ID_2926210; Annot_ID_141936

SEQ ID NO: 20114 - DNA, 3003 bp, Unknown
  misc_feature (1)..( 3003): 2750-1469P.txt file - cDNA_ID_1824406; gDNA_ID_1971923; Annot_ID_177192
ctctcaacgggaatattcaactcaaaatacatggctttaaatatttgatttacccaaaatctctgtgcataggaagagttgcaagaacacacattcttcattagtggttaacggcaaatgcaaaaaaacgttataagaagatgaatatgagaaaacgaatgcaggaagttaccaagtgtttgggggcaacaaaccatttgctagcttacacaacagaaaactacaacgaatttgaagccggtaattgcaacaacagagtctccagctgaggccaaacccaccaagatttgtttcatcattgaagacataaactctttgactaattacctttgtttggaatgaaaacctgcaattttgaatgctagatgatcaatttgcatacctccaatggaaattatatgaaaccaaaacagagaacaagaagtttagggcgctagagaatatcatctctcttatctacctaaccagattgtttcatattcttaagacttcacaatttatcgaagtcatcataacatcaccaatcagttcttagacatgccaaaacctaaaaaagggaaaaattcaagaatgaaacaagaacagagacaatacctcaaactctggtacaagatgaatcaaagtcatcaggagcaacacgtgcaatccaattgtttaacgtccgcttaacatcagtatgattaacataagccaactcatacatactacacaaattcaccaccaagctctcgttcaaagccgcggttggcactctctccaatgcactttccatcaccttaatcgcatccgatagatctctcaagtacatcaaacaaagagccttattgttgacagcgataatatcagagttatccctttcaatgcatttgtcatactctctcacagcagaaacatagtcctttgccacaacataaaccaaagccttattcctaccaacaagattgttgaactgtatctcgttcaataaaccattgctctttccttcattcaacatcttctcaactctatcaaacgtagttttagctccttctacatcaccaaactgcatctgaacagaccctagtttcgaaatcaaaaccgggtctaacggatcacgattgatcaattccttcatcaaatccaaagacaccccaaattccttgtgacctaaatgaaaccctagcaagcaattcatcacaaatgtctctcttttcttccacaattccacagaactctctaaactctgagattctttctctctgattcgatctcgaacaaagtcaagcaaaacatataaacgatctaacccttcctgacgattaccaagcttagtcgggatcaaagcgtagagccatcgtaaagagaaaggaaccatagatcctctccgattagggtaaatctcagggaacgattcgtacctgtaatgcgtcccgtcgaaatcgtgcaaggaattaagctcatgagaagcttcatcggagcgacgaagcttcgcgagagccataacttggtaagtgagataagtgagatgctcgtgaggctttgtgaggaggaagagagctctggcttgagatatcttctcgaggatcgcttgccatgagccacgggtcgaaagctcgtggagcgagccgagatcgtgtgttaattcgtcgagcgaattgaatcgttccggtggtagatcggcgacggatgtgacttgggatgaggctaattcgaatgccgtcggttcccctgcatcggttgactctgccatggcggtggaatcagtggaggagggattgaattcgggtcgggtttcggattcgggtaaatccggatccattgctggagatgactccgtgaacattgtggaagtaacctggtttggtctttggatttgggtcgtctttccaatagataccattacgctaaattcttctttttggcataaaaatttagattattttttattaaaaaaaaacatttgatatgattatgattttaggcggtttattaagatttttttataattagatcaaaaataattagatcaaatactaaaattggaggagaatccaaactttggatttcatatattttattttttaattcactagaaatgaaacaataattaaatccaaaattacaattaacttgtctcggatcgattgatcaatgttgattttttgtcttatgacttttcttcgtgtaacgaaaggagttacttaaatggtggagtaatggtaataaataccatgttataatattgttacatactgataatattattttccccatgttacatgttacatcattgatttttacgtagatatttaatataacgaccaaaaaaaattaagctctgacttggtccaagagattttttctcgattcttaccattgaccctgagctaagacttgaccaaattaaaagtctatgtggaatgtactgcaataagtaagtctttttaattaactaaagaatttcagacctaaccccatatttttttcggataaggggtatgaacatgtaaattattcaattttctattgtaggtatttaaattcgagatttttaaaaaatgaaatgagtgactaactagctagttcaaaccgtaaaacctattattcatttaatgatttgattaagtattttgttttaacaatagtttaggctttaaaaatcttacaatcaaacatcaaaatataatgtggttttactacggaaaaaggaaaagcagtgtagaagcatcgaacatacttgacttttatgacttacaaaacacatgaggtacacagaatcatatactacaattttactttgctaataaaagtcgatgtattattattagaaattatcactaaatcgtagaaaagtgaaacgcgttttctctccagtttttctccaaaagacaaatgagttatctgtaaacacatgacatgcaatgatctatcgttatgtatatatgaattgattaatctcgaactatatattgaaatctcagcttcttatcttctttgattcttggagacacgattggaaaaatg

SEQ ID NO: 20115 - DNA, 3003 bp, Unknown
  misc_feature (1)..( 3003): 2750-1469P.txt file - cDNA_ID_1824406; gDNA_ID_2926254; Annot_ID_143095
ctctcaacgggaatattcaactcaaaatacatggctttaaatatttgatttacccaaaatctctgtgcataggaagagttgcaagaacacacattcttcattagtggttaacggcaaatgcaaaaaaacgttataagaagatgaatatgagaaaacgaatgcaggaagttaccaagtgtttgggggcaacaaaccatttgctagcttacacaacagaaaactacaacgaatttgaagccggtaattgcaacaacagagtctccagctgaggccaaacccaccaagatttgtttcatcattgaagacataaactctttgactaattacctttgtttggaatgaaaacctgcaattttgaatgctagatgatcaatttgcatacctccaatggaaattatatgaaaccaaaacagagaacaagaagtttagggcgctagagaatatcatctctcttatctacctaaccagattgtttcatattcttaagacttcacaatttatcgaagtcatcataacatcaccaatcagttcttagacatgccaaaacctaaaaaagggaaaaattcaagaatgaaacaagaacagagacaatacctcaaactctggtacaagatgaatcaaagtcatcaggagcaacacgtgcaatccaattgtttaacgtccgcttaacatcagtatgattaacataagccaactcatacatactacacaaattcaccaccaagctctcgttcaaagccgcggttggcactctctccaatgcactttccatcaccttaatcgcatccgatagatctctcaagtacatcaaacaaagagccttattgttgacagcgataatatcagagttatccctttcaatgcatttgtcatactctctcacagcagaaacatagtcctttgccacaacataaaccaaagccttattcctaccaacaagattgttgaactgtatctcgttcaataaaccattgctctttccttcattcaacatcttctcaactctatcaaacgtagttttagctccttctacatcaccaaactgcatctgaacagaccctagtttcgaaatcaaaaccgggtctaacggatcacgattgatcaattccttcatcaaatccaaagacaccccaaattccttgtgacctaaatgaaaccctagcaagcaattcatcacaaatgtctctcttttcttccacaattccacagaactctctaaactctgagattctttctctctgattcgatctcgaacaaagtcaagcaaaacatataaacgatctaacccttcctgacgattaccaagcttagtcgggatcaaagcgtagagccatcgtaaagagaaaggaaccatagatcctctccgattagggtaaatctcagggaacgattcgtacctgtaatgcgtcccgtcgaaatcgtgcaaggaattaagctcatgagaagcttcatcggagcgacgaagcttcgcgagagccataacttggtaagtgagataagtgagatgctcgtgaggctttgtgaggaggaagagagctctggcttgagatatcttctcgaggatcgcttgccatgagccacgggtcgaaagctcgtggagcgagccgagatcgtgtgttaattcgtcgagcgaattgaatcgttccggtggtagatcggcgacggatgtgacttgggatgaggctaattcgaatgccgtcggttcccctgcatcggttgactctgccatggcggtggaatcagtggaggagggattgaattcgggtcgggtttcggattcgggtaaatccggatccattgctggagatgactccgtgaacattgtggaagtaacctggtttggtctttggatttgggtcgtctttccaatagataccattacgctaaattcttctttttggcataaaaatttagattattttttattaaaaaaaaacatttgatatgattatgattttaggcggtttattaagatttttttataattagatcaaaaataattagatcaaatactaaaattggaggagaatccaaactttggatttcatatattttattttttaattcactagaaatgaaacaataattaaatccaaaattacaattaacttgtctcggatcgattgatcaatgttgattttttgtcttatgacttttcttcgtgtaacgaaaggagttacttaaatggtggagtaatggtaataaataccatgttataatattgttacatactgataatattattttccccatgttacatgtaacatcattgatttttacgtagatatttaatataacgaccaaaaaaaattaagctctgacttggtccaagagattttttctcgattcttaccattgaccctgagctaagacttgaccaaattaaaagtctatgtggaatgtactgcaataagtaagtctttttaattaactaaagaatttcagacctaaccccatatttttttcggataaggggtatgaacatgtaaattattcaattttctattgtaggtatttaaattcgagatttttaaaaaatgaaatgagtgactaactagctagttcaaaccgtaaaacctattattcatttaatgatttgattaagtattttgttttaacaatagtttaggctttaaaaatcttacaatcaaacatcaaaatataatgtggttttactacggaaaaaggaaaagcagtgtagaagcatcgaacatacttgacttttatgacttacaaaacacatgaggtacacagaatcatatactacaattttactttgctaataaaagtcgatgtattattattagaaattatcactaaatcgtagaaaagtgaaacgcgttttctctccagtttttctccaaaagacaaatgagttatctgtaaacacatgacatgcaatgatctatcgttatgtatatatgaattgattaatctcgaactatatattgaaatctcagcttcttatcttctttgattcttggagacacgattggaaaaatg

SEQ ID NO: 20116 - DNA, 3003 bp, Unknown; identical to SEQ ID NO: 20115
  misc_feature (1)..( 3003): 2750-1469P.txt file - cDNA_ID_1824406; gDNA_ID_2926219; Annot_ID_142353

SEQ ID NO: 20117 - DNA, 3003 bp, Unknown; identical to SEQ ID NO: 20115
  misc_feature (1)..( 3003): 2750-1469P.txt file - cDNA_ID_1824406; gDNA_ID_2926219; Annot_ID_203202

SEQ ID NO: 20118 - DNA, 3003 bp, Unknown; identical to SEQ ID NO: 20115
  misc_feature (1)..( 3003): 2750-1469P.txt file - cDNA_ID_1824406; gDNA_ID_2926254; Annot_ID_204491

SEQ ID NO: 20119 - DNA, 3000 bp, Unknown; identical to SEQ ID NO: 8506
  misc_feature (1)..( 3000): 2750-1469P.txt file - cDNA_ID_1824449; gDNA_ID_1971813; Annot_ID_175853

SEQ ID NO: 20120 - DNA, 3000 bp, Unknown; identical to SEQ ID NO: 8506
  misc_feature (1)..( 3000): 2750-1469P.txt file - cDNA_ID_1824449; gDNA_ID_2926254; Annot_ID_143080

SEQ ID NO: 20121 - DNA, 3000 bp, Unknown; identical to SEQ ID NO: 8506
  misc_feature (1)..( 3000): 2750-1469P.txt file - cDNA_ID_1824449; gDNA_ID_2926218; Annot_ID_142338

SEQ ID NO: 20122 - DNA, 3000 bp, Unknown; identical to SEQ ID NO: 8506
  misc_feature (1)..( 3000): 2750-1469P.txt file - cDNA_ID_1824449; gDNA_ID_2926218; Annot_ID_203157

SEQ ID NO: 20123 - DNA, 3000 bp, Unknown; identical to SEQ ID NO: 8506
  misc_feature (1)..( 3000): 2750-1469P.txt file - cDNA_ID_1824449; gDNA_ID_2926254; Annot_ID_204471

SEQ ID NO: 20124 - DNA, 3000 bp, Unknown; identical to SEQ ID NO: 8705
  misc_feature (1)..( 3000): 2750-1469P.txt file - cDNA_ID_1824499; gDNA_ID_1971867; Annot_ID_58423

SEQ ID NO: 20125 - DNA, 3000 bp, Unknown; identical to SEQ ID NO: 8705
  misc_feature (1)..( 3000): 2750-1469P.txt file - cDNA_ID_1824499; gDNA_ID_1971867; Annot_ID_176477

SEQ ID NO: 20126 - DNA, 3000 bp, Unknown; identical to SEQ ID NO: 8705
  misc_feature (1)..( 3000): 2750-1469P.txt file - cDNA_ID_1824499; gDNA_ID_2926155; Annot_ID_139470

SEQ ID NO: 20127 - DNA, 3000 bp, Unknown; identical to SEQ ID NO: 8705
  misc_feature (1)..( 3000): 2750-1469P.txt file - cDNA_ID_1824499; gDNA_ID_2926155; Annot_ID_198333

SEQ ID NO: 20128 - DNA, 3003 bp, Unknown
  misc_feature (1)..( 3003): 2750-1469P.txt file - cDNA_ID_1824503; gDNA_ID_1620711; Annot_ID_49013
tcagtcactaagttaataataaaactactaagatgaataattaaataaagaccttatctctaaattttatgtttatgagttgatgaaccttctaaattttattttatcactatattaacaccatttcgacaagtaagaaatatgataaacactctacactaataatcatcatcaagtcatcataccataatcagtcataaaaaccaaaacaaaggaacaaaattatgtatgaatgttgtatatttacatgctatgcttttgttttcccctgtttttcttgtatggttctaccaaacttgttgatcacaaaggaccaggcttagtatctaccagtttatctgtagtttcagaggaaagggacaaaaatgaattatatattttgtttttattttgaattattctgccaattaaaaccagcttttaaagagataccaccaaaacaatcttgaattgacaatagacgcatcatgagaaaatttgtaaaatagagttatttgtgaatctattagacttgtgatatagacccttgttaattacttgactcatcaaacaagagtttttgaacttttgagttatcagcaaagtcgattagcgacacgggaatgggttaattatacttaaatggtccattagaatgagttcttatcattgtcattgtattgttgtttgatcattagtttccgttgatcgtctagcttttaccttgatataatagatttatttattttcttgtcttacttctctatgcttagtttattgctttaactcacctagatatataaaagtgattatgattgtataggttcatgaagaactaatccgttacaaagtatgaaagtagtcataaaaagttttctaataaaaacatctgagtacaatattcattactatccgcaatgctatactatagattgtgaatgtatttgtaggaactattattaatgaacactaactttgagtgtaatcaactctttattaagccacaaacaaaacctttatttattataaatctgattataacgtatacataaaaacatattatgaaatataacaacataatcacttctcttagtacgaaaacaacatttgccttatcaagttggtgaactcgccggaaaaaaatccaaaacaacttatagaaatacacataaaattgatttcttattgtgctggaggaggaggagtaaaaggaggaggaggaggaggagtctcaactaaaacatctagcttcatgccttgaacgcaaccacctcttccatcaagtagataataacgtctagtctcatagagaggaacaatatctctcccagctccacgtgtataattacgtattgggcggttggagatacatttttcataatcagccttgtttacctcaagaatgttgtgttggtctctatagaacacaaaatctgacaagaaagtgataaataaaacataagtctaaagacagaaccaagacttaacttaaccaaaaaaaaaagacagaacaaagaaagagttatgttctaactagatctggacttaaagaaaagttaaaaaaactattacaagatttaaagctaaaccaatttcaaatcagatctaaatatgacagatctgagagtgtagattgagaaagaagagatagagagaacgtacaaagccagtctccgacgtagaaatgtttgccttgagcccatagggtatagttaatgttggggttccagaactttttgtcgccgactaaatatttcttggctgttacttctggtatcggcgccgccactagaaaagccagtacaaccgccgagattagcaccatagatctccccatttctctctagcaaaactctctctctttctcccttgtagaattaattagctatcataaatatagtagttcatcagttccacttccactaaattattgtttttggcaaaacagtaacttaagttatataaaaaaaaaaatcattagtcaatcaatcacagtcctttatgataaaacgaactcataattattccaccgacaacatgcgttttaaattattttttcttaaattatattatattatattgatatcaacctagctaaaataattcggatggcgaaatcggacaatttttaatagaaaaaatgggtatgaagatagtctatgattccgttcttagcgactagagggacctgctcaaatctcccgggtgatacgcgatgtcaagctcaatagaaccccacaaccgacgagaccgagaaatccttgatttgggctagaagattttgaaatgaatttaatatattctaagtaacttgcttaaattttttttcaaactctaaagacataactaacataaagtaaaaaaaaaaagttaatacatgggaagaaaaaaattaaactaatgattagctctctaacgtgtttaatctcgtatcaagtttttttttaaaaattatattgctattaaaacattgtactattgtttctattttgtttagctattattcttgtgaaatgaaaagttgtgtttattcaattactaaatggcaatatttatcttggaaaactatacctctaattggattaggccctagacatcctctttagcttattgacgttaaaattattcccaaaactattaaagtttagtagtttgaaagatgcatcaagacctactcagataggtaaaagtagaaaactacagttagtgtgattatattttaaaatatataaaacaatcttattaaactaaatattcaagatatatactcaaatggaagataaaaacatttagtctgttaccactaccagcctagctagtcactaatagtcactttggaactgagtagatatttgcatcttgagttaccatggactcaaaagtccaaaaagagaccccgagtgaaaatgctaccaacttaataacaaagaagcatttacagcggtcaaaaagtatctataaatgtttacacaacagtagtcataagcactcaacacaaactctttacgaatacttttaagtatg

SEQ ID NO: 20129 - DNA, 3003 bp, Unknown; identical to SEQ ID NO: 20128
  misc_feature (1)..( 3003): 2750-1469P.txt file - cDNA_ID_1824503; gDNA_ID_2926156; Annot_ID_139515

SEQ ID NO: 20130 - DNA, 3003 bp, Unknown
  misc_feature (1)..( 3003): 2750-1469P.txt file - cDNA_ID_1824505; gDNA_ID_1620711; Annot_ID_49011
gtaggttgataaacaaaagaattaaactatgaaatttgttgcaatcaaccttccacgtaaaatcgtaaaaaagagaccttgtaagtatctagcttccttaacccattcataaaccttgagtactttttacataagtagccaattgataggttggatgtaattcttcacaaatatactcaagaaaataacacacaatagataagctaaaccaaccctagttctaactattaagtttatgatgattcttacaacaccttgagtaaagaacactcttcagatcaagctgaatatcaacttcattttttgatgcatgcattgtttaccaaggttaataagcaacaattttaacaaaaaaaaggttaataagcaacaacaaaagcgtttaatgcaccagaaatgttgagaagcatgtcttatgggtctctctgtccctgattctagactcattctaagtgtttgtacactctctgtccctgattctaaggttgcaaaagaacaagaattagcaacatctcgatcacttgaattttcctcaagcgtggtcttcacatgaatttttgctcacatcttcaaggtcacaagggtttatgtttgacctttcttcttgcatagtgattatctttgagttaatatcaaattcatgttcctgttcaaaatgggccactcgtatatatatatatatataatatgtatttaaattgtggatatgttcgaatatctgttcgggttcggattgggttcgggttttaggatttagaagtttagaactcgttcgggtattcataaattttgggttggttttgaatatggttttttggatcgggttcggatcgggtaatcgggttctgtattatacccacccctacttctcactgtcagatctgaaaacatgaatattcatatcaaacgtgttacaaattacattatatcttatgacattttaattcaataataaatggcaataagtgaattgattcacaaatctcatcacattttcgttgtgggattttttaacgtctcttttaaattattagatttttttgggatgaaatatgtctgaacaatattcaggttggattaatgtatttttgtggtttatttttttgtcgagcctcattggccattagtaagtggtgatggcggcaacatattttaacggactagaacacatcccatgttttggttctgctaccgtattgaatgttcattcatagactcatagtccatctaaacatatacaatgagaaatatttaattggttctgataacatatacacaaacttacaaaaactaatttaatgctacttacatatcttacatattttcaacggctagctgaaatctccaacggtattcttttcatttatttatatataaattagtcaatatatatagcttgtcagctaaatccaaaggttgatatatgctcgtgagagctaataatcattcttcaattatcgatctcatttttaagaattattttgctacctaaattaagtagatgcactaaaattagtaaagcaaactcataattgtatagagattgcacataaattaaaattaaaaaataaatcacctaaaaaggcgtatagacttataaatttcatagagataactcacaaaaatattttcctaaagaaagatagaaatatttgaaactaattgatgctttgctctatttacaggttttattttgaatcaaaacgttgtactttagtaaaaactaattattatgattaaggaagattcttgatgaaatggaaagttgagtttattcaatcttagtttaatgaaatttttcacacacaaaaataaaataaaaattgatgacattagataaaaggtaaaaaatagactctattaaggttcaagctagacacccacttgcatattgtcattaattgttttccaaaactattaaagtataacaaaatattgcaatttgaaaaatgcattaagacctacttagataggtaggtagaagttggactaatttctatttactgttactaagattactttattttatctcttttatatttgatttgttacaatgctagaccattttttaataataattattatgattcactgtcagattttataactttttttttaccatcgtaacatgtgtgtcgccaaatagtttatgtgagtcactagataaaacggtaaaagtattcattatgacttcagttaacaatagtcaactctttatactttatactgtagtgttttcttatctccatttttctttttgtgtacatcttgtagaaaatcttcccactataacttcttcttattatttttaaaaaatactaatctactattatgttgttggacacaaaaaaaactaaactaatctactatgttgtatggataatctttttttgttgatagtctcattataaattaaaacgaatacttcacagttcactagatgattaaatatttgactcaatttgccaaatatgattatagaagaacttttctatataacataccttcaagtggatgaaaatgtgtgagattttttcttcataaatgttttttttcagtgacactatatttttctttattaacctgctatttcttctatatgactcaaaattgatttatttatctatcctatttttaaaaataatcagcaaaacatcctctctcaattacgattttaccaatattttgtttgtcgtttttgaacaaaaatttggctatctacgtaataaaccttaacaagagttatcaattttgatctaaatgatgaataaattatgaacctcaaaatctggacttggatccgccacttactagagtcacacaaacgtcaaaagaaggacccacgtgaaaaaccaaaaccaaaactaaaaccaaagtaaaaaagcacgtaacggtaaaacacatgaataacttggctataaataaatagcaaggctttagtcatgaatgagcactcaattcgatcactaactctcactcttagtacaaatattttcaagaatg

SEQ ID NO: 20131 - DNA, 3003 bp, Unknown; identical to SEQ ID NO: 20130
  misc_feature (1)..( 3003): 2750-1469P.txt file - cDNA_ID_1824505; gDNA_ID_2926156; Annot_ID_139513

SEQ ID NO: 20132 - DNA, 3003 bp, Unknown
  misc_feature (1)..( 3003): 2750-1469P.txt file - cDNA_ID_1824519; gDNA_ID_1620711; Annot_ID_49007
tttgaatcgtcgttgcattttttttcctcggaatcgctcatctccttcttttgtttcttctgtatcacggccaagtcaaaaaccctagttagataaggacgcttccctaattaattaattataacatatttttactttattgacattaattttaattttaattttatttttaagtaattttattttttttattttactaaaaacatctctaacatacatccctaatcataagtgatatatagctgagaatttatttttattttaactgattttttttttctatacattagataatgcatgaaatttatagatataaatttagaattaattattttgaaattggactgtgtcactgacttactgtcacacatttagtgcatatatgagctatgatgctaaaagatatcatccgtgaatgaaaagttacagtctcataagtcaaagaacataaaaagaatctgaaaatagtataaggtaaaacaaaattgtcatatgtatagtactcatgcaaaaaaagagtatttgaagaactatcggaagctcgaaatcaaatatctttttattaattagaaaactaagtagctagaagaagagaatggtgaagagaatgttagaatcacatgagagatgcataaatcttggaaaccggcattgataattagattcttcttctccagctgcttgagagttgagaggcgccattttttcacatgtcactgcccaaatgtgaatttagacttggaaaagaaacgccactagtttctggttcattatcatgactcagatttttatttttgtttactcagtctagatatgtaacccatttaacataaaccaacatatatatttgacagattttttttttctttttttatatttactttacaaattattttatcatttacaattaatgtttgaagattttaaaaacactttttcatatcaactttctacatagattagtatgtacaaatccaaaatatatgtaactaaataattacaataaatatcaatcacgtttttctttatttatttataatatttcacattttcattaattattgtgtcacctaaataaagcacaaaagttaaataaaaaagacaaaaagacactagcttttacaaaaaaaaaaaaaaaaaccttgcctattgcaaaacattacccccatatctcttcatatgaccatagcatttatatataccttcacttagaacaattcataatcaaaatctcaaacattatcaatataactatatagacgggagtcactagttagaagacatgaaattcattacatcagtattcatcgtattcattatgttatctttaattctgactaaaacaatgatttctgggaaagaggagaacgcgacatgcgttatggcaaatcttcaaatatgcaagtcggcggtaacaaccggaaacccacattcgaaggaatgttgtgaaaaactgaaagaacaacaatcgtgtttttgtgaatacttgaaagatccattagttgttccatatattacatatgccaaaataatcttagcagcttgtggtttatcttttcctaattgttgaagttttaaacatttatgacataatctataaatgttataatcatcaaaattatatttgataatgtttatcattggaagtttatcatgtcaaggttattaacctgattttaatatataaaaaatgtgttttcttatagaaatatattgttattatggatgttctaaattcaataactactcgtcttttgctctttagtaaagtatgatttttctatctaagtctctccctagacagaaaatataaccacatcaaactagaattcatgaccatactcatgaaaaatataaatttggatcatgcacatgataagttgtgttagtttgcagcgtgaaacgaatatcagaatctatgagcctatcaataaccttaacactgaagttgcgtccaatagaaaagttaaaaagacactaaaagccaaaccaaagaacatagagggattctaaaaaatagtataattagtgtaaaacaaaaatgtcatatgtgtagtgcttatgtaaaaaaaaaagtattcgaagaactaaggaaagcacgaaataaactatttttttttattaattagaaaaccatgtagaagaagagattagtgtagaacagaactgttagaatcacataagaggcacataaatcttgacaacatgcatccatgattggatttttcttatgaggatgcttgaatgccatttttacatgtcactgctcaaatgtaaatttaagacttcgaaaagaaacgccactagtttctggttcattgtcaagacccagatacttaattccggtatattcaatgtaactctgtaatctagttaatataaaacaaaagctttgagatatatatgcttttttctttttgtatacttactttacaaattcttttattatttacaattagtgtgtgaagattaataaaatactttttcatatcaaatttctacatagattagtattgtataaatccaaaatatatgtaattcaatatttaaaattaatataaatagcgaaaaattgtgtcacatagatatgaaatgtactaaattttttaattttattttcagacaaaagacattagcttttacgaagaaaaaaaacacaaaaaagtactcttgcctattgcaaaacattaccccatctctccatatgagcatcgataataaagatgagttatgttaatcatctttgtgattgttgtttgtgaggctgttaataattcattttaaaaaagggaacttaatagttgtctctaataggataagcatttaaaacgcagcgttttattactaacttacgtcattgtctcatgcaaatgacataagctagagaaaatcttgattcctccgtcaaggcaaaaccacataaagcctatctcctgccgcgaaacaaccgtttaaaccaccaattctctcatccgtaccaaagaacaaaaaaaagataaaatg

SEQ ID NO: 20133 - DNA, 3003 bp, Unknown; identical to SEQ ID NO: 20132
  misc_feature (1)..( 3003): 2750-1469P.txt file - cDNA_ID_1824519; gDNA_ID_2926156; Annot_ID_139509

SEQ ID NO: 20134 - DNA, 3000 bp, Unknown
  misc_feature (1)..( 3000): 2750-1469P.txt file - cDNA_ID_1824530; gDNA_ID_1620711; Annot_ID_49003
cgatcctataaattccacaaaagaggttctatagaaatcgttaaaaatatttatggatattttatgtaataccaaaacataaagtatcaaactaaagaatatggccaatctacacaactagttgtacttattatggccgttttatcctaaccaaattgatttatcaaataacatgttatttcctaagatattaaaccgcatgactgataatttgtatattcattttgtgtccgatggttaacaaagaagataccttgtcggatttaacagctcggacagtgaaggaagagactcttttggtcggagaaacaccgaaaggagcaccggagatgcccttcgggacggcgagacgctgagaaagagaagcggaggagaagctgctccttagctggctcgccattggagatgcactcgctgccattgttctttttgtcttggttgttctcttatgaaaattaaaataaaatcgagtttgaagtgtgtgatgaagaaataagcaatctacgaaacttgagattgcgtttgctgatgtggcaagacagaggatctgtttcttaagattgttgtggctctcagggatatgaattttgatatgtcttattctcattggatgttatcttatccactttgccccaatattttcttttaatatgtgaatatatccttttttttggaccgctggtgaaaatatgtctttacatatatatatttgtttcttgtattaatatttcatttccctttaagatgcttttaacatgagttttaaacttttaattgattatatctatattttaaataatgtaacctatatctttaatttaaaataatttaaagattttaactagtaataggatttaagacggttagaaatttaaaggctcattaggtgatcaataggacaaagctttttagttcattttttttaaatttaaacttttacttatcttgtttttgaaattgtcagtagaattttgtttttcttacttaaaattggaacattttgctatgcttgtctatccacttgatgagccgagccagagggtttggtgtttctttatctctacgtatgtttctcttgcaccaaattgtgtgacactgtggcttggaatatatatcgcgcaataaaaccttccatacgctcctgccatgggctatatatgcttgtgattagagatgtccagttcgtcgagtagtttgctttgtagatatttatagttagagcctcccatacttcagctgcatagctacaatagaagaataaatgatcctctgattcaatgcagttgctgtagagaaagaagtttgtcattgagagtctgttctggatcgccaaccatgtgcaaaaagaatactttggtgttgtgtgagtaaaccatacctctttatgccaaactaccttatttgtatcggtacgagtgtgattccaagtgtctttggttctaaagattgattgatacacatcgtttttcctttccataataccacatcctcttcatcggtttgattttgtctcttcatggtgagatctgtttcaatttgttttagggttgcagttatgtccatgcttccgccatcgacatttgctttaagatgtcaaactcaattcgtcccctctctcctatgatatccatcaaacagcccattgtaaaccagttatcataccagaatgaaacttttttccagttgtttacctcaactttgcaaaattgtttggccactcctttgtatttgagtaatttcttccacatctaagagcccaaagtagtattttcttttatttaccaaatagtgactcttttgagtaggtgtgccttgatctatttaatccataaggagtttttgtgggagacaagtccccaaatttatttcaaacaacatacctcattaacttcttttagtgatctcaagctcaaacttcgaagtcgtctatttttacaattttatttatgtcagaaatgcaaaataaacctataaaatataaaataatacgcaattcaatttttttcattatcgtcaaatgttaaaattttgataaataatatatcaaatggaatctctcgagatgatgaattcaactatatctttaaaatatttaaacacaaatatatgtgatcgtgaaaacgtttactgtaaagttgcaaactaaaattagatatattacatattattttagattcaatcaaattattttctattttttaaatctaaaaactaaaattgtaaaaatatcgattttgaatgtgtttttttttttttttttttttgcataaaacccattgtttttgatccacgtgagacacgttggtggagactagttcttttgcatggtcaaatcgtttagctgtttcaaagaattaaaaaataattaagtaaaaaagtctttttgatttatatattacgaccactattaaaaaagtaatgaatgaaaaaccataaagaaccctaaaaaaggtctttaataaaacgcaacaaaccaaaaaactgaagctcttgaaatttcctctcttcttcttttgcttgagctttaggttttgagagcaaagaaaaacgaagacgcgtcaaaggtgaaagtcaataatcatttctctgattccgattttcttctccattgatgcttctgattatttattccttctgggtttcgtttcaaccttgtgaaatttttgtcggctgcttctaatttcttcaatttctctcccaaatttcgtcttttttaggttatctatttcatgggtttatgtgggtctttaaaaccctagctaaatcatgtatgtgagtgttaaagttttgatcttttttgcctttcaggtactgaaatgtgtctattgcttcttgcttctggtttatgggtccctgcgacattttgagagtgttgtttggtttaggtgtctggtgtattgcttatataactgttgcaatctttgcgtcttttagaatctttcactgtatttgttaatttcaagagcttttgtggagaggttctgcttgcttgctacaatg

SEQ ID NO: 20135 - DNA, 3000 bp, Unknown; identical to SEQ ID NO: 20134
  misc_feature (1)..( 3000): 2750-1469P.txt file - cDNA_ID_1824530; gDNA_ID_2926155; Annot_ID_139505

SEQ ID NO: 20136 - DNA, 3003 bp, Unknown
  misc_feature (1)..( 3003): 2750-1469P.txt file - cDNA_ID_1824534; gDNA_ID_1620711; Annot_ID_49002
tggagtactcgtattctgcggctctacaacatcatcaaatgaaacattcttagaatggtaaagcccagaactttctactggtgactgggagccactgatgtttcctggtggccttaaatgactcttgcctctactattcatatctggccctgattttccaagactatcgagaggatcagtatcaacaaatactcctccgtggacagatgaatgatcagtttttctgctgttgaatttaccaatttcctccaatggatcagtgaaccctcctgtggaaggttctctaagggttgatgtagactcctccaagactacaaatgggtcttctttcacattagaagatgtctcggcagtccgatacggaggtttctgggattgactagttgtctctgaagttgtcctgcgcagaaagagtagatcatcaatcaattggtaaacaagttatgcctataccagcaaagatcaaaatgaaattttgcatataaacgagttatgctttcaaagactttctgggagttatcttctaggtttaagagagtacacataagagacccttgtattgtgtgcaagcaaacatacccttgagcagctctcaagacaggtctaggagaaacaattttgaagagcaattaatggatataaagacattgagtatagttcatgctacaaagctagatataaaggcactactattatgaaagcatgaagtctctagtctaagctctatacccttgagtcatttcacgcaagcaaggtcgcaaatttgaagagcgggtgacaggagcaaccctaactagtaaccacagatctaagagcaatgaccggatataaagacattgaatatagttcacgctacaaagccagaagtaaaggctctcaagtcagctctagctcctccataaccactgatatagttcatgctacatcacatttcattacgtgatggctctaaattctacacccttaacttctttcacgcaagcaagccctcagatttgaaaaccaatgacaagatataaagaacaatgacccatttgtagtcatatgaaatgaaattttgcatatgaatgaccctaacagcagattaaaggttgaagatttctcttgtaagttctacaaagtacacataagagaaccttgtatgctagcaaaaagctcttcagtaagacctaatatagttcatgctacatgtcatcatgtaattgttatggctctaagttctagacccttgagtaaactctcaagtcagttttaaggagaaacaaatttgaagagcaatgtcattcaaaattggatatgaatgacaagcaaaaggttgaagcttttgagagcaatataaaaaaaacttgtagacttgtagtatccaagtaaacagctatccataagcattatacagttcaagcaaaccaaaatctaagcttcatacccttaactaaaatcacgctagcaagctttcaaatttgaagagaacagcttccataagcaccaaatgctactacatttcatgctctaagctctataccgtttattcatttcatgcaagaaagctccctagctagtaaccataaacagaagaagagtgaatgaattcttaccgtttagctggaggagagctagtgcgaccaaacccgggaattaaatcatcaaaaatggaactacccttctcctctcggtcactctctttcttccccaaattgtttcccatgagatcatcgaaaggagaactgttctgtttcctgtgcttcgtaggagaagatgagatagaagagaaaacattctcaaacctagctgactgagaagaagtggaagggattttgagctcaggaatagactcaaacacatcctcatcatcatacacaggcttatcataaaccggcatagacgacgctgatttggatttgggttccttgaacataacatcatagtcaaaagcaggagcagatggagaacgagaatcaccagaagatccatactttggtggtggtccgctaaacacatctctgaagagaagatcatcaccatctcgaccaagatcgtcaaacaccggcaaagaatccgactttttaccagcggcagaggcgaagctataagaagaagcgaaagtgttgaaatcagcggcagaagagtttgattgagaagccatgggcgcagatttgccttgaggtttcaatccgaagtctctcgctaacaatcctgtgaaatcatccattggattcctttaaattctctagctccgaattcgaaaagctttagattttgcccactagaaatgaagaagaggttatcttcagatctgagtcgccattaacgaatcggatcaaagcatttgattttttaaaaagctcttttttcttcgttttccgacttgtttatggtttcttctccgactcgtacatgtttcccagtcttcataatttcttcattattgctaaatgggtcctaaagtttcagaaataacaaatttggtctccaaaatcttaaaaaaataaaaaaagtaattccttagagttgatcctcaatatatataaacttataattatattaattaccaaaatacaattatatgtttaacattttctatagcaatgaaactcttagaattatcaaaatatgtagaaaatatttgtcaatgtacaattttgttttttttgtgaataaattttggtattttacattggttcaaaaccaaaatgaataaatccaaaactctagccaaagtatcaccgaatttataagacttgggggacccaaattgaaaactctgaaactttaggacccatttagcaaaaacgaagaaattatgaagacacccagtcggagaagaaaccagagacaagttgggaaaacgaagaaagaaaaaaagagagcttttttaaaaatcaaatgctttgatccgattcgttaatggcgactcagatctgaagataatctcttcttcatttctggtgggcaaaatctaaagcttttcgaattcggagctagagaatttaaaggaatccaatg

SEQ ID NO: 20137 - DNA, 3003 bp, Unknown; identical to SEQ ID NO: 20136
  misc_feature (1)..( 3003): 2750-1469P.txt file - cDNA_ID_1824534; gDNA_ID_1620711; Annot_ID_165425

SEQ ID NO: 20138 - DNA, 3003 bp, Unknown; identical to SEQ ID NO: 20136
  misc_feature (1)..( 3003): 2750-1469P.txt file - cDNA_ID_1824534; gDNA_ID_2926155; Annot_ID_139504

SEQ ID NO: 20139 - DNA, 3003 bp, Unknown; identical to SEQ ID NO: 20136
  misc_feature (1)..( 3003): 2750-1469P.txt file - cDNA_ID_1824534; gDNA_ID_2926155; Annot_ID_198373

SEQ ID NO: 20140 - DNA, 3000 bp, Unknown; identical to SEQ ID NO: 4505
  misc_feature (1)..( 3000): 2750-1469P.txt file - cDNA_ID_1824538; gDNA_ID_1620711; Annot_ID_49001

SEQ ID NO: 20141 - DNA, 3000 bp, Unknown; identical to SEQ ID NO: 4505
  misc_feature (1)..( 3000): 2750-1469P.txt file - cDNA_ID_1824538; gDNA_ID_2926155; Annot_ID_139503

SEQ ID NO: 20142 - DNA, 3000 bp, Unknown; identical to SEQ ID NO: 4495
  misc_feature (1)..( 3000): 2750-1469P.txt file - cDNA_ID_1824549; gDNA_ID_1620711; Annot_ID_48998

SEQ ID NO: 20143 - DNA, 3000 bp, Unknown; identical to SEQ ID NO: 4495
  misc_feature (1)..( 3000): 2750-1469P.txt file - cDNA_ID_1824549; gDNA_ID_2926155; Annot_ID_139500

SEQ ID NO: 20144 - DNA, 3003 bp, Unknown
  misc_feature (1)..( 3003): 2750-1469P.txt file - cDNA_ID_1824561; gDNA_ID_1620711; Annot_ID_48991
aacctcaaatccaacaatctcataccccaatgccttcttcttatcagcttcagagatcacacccataccttcttcaccagtaccaatcacctccatgacattgccttcatactcatgaaccaaaaccttaaacttgaggtgattaatgatgtaatcatcattactgttaggtggcgaatacccaacaggatatccagtccactggatagtaaccccattctgcttagcgaatctcaaagcaggcaagttatcaagaatcatattcacttgatacaactcacgagttctctgtttcaagagcttgacctcatgctcattcaaaggactcgtagtgcataagtaaagagactcattggttctcatccgaaacctataagcagagttatcaatctgatcacccatgagaagctcaccaagattctcagcacttttcttgataccttcaagtggttggcagtaaggaagactatagtaactgaaaggaagctcagtttcaatagaagtcaaggaattgactttggcgaagatagagtctccatctgaatatgtgtgcatataactccctggtaagtaaaacccattgcaaagctgactaacaaacaccagtaacacgaatactcgatacacaccaaacattgtcccttcctgtatcaaaatacaaaaactctctcacgattagtaaaaatcactactattgtaacagattcaagcacattctcacgaatacattgaaatcgaaatggtttatgcatgtagatcagattcgtagtaaccagattcgggattaatgaatcagatcggtggatcaatagatcagatctcaaatggatcataaacgcaaaactcagaagctaattgatataatggaatacgaaaacgatgaatacaaaatcagaaaacgcgaaagaagaagcagatgcgaatccaacagatctcagagtattcgagagcaaacctgagagagagagatccaggtatggagatctacgagggagtcagatctagaagaggtggtcgagggactttgggttgtttcgaaggtcacgctgataatctctctcactgctttgctttggttgcttaatgcgttcgcaaagagagcgaataacgaaaatcaagaaaatcgtgggtgtgttgggtagttattctctgtgacgcgcttatacaatatgtcggtgcggtaatcaccgtgcctaacttcatctgaggccaaaaaaaaaaaaaaaaaaaacttcatctaaggccttgaatttctattggttgaactggttataattaattatatttttaagtaaacgacggtttttaaatgagatttttgtaaaatagagagagtataatgtagttaatttttaaaaaaataaaacaaagccaaatgaccaattttttggaaacaaaaaataattttatcacatataatttgaacatttttttttttgctaaagaattcaatatttactacaattttgaattattttgaactcttatgtaagaaagtaaaatttacacaaaatacatattttgagaagctggcatccggcattttgacatgcgtattttctcaaacattaaatacattaatatatatgttaactagcattataatagagtaaaatattcacaaaataatgttttgagaagctgaaatgtaacatgatattctacagtctagcaatttgaggttttctaccgaattttcatagtttgtattgtaaattcaaattaaatttaagttcatgtagttataagcacataaaaaagttcggtgaatggaaacgataaagcaatttagttcatggtgaaataggccacatgattattagcaggattcatagataagaatgttaacaaaattaaatggtaaattgggtttaattaggtttatgacctccggtcgtccttacgctattatctccacagcgtttttgtttcatctaatcaacgaagtgaactttcgaaatcgatatctgaattttgatttaaaaattggaggtaatcattcaccaatcggtttgtcaacgtaaaaatctctctctgattatatgaattgatgtgatgtgagttcttagaattatgattcatcgaattggaaaaaataaagttgttcgttgtcagtaaaattagggtaatttgaatcattaacgagtatatgtatgtattgtaagacatgattgatatacataatggtaaaagaagctaagcatgagtaaagccgattattggcagagatagtttttttcatcagtcttgatgattgtttcgattaatactctattggatctttattttattcatgaacttgattagaatttgttcctatatgcatgattttagggttaaaatttctcttgaatttggtatattctcttgaatttgattaaaattttatctgttttactttaaagtaaagtttagtgggcacagcccaacctaatgaaaataaaagaagccataaacagcccaataagaaagaagtaaagtgaaccaaatcgcaggaattaacctctgaaacgatgaacagaagaaattgcaaaaagaagaagaagatatgagttctcgaattttatcctccgattcggtaatcttcttacgtttctctgtacttactggagataaaaaaaatcgaaaattctcatcttttaagtcaattttgttactttctttcgaaagtttggtgattgttttgatgtgataacgcaggacgacgttgatgaagaaaacccgaaaactcacgagaatggtccaattggaggaaagactcaaaatttagggcaaagcaagggaggtgatagtgataatgttgtaaagactaatacttgtttcgtgtgtgatgggaaagacaattgggttttggtatgttacggagaggaatgtactatagctattcatcagagttgtgcatctgatgaacctgatttcgatgaatttggaaatttctattgtccttattgttggtataagcgtgtagttgtcaagtgtttggagttagggaagaagcttatg

SEQ ID NO: 20145 - DNA, 3003 bp, Unknown
  misc_feature (1)..( 3003): 2750-1469P.txt file - cDNA_ID_1824561; gDNA_ID_2926155; Annot_ID_139493
acctcaaatccaacaatctcataccccaatgccttcttcttatcagcttcagagatcacacccataccttcttcaccagtaccaatcacctccatgacattgccttcatactcatgaaccaaaaccttaaacttgaggtgattaatgatgtaatcatcattactgttaggtggcgaatacccaacaggatatccagtccactggatagtaaccccattctgcttagcgaatctcaaagcaggcaagttatcaagaatcattattcacttgatacaactcacgagttctctgtttcaagagcttgacctcatgctcattcaaaggactcgtagtgcataagtaaagagactcattggttctcatccgaaacctataagcagagttatcaatctgatcacccatgagaagctcaccaagattctcagcacttttcttgataccttcaagtggttggcagtaaggaagactatagtaactgaaaggaagctcagtttcaatagaagtcaaggaattgactttggcgaagatagagtctccatctgaatatgtgtgcatataactccctggtaagtaaaacccattgcaaagctgactaacaaacaccagtaacacgaatactcgatacacaccaaacattgtcccttcctgtatcaaaatacaaaaactctctcacgattagtaaaaatcactactattgtaacagattcaagcacattctcacgaatacattgaaatcgaaatggtttatgcatgtagatcagattcgtagtaaccagattcgggattaatgaatcagatcggtggatcaatagatcagatctcaaatggatcataaacgcaaaactcagaagctaattgatataatggaatacgaaaacgatgaatacaaaatcagaaaacgcgaaagaagaagcagatgcgaatccaacagatctcagagtattcgagagcaaacctgagagagagagatccaggtatggagatctacgagggagtcagatctagaagaggtggtcgagggactttgggttgtttcgaaggtcacgctgataatctctctcactgctttgctttggttgcttaatgcgttcgcaaagagagcgaataacgaaaatcaagaaaatcgtgggtgtgttgggtagttattctctgtgacgcgcttatacaatatgtcggtgcggtaatcaccgtgcctaacttcatctgaggccaaaaaaaaaaaaaaaaaaaacttcatctaaggccttgaatttctattggttgaactggttataattaattatatttttaagtaaacgacggtttttaaatgagatttttgtaaaatagagagagtataatgtagttaatttttaaaaaaataaaacaaagccaaatgaccaattttttggaaacaaaaaataattttatcacatataatttgaacatttttttttttgctaaagaattcaatatttactacaattttgaattattttgaactcttatgtaagaaagtaaaatttacacaaaatacatattttgagaagctggcatccggcattttgacatgcgtattttctcaaacattaaatacattaatatatatgttaactagcattataatagagtaaaatattcacaaaataatgttttgagaagctgaaatgtaacatgatattctacagtctagcaatttgaggttttctaccgaattttcatagtttgtattgtaaattcaaattaaatttaagttcatgtagttataagcacataaaaaagttcggtgaatggaaacgataaagcaatttagttcatggtgaaataggccacatgattattagcaggattcatagataagaatgttaacaaaattaaatggtaaattgggtttaattaggtttatgacctccggtcgtccttacgctattatctccacagcgtttttgtttcatctaatcaacgaagtgaactttcgaaatcgatatctgaattttgatttaaaaattggaggtaatcattcaccaatcggtttgtcaacgtaaaaatctctctctgattatatgaattgatgtgatgtgagttcttagaattatgattcatcgaattggaaaaaataaagttgttcgttgtcagtaaaattagggtaatttgaatcattaacgagtatatgtatgtattgtaagacatgattgatatacataatggtaaaagaagctaagcatgagtaaagccgattattggcagagatagtttttttcatcagtcttgatgattgtttcgattaatactctattggatctttattttattcatgaacttgattagaatttgttcctatatgcatgattttagggttaaaatttctcttgaatttggtatattctcttgaatttgattaaaattttatctgttttactttaaagtaaagtttagtgggcacagcccaacctaatgaaaataaaagaagccataaacagcccaataagaaagaagtaaagtgaaccaaatcgcaggaattaacctctgaaacgatgaacagaagaaattgcaaaaagaagaagaagatatgagttctcgaattttatcctccgattcggtaatcttcttacgtttctctgtacttactggagataaaaaaaatcgaaaattctcatcttttaagtcaattttgttactttctttcgaaagtttggtgattgttttgatgtgataacgcaggacgacgttgatgaagaaaacccgaaaactcacgagaatggtccaattggaggaaagactcaaaatttagggcaaagcaagggaggtgatagtgataatgttgtaaagactaatacttgtttcgtgtgtgatgggaaagacaattgggttttggtatgttacggagaggaatgtactatagctattcatcagagttgtgcatctgatgaacctgatttcgatgaatttggaaatttctattgtccttattgttggtataagcgtgtagttgtcaagtgtttggagttagggaagaagcttatg

SEQ ID NO: 20146 - DNA, 3003 bp, Unknown
  misc_feature (1)..( 3003): 2750-1469P.txt file - cDNA_ID_1824573; gDNA_ID_1620712; Annot_ID_49044
taagatactgatatagccaagaagtttgacatttagaattgttcaattcttgtagggtacattgagggatctctcaaagaaaacagaagagaatcagttggctttaatgaaaccggtaagctcttataaatatcaccctgtgtttctggttggtttatccacataaggcggagcttgaatcatcatcgcttatttgtaggatgatggtgggagtgttgctgatgctgctaacaacttaaacactgaagctgcaagtgttgaagaacacacttccatggtttctcttgccaatggggataattctaatctgttaggtgatcactaaatactgtgataagaatcagaagatagaaatctttgtagaatcagatggtcttctctatgaatttatcttttcaccatcacatgtattatagaaaccgtaaccgaacctcaaatcaaataccatatcagatgtctttggtttcagagtttgttactatgcttgcaaccatacccattgacatggtgtggttaaaaacgttaaagtcgattctgaggggaaaaaagtttacttattacgttacatcctcaaaagatatgatcagattaaaaagacttatcaatgtctcatacataaatcaaatactaatctactcaaaacttgaaaggtgatttcttcttctttttggttgtattgaccaactaacaacactacgtatcaaaatatccgaaaagattttaaaagtttcattggaatgggacaatgcatcttagatctcaatcctagtttacaagattagtttattagaggatgtatgcatacgcatcatataccaaaaccatgtggattactaaatcgggctcaggaccactaaatagattagattatctacaaatcacattattgtgtacataacaaatagaatacattatataaatcacacaaaaatgtatcgaagaaaagagaaccgtcgaaccagtttgatggtaatcaactaagataatgtttttttttctgatgtcaatagtgtttgtttatgaaggaatttatgatgagattattcgagaaggagtcgctttaagtgacccgatcctcgtgacgactcgttgctctttctttctttattatagattatagttgttcaaacaaatgaaaagtatctgagacgaataaattaatgggtggtctgtttctgtactataaagaggtccatgcatgtaccatatcatcttattatgtactattaaacaaatagattaatgattatataatgttttccgatatattgaaattagtttatgagtcacgagttaaatctgaaggcttcaccaaacctaaagttaaaagtctcaaaacagttaaacactcttgtgatatcatccctgtatataatctttaatgaaaacgtagaaaaaaagattatttgcaaccagaaaacatctgaacaaatatccatttctcgtggttttatgttaaaacatttgtcgtgttgggaaataattgaaacttttattttccaacattgaatttttctttatgttaaaagtgatgtgaactttgtataaaatgaaggaaaatttaaaagcactcccctatatgcgatgcgagaaaagggagagaagatatgtatgcacttgtttcttgtcacgttccgtttccacaaaatcagtagatatgccagtaactgtgttatcttcttcttttcgtgcgtctgtatccaggagacatataaatgatgctgaatttcctaactatttttaatttataaacatgagaagcgttaaatgggtagcagcaatcaaacgtttggtgcttaaaagcgcttatttgaagtataaacaatttgatatttataagataaaacagcattacatatgaaatatcatgattcataactatatatgcaaaatttgaaaacttctaaatcccaaaattacacaaagattaactaaactacattataatttataaataaataaaaagattagtatcaaaactaaaacgttaagaaatatcataagtgatgattagacgacagtcaaaatgttaaatttcatgatgaaaaaacaaaaaaaaaagagtaatttgtccaaatacaatcagctgactatatattttgtcaaatcatatatcatatatactaaaactaagaaaaagataaccatcaaaccaattcaatttatatccacctacatatgactttgatacattttttgtgtagtttgatcagtgataagattttcaatcctctatagtaataaaaattgctaatttcgataatttaagagataattacaaaaccaacaagcacctagacacccctaagatctaggagaatgcatcctccttagtcatcacttccttataaagtaaaactataaaaactgagatcacgagagaaaccgagaaagagagccaagaaatgcatgagttaggatgataatccacgtgtcactatcctattgcatgaagagtatacgtgtaagctcgtcacataaagtttccctcttcttcttcctcagagtttttaattggccattttattacttttccataaataataatataaaaattcaaaatatttaattccccatttgctgttgtctttccttttcttcttcttcttcttccttccttttctcgtgcaatctccaacaccttgactacgcttcttcatcccaccaacaaaaaccctttctctatcaaaaccaaaccaccgttagtttttctttcccggtgatacgtttagatagcttctttttttttccggtggttaacgttgacgattgactacttcaattctaaacggataagtattagatagcttcctcttcttcttctccagtatctggcgacgaattcaactagagattattttctctttttcttgtctcctcttgatcgtttgtttttgtttgtatctggattcaatgacgggatttggttaaacgaagaagattcatttctctgttcgttcgatctgtaaatttttgctttcagagtgagattttaacgaaatg

SEQ ID NO: 20147 - DNA, 3003 bp, Unknown; identical to SEQ ID NO: 20146
  misc_feature (1)..( 3003): 2750-1469P.txt file - cDNA_ID_1824573; gDNA_ID_2926185; Annot_ID_140758

SEQ ID NO: 20148 - DNA, 3003 bp, Unknown
  misc_feature (1)..( 3003): 2750-1469P.txt file - cDNA_ID_1824577; gDNA_ID_1620712; Annot_ID_49042
aaatcatattctgtacaaaggcatgttatttcttctcccttcgtttctctttcaaagtttgactctcaatgttcttgtatgaatattaattgttattctcttttgcgcccaggattggtaccgtgtcagcgaggcttacagacctcatgatgttcagtgggcattgcaaacaaaagcggtccttgaccgtttacaactagtacttgctgatagatgtcagcattattttacaataatacagcctactgcaaaatatcttggtcaactgttacgtgttgacaagcatggggtacattgcagttaaactccaacttcttctttatgtaagaaagtctaaaagatatatttattcatttgggtttcttattttttacagattgatgttttcactgaagaggttataagagcagggccaggagccgttttatcaactcttgtaaacagatttgatccttctctaaggaaaatcgcgaatttaggctggtaagatatgttttaccatgaatttgaactaaagaactatatttagatttgttccttgtagaaggtgattactgaaccctttatcgtatttttgctctaaaccaaaatggttctggttgagaagttggcaggttatcagctcggctgatgcatatgggtttgtggtttgtgtgaatgagttaattgttgttcagaacaaattctactcgaagccaactgtaattattgcaagtaaagtcacaggagaagaggagatccctgctggtgttgtagccgtgctgactcctagtatgattgatgtcttgtctcatgtatctattagagcaagaaacagcaaggcatgttatcatcagacaatgctgcaaaaagaagaactaggatcttcacaattttttcagggaactcatcttaagttcgtctgatgcagatatgctttgctacatgcttcgatcagaatgttctcagcaatctgaagtcgaaggaagggagagcaatatctattcatacaaagtctactggtttagttatcaggtaatcgaactcttattatgtcactgttctttacgcttagagaaggagtttctaataactctgaaattatatcacttgcagtgatggcaacaactctgatgtctctgttcgtcatatttttatttcctctgttccacggggagtgatctctaaggggaagaagttttgtggccactatgtgatttcatctaaggaattcactgatgaaagggtaaataagaatcaaatacatgaagataaaagttttcattttgagaataccatttggattttcatttctatgagatattttaggttggctcaaaatcatacaatataaaatttctacgtgaaagagttccatcatggatcaagatacctacctcagctgctcttccattcggaacatttgagaatatactctcagatgattccaataaggtataacctttaatcatttgcttctttctggaactctctaaaagtaatccaagggacggctcctcactgagcttgcgatccagaagtctcttaaatagatttggtgatccatcgcttttcaggatgtagcacgcaggatttctgtccttaaagattctcttaacagaggagacctgacaaaacttaagtccattcaagaagctatcttacaaatgagtgctccaatggctctggtaataactgggcatataattgtctttctttctctctgttcatgttccatgtgaatctcatgttgggttttgaactctttggtagagaaatgaactgatcacaaaattgagaagtgaaagaatgccttatcttggtgatgaatcaggctggaaccgctcctgggtggcaattaagaaggtaagaatctctttgaacgtttgtgtacttatagttaaaggaaccaagtgtttccctgatctccacatctgcataggtctgggcttcaaagtggaacgagagagcttatgtcagttgcaaaaaaaataagcttgatcatgatgcggtctgcatggctgtgctgattcaagaagtcatttgtggcgattatgctttcgtcattcacacaaacaatccggtctctggtgactcttcagaaatatacacagaggttaaagaactatctccagtttccacacttttgagtaaataatatcaataactcagttatcaagaaactggcgttctcagattgtgaagggtttgggagagaccttggttggagcatatccaggacgagcaatgagcttcatcaccaagaaaacaaacctcaagtctccaaccgtaagaaacaaacagatcctagttggctcttaagttgagttatatattaaccgagtgagtggggaatttgggttgtacaggtgatcagttacccaagtaagaggataggtctgtattctaaaccctcaatcatattcagatcagattcaaacaacgaggatctcgaaggcaacgcaggcgctggactttacgacaggtttgttttgtgtgtttctctctgtttccgtcttttatttcggaactcagaagctgaaagggttaagtgctgcagtgtgataatggatgaagcagaggaagtagtggtggattactcaagggagccactaataatggacaaatcctttcgagtgcgtctattctcagcgattgcagaagctggaaatgtgatagagtcaatctatggttgtcctcaagacattgaaggtgttgtcaaaggtggacatatctacatcgtccaagctagaccccaagtttaagctctctttttctacttgtaccattccctaagttttcaatcaaatcttataattacaagctaatcttttatatgtttgctattacacatgtaatatttctacatcatggcacactcctgatacaaacaaacatgattcaaagtttcataataaatgattgtgtgataaaaatccaaaactcgtttaaacgacatcgtatgaagggtcgcataagcgaagaaggatataaaaacagtcgccgagaaagtctcccgctatg

SEQ ID NO: 20149 - DNA, 3003 bp, Unknown; identical to SEQ ID NO: 20148
  misc_feature (1)..( 3003): 2750-1469P.txt file - cDNA_ID_1824577; gDNA_ID_2926185; Annot_ID_140756

SEQ ID NO: 20150 - DNA, 3003 bp, Unknown
  misc_feature (1)..( 3003): 2750-1469P.txt file - cDNA_ID_1824589; gDNA_ID_1620712; Annot_ID_49036
cgtccattggctttcctgtcacgtggtcaggcctatggcgacccattatgcaaagtctaaacacagtaagctgcgggcagttctccgacatggctgtcacagctccattggtcatattctggcaaaagtacaggatagattccagtttcctacagccctctgaaattgcttggaggcctactcccgagacaggaccttcactgtcttcacgaggatcaaaagggaaaatccgaagctcacggagctccttgcatgtggcagccactgcctgtagtccttcatcacgtatcgagtcaagagcctgcattataaaagtttcaagatacgcatgtaactcaaagtcctcggttaaaggatattacactatactatacaatgagatcaataaagatacatacccagaagactcggatattgtgacagttgcttatgatgggcttgagcatgtgaggagaaatgttagcataactgaagttaagagaggtgagattagcacaaactgaagagatggctaggaggtattccggtctaaattccctgaatcctgagagacaaactatggatttacaagcacgaaaagcagctgcataatccggttgttgttctccctgaggcacattgtctggactaaatgaccccgtcccaagactcgttaactgcggcgctcgaaccattagtcgatgcagctcttcaagggaaacaaacctgttcgttctaagtttcttcaagaatggtgacctaaccacgagctcctccaatgccttgaaattgataggggattcaacacagtcaaaagacaaagactccagatgagtttcaccctcaggaaaacaagaaatccaatccaactcatcatctgtgacttctgactccatcaaatcaaggacctttagctgcctgaaaacaaagtcccacttgataagcatttctagaagactctgagaacaaacaaacaaacaaacaaagagaagagatctacaaagtacctgcatttgttagcaacaatagcaataccactagtcccaaaaccttcacagcagaccaaagtaagctctttgaacccaggaaacgactcagcaagaagagccaaatcatcatccgtaacaaacatacgcttcaaatgaaccttctcgagccaaggataagccttagctgtagcagcaacccaaggagagaattgagctccccaattaggaggcatgagattaaaatcagcaaacctaggtttccctttaagcacaagagacctaacacgcttgaaccggtgaataagccgagcaggagagagcgagtaacagtttccaataaaaacctctaatcgagtctgagcctcgacgcgataccacgatctgcagaccaatgagactgcgttgcgatcgcatctggaagtgaggaactgaagcacgttctctaaaacgttctcaaggacatgatctggacacggcgggggagaagatttgaaatttcgagacttgttcgtgaatgtagcggcggaggaagaagaggaggaggaggagcaaggtggatttaagttgagatatttctcaacatcctctgacattttagctgagctatcttcttctgtcatacaagtaagtgatgaaaaacaagaaagactctgactttgatcttatccagaatttatgagctcaggtgctctctttctgatacaaaatctgattcagatgaagaagagagataggtgaaaaaggagctggtcttggtgtttggactctctctctctctccattttcacctccattatttaggagactatgtaaaagaaaaaaaaacaaatatttttggttttgcacattatttttgttgatgaagaaataaaaagaatcatcaagtattttgtgaccaaacatgatttttaatcctattaaagatttgtacttctattttaaggtgtgacaggtgacatttagagttttatgtaagtggtaatcatgtaaacttgttgaatcttaaccaaaattaaaaggatttaaaagtgttttgtactgtttctttaaatgaataatactaatatctaaagtcactttcatccttttttaagttaatgcattttacatgaatttaatttttatcatacaatcaacttttcgattgtgttctcttaagaaggcctcaaggctttcgtgtaaaggaaaaatgtttgggcttattatatctcataatatggtggccaaaacaagatcaaaggtgattaatggttggtttactgccaataatgggttttgaagataagtgtactgtatgccttattcgattatcttttcaaaaatgtgtttgcttaattttccacaaggcaaattgttatagatatcttcaaatatgcttcttaaaattttcaaaaggcaattatttagaatatggataaatttcaaataagttccctaaaagaagaaatttcgaagtcaagttttatagaataagtcataacgacgttgtatccatagtcttggtcactaactactaataaatgggtcataagtctatagatatttttcaaaagctaggagtcgtattagtgtgaaattatggtataaatatactgaccttccattacaaagaatgacgtgtaaacaaccaaatattagaatgtggcaagtagtcgccgaacacgtctccttcgtcaaagtctccttttctgacttctctttaacccccaaccccttgttactttaatttggctctacatagatttgtaatcaaacacaaatcacaaatctatatattttcccttaattactttggctttctattgattaaagcttctttaattccaatttgcaatttaaacacctatctctttcccaaatttgagactttcctaattaattaaaagctttgctctgtatatttgtcgttataaatttaattttaaaattcgaaactttttttctgcctttcctctttctctctctctatctatcaaacactagacttgaagaaatgcagtgaaattgaaattgagtagaagcagaagagaatatg

SEQ ID NO: 20151 - DNA, 3003 bp, Unknown; identical to SEQ ID NO: 20150
  misc_feature (1)..( 3003): 2750-1469P.txt file - cDNA_ID_1824589; gDNA_ID_2926185; Annot_ID_140750

SEQ ID NO: 20152 - DNA, 3000 bp, Unknown; identical to SEQ ID NO: 4523
  misc_feature (1)..( 3000): 2750-1469P.txt file - cDNA_ID_1824593; gDNA_ID_1620712; Annot_ID_49035

SEQ ID NO: 20153 - DNA, 3000 bp, Unknown; identical to SEQ ID NO: 4523
  misc_feature (1)..( 3000): 2750-1469P.txt file - cDNA_ID_1824593; gDNA_ID_1620712; Annot_ID_165482

SEQ ID NO: 20154 - DNA, 3000 bp, Unknown; identical to SEQ ID NO: 4523
  misc_feature (1)..( 3000): 2750-1469P.txt file - cDNA_ID_1824593; gDNA_ID_2926185; Annot_ID_140749

SEQ ID NO: 20155 - DNA, 3000 bp, Unknown; identical to SEQ ID NO: 4523
  misc_feature (1)..( 3000): 2750-1469P.txt file - cDNA_ID_1824593; gDNA_ID_2926185; Annot_ID_200552

SEQ ID NO: 20156 - DNA, 3003 bp, Unknown
  misc_feature (1)..( 3003): 2750-1469P.txt file - cDNA_ID_1824597; gDNA_ID_1620712; Annot_ID_49031
gccaacccgtcccgtaaaaaaactcatttattttattaatgttgatcttatttatcatatgtttatgaatcatttatttttaaaattatctagtaattaaatgctatcaaatatctctgcggtttgatgattataattgaattgtaatagtcatgcagaaaaacaatatcaataatgataattttgtagtaattaaatgatattaaatattttgaaagttttattttagtaaccaatcgtgtagttaatgtagagagattttagaaaaattgttaaatgtcaaatatttaattcgaagattttttttctaattattaaaaacaaatattaaaatccagtggcaaccattgtaaataagtctcaactacagaatttatttcacaaaatggctgcaaaaatgtatatatagatgtttaaagttaatttaatagccaaattaatatcttctttctatccataaaatcataccctaaggtttactgagtttattaggatgtatcaattaaagcaaaacatcccttctaattaatcattttgagtgactgattaataaggaggacatgttaatatatgtagaagcattaaaacacgatggtcttaaggcattaagctattaagaatttttaaaaagtttatgcatggtctcacactgacgaataaaatacgttatcatctttgatcacgaataaaaaatattaatgaaacgagaatcatgtgtaaagaagaaagttcatactagtttcggctcatgtgagccttgtagaggtttgacttggatgctatatatatgtagacatgagctaggcatttatctcaaaccaaccaaccaatatatcagatggcttccatggatcacaatcattttctttttcctctcctcttcatcatcatcatctcttccttgcacgttttgcgtgcttcgaccacaccttcacactcacacaaactaaaatccgccactaccattagaaaaatcaaccgtagaggaccttacattggccttgtgacggtctttgagaccgaagaagatgcttttctcggcagtgttgatttcagactcgatcctacgcatcctttcctcgatctctctggtatctacactgatccctaaaattaccacttgaattggtttctattaagtttttctaccttgagagagtctctagactcttgttcctttgagatgaaaatgtaagtagtttctgattttaatgagtaaatgaatgcaggaagacgttttcgtatagggaagattcatggaaagaaggttgtgtatgtcagatgtgggataggaatggtgagtaagttgaccccaaaataaaaaagtacaacgtgaaaaagagtttatttggttattgtaatgttatttcacggatcctaataaaaaattgaaatgataattaaaaaacatttatattaaaatcacaaaataaattgatgtactaaaaaacatttatattaaaagtatcaaaccaaaactttctataaaaaggagatggtaaatttttcttgaattttatttgaaggtgaacgcagcagcagcaacacaacaaatgatagatgtgttcagtgtgaaagggattgtgcattttgggattgctggaaatataaacaactcgatgtccataggagatgtgagcatccctaagcaaatcacgaatgctggcttgtgggattggctggtatatacaaaatttacatgcacaagttttgttattgataaataattgcttctccttcatattgtctgatgattttagttctgatcgtcaaacagaatccaggcaaagcaaaaggaaatgaggatgtagcgtacttagatgtcgggaactataatgttccacaaggaaacaataagttaggaactattggatacagttacgaggaattatattcagtcagtggtcacatcaattcaccaaagaaagtgttttggattaatacaactcaagagtggcttcatcttgcagctgatcttgaggttgttaagaatgacatatgattagattagaatatattttttctaacaaaagactttattccatggttgatggttgttgtatgaatgtagaagatggagctattgcagtgtgtgaatgcaagtctgtgtcttccaaataaacccaaagtagtagttggattaaaagcagccactgctgacatatttgtggataatgcagcctatagaaatttcttatacgatacttttggagtttcctcctcagacatggagagttctgctgtggccatggtaattattcacgtttctaacattgtgattcattcctttcactccattttttttttcattgaactttcacttaattttgtttgcatgtgttttggattcgaccagacttgcgtgtcaaatgggtatcccctaattgtgataagaggattatcagatttagcaggagtaggagataacactgttcgaaagtttggatctttggctgccactaacactgccaaagctgttttagagttcattaaaaagctcccaccgtcataattcctacgtgtaacctatcattatggatgtttgaatctgtattttccctagtttttctacgtacgttaaaaataaaattaataaaatctgtttttcttttctttaatcagcttcttgcatggaacactttaatttcagccttcaaaactagaattacaggtctctttgttcatatcaacgatcccgtgacagcaacaattcaaatatgggcaaaaatattttgtgtttataaaatagtatttttttggaaatttgtagagcgtgtattatcgtccacaaaatttattttagtggtattgtaggatatttgtcaaaaaaaaaaaaagtgcgcagccagcagcccctcatgtttaatgcatacacaaaggttatatcagctagtctagagacgagaagcacgtggaaagaagaaactatcaagttggacttggatgatatatatatatatgcagctgtggatttgaatcgtaaaccaaccaaccaatcagatg

SEQ ID NO: 20157 - DNA, 3003 bp, Unknown; identical to SEQ ID NO: 20156
  misc_feature (1)..( 3003): 2750-1469P.txt file - cDNA_ID_1824597; gDNA_ID_2926185; Annot_ID_140745

SEQ ID NO: 20158 - DNA, 3003 bp, Unknown
  misc_feature (1)..( 3003): 2750-1469P.txt file - cDNA_ID_1824601; gDNA_ID_1620712; Annot_ID_49030
tgtccacatctacagacatagatagcaagagtaggtgacgctaatcatgcaccaattgaaaggcaactgtgtcactattgacaaataaaattgagatatatttttaaaatttacgagaatgaaacagtagacataccgcagcaacggcattttcaaacatcagagaaaaacacagtattcaaatgctcttttgaaacttttaatgtaagcgagaggaacattatacacattacatactagtgcttcacccatatcacattcacaactcaggtagtgatcctttaacaaatccatcgagccaaaatatatcatgacaaggggaacctaagaaatttttcagtacatcataattattcaccctacatttctacacagtttgacaacgaggctaggcagttggattcacaccaaaataagaagatgttatggaacttagcaaaaggaactgcccagctatagttctaagctaagtgatcagtgatcactggagttcttattctgatcaagcgcctccctttggagtaaaaagagctcatttttcttattcaacatgattagagaaaatcaaagtcaccaatgaggccagggcatatagggattggagtcaaaaccagttactctctcaaaacttcctatgaactttcatgttcatccataaatcaaatgtttaggctgaagtccaagaagaaactaaactaaactgctaagattgtcaatcatcaaacaaacaaaaaagcatctgacctgatcaagtacaacatcggtgatcatatctccagctacctccttagactcagagaccacagctaactcctccgttacccacttcctcccgccaggactgggaaccatccctccaaatctctgcagatccctcagctccttgtgcatcgttttagccgccttcttcctcgccatagcaaacacaatgtgatccatggcttcatcattcatatacacctcaaaactaatctcatctttacaaggcacgacagagttgaatagccttgagatcagatcgtgtctactcttaagctccaaagtcgccaaaagcccatggcaatacctacgcccactggcatagaacttaaacacattcgtcgcttctttcagcaacaaaggagagtcttctccttcaccaactccaagcaaactgaagttcttctcaaaaatcgtatctttaagaccaaatttggaagcccaagccaaagcgaggttctcattttcacgtttaccagtgaagtaattgatagcgtaaccaatcaatatagagacgcaaacgatctccacagtgtacgattgcatcttcttcggaatgtcagtatctggagtttctgaagcagactcaagatccggcgtctgtggatcggcaggagaggaggcgtcatcggaaaaaaccggagactccgtagatttctcgtcctccggcaatccttcgaactcatcttcatcccagtaatcgaaggagatggaggacgaaggcttcacggtctgagtgggaggatcagatttagatgcaggagtagaatcagaatcgggagatgggtccagatccagaaccgttgactcagactgagtcagaagaggaggacggagagagtggtgaagctcagtggaatcttctgaaacatcgtcgtcttcagcatcgaaaccttcgaagtcggaagaggaagaagcgagaacatgatggtggaggcagaggaaagcgatcagagctatggagaagagagaaaagagacgattcatttttggatccggagagaagaagagtcagagctccggagaaaaagtttaaaacttgttaattagctggttgagtcgtcgtgctatagcctaagccttgcttggccaccaccaccagatccttttttttttgttccaaaaattcatctgacaaattaaaaatattaaaggaaaataagaataaggttgagttataatattttctcgttggataggatatattaagatttctaccaaaaatcataccctaactaaattttcatccgcggtatatcgcgggaacaatttatactttaaaattaatatatataaaattttgcaatttgtaactatctatgtagctatctataaaatatttttattttatagtttagaattgttattaagtaacgtcctgccaaacccgtcccgccaacccgtcccgtaaaaaaactcatttattttattaatgttgatcttatttatcatatgtttatgaatcatttatttttaaaattatctagtaattaaatgctatcaaatatctctgcggtttgatgattataattgaattgtaatagtcatgcagaaaaacaatatcaataatgataattttgtagtaattaaatgatattaaatattttgaaagttttattttagtaaccaatcgtgtagttaatgtagagagattttagaaaaattgttaaatgtcaaatatttaattcgaagattttttttctaattattaaaaacaaatattaaaatccagtggcaaccattgtaaataagtctcaactacagaatttatttcacaaaatggctgcaaaaatgtatatatagatgtttaaagttaatttaatagccaaattaatatcttctttctatccataaaatcataccctaaggtttactgagtttattaggatgtatcaattaaagcaaaacatcccttctaattaatcattttgagtgactgattaataaggaggacatgttaatatatgtagaagcattaaaacacgatggtcttaaggcattaagctattaagaatttttaaaaagtttatgcatggtctcacactgacgaataaaatacgttatcatctttgatcacgaataaaaaatattaatgaaacgagaatcatgtgtaaagaagaaagttcatactagtttcggctcatgtgagccttgtagaggtttgacttggatgctatatatatgtagacatgagctaggcatttatctcaaaccaaccaaccaatatatcagatggcttccatg

SEQ ID NO: 20159 - DNA, 3003 bp, Unknown; identical to SEQ ID NO: 20158
  misc_feature (1)..( 3003): 2750-1469P.txt file - cDNA_ID_1824601; gDNA_ID_2926185; Annot_ID_140744

SEQ ID NO: 20160 - DNA, 3003 bp, Unknown
  misc_feature (1)..( 3003): 2750-1469P.txt file - cDNA_ID_1824619; gDNA_ID_1620712; Annot_ID_49024
tcgtagttgtaaggattagcggagagctccgactccaaggttacaatctgctgattcgactcggcttcatcttctgagtcggaatcagaatcgccggaatcatccgatgaggggggatcagctcgggcagggttttcggctgaagcgtcttccatcttctggtcagtgttactgacgagttcagtgtcatcagccatcatcttctcaagtttaagagttggggatttctgggtttagggttttaagctccaaatacaactttgcaaatagcaattcctctcaaacaccactagtccttgcgtcacatttagacctttttatttcagttcatttcggaagatttttcactatttattctttttacgtatagtattttataggtttttgtaaaatcaaaaataacgaagattactgtaaaaatattacaaattgttttttggtcaaaataccacaaattcaaaaactatattcaaagagcacataatatatgttatccttcttcaaataccacaaactatgaaactattaataaatgagaaaactaataatccgttttattccttataaatccaagtttctaagattttcacacatattaagcaaacaaattaaaatttgattacagatgcatcatttcaatagtattcaattatttgtcttggagtatacaattcatcattattaattaataaaatgcataggaacttaaaataattctttttaaaaaaaatctatatttttaaataaaattttttttctaacacttggattaattaggaacactgtaaatatgtcttagcctcttaggatatgaaaaccaatatcttcaattagtttgtcttttattcctctctgccatattacatttgaaattcgttgttagtttattactcaaacaaagtgttttttttttatggatatgttgctataatttataaacgacaaaatttaacaacggatatttctgttgttaatagcatgttttcttgtagtgatatatatatatatatatatataaatcatatagtaacgaataagtaattagagacaacagatatttctattgttaatagcatgttttcttgtagttgtagtgaataaatcacagagtaacgaataagtaaaagttgtctctaatctacactattattgagtaattgactattgagcagctagcataacgtaaatcttttcacctgtttgtctcccaattattttattttaacacatttttgagacaccaagtatgaatgctatatgtaatgccaaacatttgccagacaagtgcacatgccctgtgttaaaaacgttgcttacaatctccaccagctgtaatattgtgcggatctcattctgataaaaattactctattcatgaacctctcgacacatttatatatatatgcgatactactatagcttagaagtccattcactatcaaaacatatatcagaagaagaagaagaagaaagagagaacaaatcatgagtggctattccaagatggattcaacagaccagaaacttgagccggaccacccggtggtcgatcctcagattcagaagcccgatcttgaacctgctgaaatgaaaccgaagctgagcaggaacaggtcagtgtctgcatcagcacaagcggttccttcaccaataaagatgtctatgagaagatcttcgtctgtctctgaacgctactgtagaatctatgaccagagctctgccacgacttggccgcttcctttccatgaaggagatgaagacgaagatgatgatgataaagagaaggtgcacaagaagaagaagagcaacaacttcaagaaaaaagcattcgtaaaggcttgtaagcgtttttttgggatctcgtgaaaccagtttttgtttcctctacctccatatctatcatataatagatctcattgttattttcgattagagtccatctttttcatgaaacgtttaatacaagaaatttttctttatagttttatcgatcgctttgtgtattggatcagtggtttaacgtattttgcattcttgatgactagtgagatgtgatatattacacgatttagattttcttttatgtatcttttactgaaagtcacaacccacttacttctataactatagtagtagtagacccattgtggtttgtgcgtctgaatccgtcgaaagataacaaagaaagaaaactgtgtaaagatagaatttaacaaattatcatacaagcaataagatgaataaactaaatattactttatttggaagatgatgaggatccttgactccaagattgtccttttgtgtaaaactcgagagagagtcgtccagcccaatgcacttgcacatggagttcgaatttatttatttttattcgaatttatttggtaactctttggtccatgaactttgaggtatatacagtaattagggataatacccataatcaaaagacaagtttatgacaaaaatgtcgccaccgcatttaccaacaagtattccaagagttaaaaaaaagtctattgctattgtctcagacatcaaactggatcggtagtgtaaactatgtctatatgaacaaaaacggtcgtataaaggttctagcaaacaacccatcaaataccatcatcatttctctttcttggttggttcacccaaaacgtacctcaaaatctcaagctaagtgatccgtggcatttgagaggtttaagagatggtgggctttagtgaaaagtgtagatgtttctcaccacaagtctctagtaatgggtgtcaaactcacaaacacttgttggcctattgaagcccatccatcttctcttctcgaaacttcaagtggggtccacaatttctctccctctttctcccaccttcctcttatcttctctgccttctatatctcttcctcctactttcccttagggtttttcagcttcaaaccctccttgcactctccgcttccctccgttacctttacttctctattgcttagctcgaaaaatg

SEQ ID NO: 20161 - DNA, 3003 bp, Unknown; identical to SEQ ID NO: 20160
  misc_feature (1)..( 3003): 2750-1469P.txt file - cDNA_ID_1824619; gDNA_ID_1620712; Annot_ID_165473

SEQ ID NO: 20162 - DNA, 3003 bp, Unknown; identical to SEQ ID NO: 20160
  misc_feature (1)..( 3003): 2750-1469P.txt file - cDNA_ID_1824619; gDNA_ID_2926185; Annot_ID_140738

SEQ ID NO: 20163 - DNA, 3003 bp, Unknown; identical to SEQ ID NO: 20160
  misc_feature (1)..( 3003): 2750-1469P.txt file - cDNA_ID_1824619; gDNA_ID_2926185; Annot_ID_200543

SEQ ID NO: 20164 - DNA, 3000 bp, Unknown; identical to SEQ ID NO: 4515
  misc_feature (1)..( 3000): 2750-1469P.txt file - cDNA_ID_1824635; gDNA_ID_1620712; Annot_ID_49019

SEQ ID NO: 20165 - DNA, 3000 bp, Unknown; identical to SEQ ID NO: 4515
  misc_feature (1)..( 3000): 2750-1469P.txt file - cDNA_ID_1824635; gDNA_ID_1620712; Annot_ID_165464

SEQ ID NO: 20166 - DNA, 3000 bp, Unknown; identical to SEQ ID NO: 4515
  misc_feature (1)..( 3000): 2750-1469P.txt file - cDNA_ID_1824635; gDNA_ID_2926185; Annot_ID_140733

SEQ ID NO: 20167 - DNA, 3000 bp, Unknown; identical to SEQ ID NO: 4515
  misc_feature (1)..( 3000): 2750-1469P.txt file - cDNA_ID_1824635; gDNA_ID_2926185; Annot_ID_200536

SEQ ID NO: 20168 - DNA, 3000 bp, Unknown; identical to SEQ ID NO: 4514
  misc_feature (1)..( 3000): 2750-1469P.txt file - cDNA_ID_1824639; gDNA_ID_1620712; Annot_ID_49016

SEQ ID NO: 20169 - DNA, 3000 bp, Unknown; identical to SEQ ID NO: 4514
  misc_feature (1)..( 3000): 2750-1469P.txt file - cDNA_ID_1824639; gDNA_ID_2926185; Annot_ID_140730

SEQ ID NO: 20170 - DNA, 3000 bp, Unknown; identical to SEQ ID NO: 4512
  misc_feature (1)..( 3000): 2750-1469P.txt file - cDNA_ID_1824643; gDNA_ID_1620712; Annot_ID_49015

SEQ ID NO: 20171 - DNA, 3000 bp, Unknown; identical to SEQ ID NO: 4512
  misc_feature (1)..( 3000): 2750-1469P.txt file - cDNA_ID_1824643; gDNA_ID_1620712; Annot_ID_165458

SEQ ID NO: 20172 - DNA, 3000 bp, Unknown; identical to SEQ ID NO: 4512
  misc_feature (1)..( 3000): 2750-1469P.txt file - cDNA_ID_1824643; gDNA_ID_2926185; Annot_ID_140729

SEQ ID NO: 20173 - DNA, 3000 bp, Unknown; identical to SEQ ID NO: 4512
  misc_feature (1)..( 3000): 2750-1469P.txt file - cDNA_ID_1824643; gDNA_ID_2926185; Annot_ID_200530

SEQ ID NO: 20174 - DNA, 3003 bp, Unknown
  misc_feature (1)..( 3003): 2750-1469P.txt file - cDNA_ID_1824665; gDNA_ID_1620713; Annot_ID_49054
ttaagttgcatcatgagaacaaagctaaggagcttgaagtgagtaacaaacgcttgcttgaggaatgtatgaaagagagaagggagaaggctaaggttaggaagacttttgaggagatgaagaagacaatggagagtgagagaactgctattgttgatgagttgaagtcgaagaatcaggagcttttgttggggaagaagaaagaggaagaagagttagtgaagatggagaataagtatgttgagttagctgagaagtttgatgttgttgaaaaggaatgtgcttacttgaagtcactctatgatgcggaagtagtagcttcggttactcaaagtgctgtaatctcaggggttggagagactgataatcttattggtcaaggagagaacgaggctaatcagaatgtgaacaatgctgtgacaggtatacatagacatctctgtacccaagtgttgtttagtttacaatgacatttcttttgaatctatctttgtgtgcagatgcgataatgataagtgatgatgaaaatgataataatccacctattgagagtaacataagctctcatcggtctggtgatagaaaccaagaagaagaaggcaggaacagaggaaactcagcgactgagaaccgagcttcgggagaaacctttactccggtatctgctaatcatccaccgcctttttctccttcatcgtcatcttcatcatcatcatcttcagacggcgctgagattgtgcttaagctgcctcgtaattggcctgaatgggcaatcccgaaaggtcccgggaaggattccaacaagccttagaacatttcagatgcaacagagagccaaaagaagtaaatttgaagctgcactcttaagttaagctagttatggaaatcttcttacatattgctttctgtttttgtcaggagtttatttaacaatctctggaactacaacaaactattctatctactatcaaatcaattattcattcatgagtataataatagctgaaactttctgtgttacaacaatttcaccataactaaaattgcatttgcatttgaatactgcaaacgcaaattggctttgtatacgcatcttgtttatatatggattagttttttctacataattaatgaaagcttttgtaaactaactcttgagtactaactaataagaaagttccgtggcaaaataatttccgaatcatcggataatcatccatttacgaggttaagttccgggaactgctggtgttaaggttctggaagatctccggaagattggcattagtgagtttgattctcttgctgatctgttgtttgccatgccatgaatatgtgcaacagctcttctctgtgtagtgttcatcacacatgcttcaaactaagcttatgcagctccttctcgactagcttgtcgcttgagttgtctatgccgcggtatagaggtttaaagtcgtcataaacctgaatctgacccttgaaatcagcattagacagtccttaaacttttagagccagcaaatatgaaagacaatcctgaaaaatggataatcataagaccacaaaagtcttttgaaaccatttaagatcaggagccagtacactatccgtctatcagaatctggcaataaatattatcagaagcttattgattatgaagttaatacatcttaaatagaatcagttaagcgttttttgtaaatctaaatcacatgtgaaatttctttatgtcacgttttcatttgtgtaaaacaatatcttttgatttattaagcaaataatttgcagctaaagctctcaagattcaaataaattgaaatgtaagtagtgtaagtagtgatttcttatagaaatagttgaaatctaaaagtattaggacactgatgtaagtattgttaaactaaagagatctatcaggaaatcaaatcactatagttttttttttttttttaaattccttgagtttatcaaacaaaaaaatgtaaatgtccctagcaagtactgtaggttcattttttttgtttcaaaagagtatgttatttcttaaaaatcgccaaagatagataagattcgaaatttgcataaatgtggcaataaatattatcagaatctttttattgaataatgaagttaatacaccttaaatagagaattaagcgttatttagatctaaaaccacatgtgaaatttctttatgtcacgtttttgtttgtgtaaaacgatctctttgagttaatttgcaactgaaagctctcagcattttacattaattgcaatataaatagtgatttctcatagaattagttcaaatcttaaactattaggacagttacgtaaacattgttaaactaaagggaccaatatggaaacacaaatcactgtagttaatttttattattatcttgagtttatcgtctatcgtgttcgaattctctgtcgcttacttaaacacagtcaaattcattttctgccttagaaaagatttttatcgaaaatcgacgtttttgaaaaaactcaaattatcgtcgttttgttctcagatttcttctgctctcttcttcttctccttcttcttcgttccaccgcctctgttgctttatcttcttcttccttccttcgattgttgattacgtcggtggatctttgttctcctctgtgttgttttcattgctagatttcgtcaatgattggcttctcacgattcgatttttccggctcctgttcttaatttcctctgaggtagattagtaaaactctttgtctcgtaaacattgttcgatgatgaaattagaaagttctcactcttgtttgccaaatttgggatatttctggaattgaaaatgaatcgtcatttttttcaatttctgaggattttgttacaattgttttttatttatgttagaattgagattgtgtgatgaatatcagtaaccctagacaattgtgaaatcaaagctatgaaaatcttttgatgctatgtttcctatgatacagagaatgatg

SEQ ID NO: 20175 - DNA, 3003 bp, Unknown; identical to SEQ ID NO: 20174
  misc_feature (1)..( 3003): 2750-1469P.txt file - cDNA_ID_1824665; gDNA_ID_2926152; Annot_ID_139342

SEQ ID NO: 20176 - DNA, 3003 bp, Unknown
  misc_feature (1)..( 3003): 2750-1469P.txt file - cDNA_ID_1824669; gDNA_ID_1620713; Annot_ID_49053
ggaattggagtttccggtcaccgacacttgaactggggaaaattggccgaagcggaagacgaagaaacgaaaagcgagacaagttataagtgttgcagcgacgagttttatgagatatgtgttttgttgaagattagagattgattcccattttagcttcatcttcttcttcttccctcgcgctgagagatatacgattttttttttttggtcagaaagtggaatgtttttgattccgtacttattgcctaagcgataaaccaatgaataatagaatccaaaaagattagtgagtaatttaatgcttgtggggttaatgatatacagaaagttaataaatgaaacagagaatgattaatgaggattctaaacaaccgtaattattctctctctgattttaagtaatgtttaaggttttttacacatattacaaaagtttagtttaatttacctttttttgcataagtaactatatctaagtcaaccaataaaaaatatactatagaatattattggtcaaaaaatattaaatacatttaacttttatattgaaagttgaaagcatcatttaaaatcggaaaaaacattctctaaattatcatttttaatgatatgaaaccgtcatcaattgtgtcaatatcaataaaaacgatctcttcagtagagatgaaaaaaaattgtatcgcatatgtcacaactaatctaatcgtttatattatttaaagttttaatttctaaactcataatttttaccaattgtttcaaaattttcacatctgcaattttaactgcaaaagtctctatattttctacggtcaaattccttacaccaaaattttctacaaccaaaattgatatagttagaaataacacttgttaccaatcggtcctaacactttcagattatagatattgcggttaattagataaaaaagattcaaaaatatatttgatttctaaggacaaactaaaaaaatttaggagctttagaaaaattatgtttgatttccaattattctacgtggttttagtaaaagatgtgtttactataaaaaccttgattgtaattgtttataactcattactaaaagttgtgactgcagaaattacgaaactaaactactacaaaaaaatgtggagaaatgggttaaaaaaaacaaggaaaaaaattcaatgttaaatcaactgaaatttttttcatttaattattcagctaattttagggaagttatcatatcactatatatatatatatatataaataatacaaacaaacgatgcgtagaagaaaaaaaactgttgtccggttcactgtccagatcgggtttaaaaacattgattttcatattatattccgaattttgttttgccaaaaatccaattacttaaatttcaggtcaatttatgttaattttttaacataacccgatccaattcaaattgaaacaaatttatatttctcttttaatagtataggaatttgcacaaatgttatgtaaaaaacggaaaattggttttttcatatctttagtttgaactatgctgcatttatacacgtattataccacagttgatttaacctaaacttcaatttgatatttaaactttcatttttatacgaaaacatacattaatgttacaatgttagaatacctttaatttctgttgttaacctgaatgttagggctgggcaaaatattcgttcgatccgctttgattcggtatatgatttggtttgattcgaaaaatccgaatatccgtaagattttggaccaaagcaaataggaaaatgtagtattcgtaaaaaccgaatcaaataacaaattttaaaaaaaaaaaaccgaatatccgcttcgatccgtatctttttatatatatattagaaaatatagttatatctatatatatatcataatagtttgtgtattgttgctattttacgtttttatgttaaaatgtttgtttgatcatttttctcatgttatgttttgatcaacgacatcaaaaactatcgggttttagttttcggaattagtttgataacattttgtagactggtggtaccaacaagtatttagtttttattttgaaagcatgttaaataaaaactttgaatatctgatatagttatatagtatatagattttttttaatatttaaatatatcaaagcggatatccgcaaatatcacaaaaaattctggatattcgaaattccggatatccggaaattttcgaagcaaagcaaagcaaatcacaaaatcaagtattcgtttaaaacgaatcgaataacaaatatcacaatttttccggatatccgtttcgtacccagacctactgaatgccatatataaaacggtaaaaacagaaaattaaagttctagtaaaaaaaacatcgcatcagttacaaggtttggattaaattaaaaaaaggtttgggttaaattagcttaagaatgaacaatttattaattatttttttggtcacatggaataaacaattaattaatttgaataatattacttaaatacatacaaacattatctgtcatcttcgattacgttatcattaaccaacgtttaggaggactttgcttcttcgtcttcttctctctttaggttcttcaagttcgcaatcctggtaagattttctcgagaaaattccatttctttctatctgattctgtttacattgttgaatgcttgaaagaatctgagttttaaccacactctctcttccctgttactcaccattttctctctgaatcctccgaaacccatttcgatttccacaatctgagctcataaatctggtttaattctcatcttcgttgcatttcagtcataaagagaacataaagcttggatatttagggtttttgcagaatttttgattaagcttatgagtttggtaataatctgtagaaattggttgatgttgtttcaggtttgggtttaggacaaatcagagaagaagatgatgtttggtttagagaaaacgatg

SEQ ID NO: 20177 - DNA, 3003 bp, Unknown; identical to SEQ ID NO: 20176
  misc_feature (1)..( 3003): 2750-1469P.txt file - cDNA_ID_1824669; gDNA_ID_2926152; Annot_ID_139341

SEQ ID NO: 20178 - DNA, 3000 bp, Unknown; identical to SEQ ID NO: 4554
  misc_feature (1)..( 3000): 2750-1469P.txt file - cDNA_ID_1824697; gDNA_ID_1620714; Annot_ID_49082

SEQ ID NO: 20179 - skipped

SEQ ID NO: 20180 - DNA, 3003 bp, Unknown
  misc_feature (1)..( 3003): 2750-1469P.txt file - cDNA_ID_1824700; gDNA_ID_1620714; Annot_ID_49081
gtaattattgataagaaaatcatttgaatcctttagctgctgttcgattaaatacatgtgtctaacaagataaattatttgagggaaaatctcgaatctggttaaaaggaaacgttataaatttagtaaacaacacgcgaattaacatttcgttccagacaaagaagacttaaacgaaactgtttcatcaaaaaagtaaaccaaacgaacgataaccaaaccagaagtggtgacacaaaaccaaatctaaaccaaaaacagagcagcagcacgcaaacaactctatctttgattaccagccgccaccaccgcctccgtaacttccaccatcaccgcctccgtagccacctccctcacggcgtccaccaccaccgtatcctcggccaccaccgcctccaccagatccgtaacctccgctacgtctctcgtaaccaccaccgcctcctcctgagtatccgccgccaccgcctcctgagtatccaccaccgcctccgctgcggtaaccaccaccgcttccaccacggcctcctccgccaccgccgctacctctcgactgagcctcgttcacggtgatgacacgtccatcgagctctttaccgttcatctcttcaatcgcatccctcatggctttctcgtccttgaaggtgacgaatccgaatccccttgatcttccactctcgcggtcgttaatgatctgtaaacaaacaaaatcatacacatcagcaaaaacaatcgtggaaggaatataaaacaaagcgatgaatataaagcaaaaatcgatcgatctccgagctcatagaagcaggaagatgaacgtaccgatgggacaaattaagtaacagtaacaaagaacgagagagaacatagtaacagtaatcgaatcaagtaacagagaaacagatcggaatcagatccgtcgaggatcagaatcatcggaatcggctcgatccgggagaccgatctctcgtgtaacagaccttagaatcgataacgtcgccgaactgtgagaacgtcctttgaagatcttcatcattggtggcccaggcaaggccgccgacaaagcaccggtactcaacttcagacatttttttttggggaaaagaagagaaattagggtttcaaaatgtaagagagagacttatgtgatttgaggtgataagacgcagccttaatttatagaacaggtgtgacgtaataactagggttaaacatgttttctagggtttgctgaaagatttgtttcaacttactctgattaagatgtgtggttaattgggttagtggttaggcccacatcatgtgagcattttcgataactaatgattttttctcctcgtttcgagcaaaaaatatctttgtaagaatatcttttattccttaaatgacaattttgtccttcgtctcgtcgtcattatgtcatacaatagttgggtctgagtttcgtttattgggcctatctaatttaattggaaagattataacttccggcccaatgaatctgacggcgaaattagtaaaacaataaaatgaaataatatgcaaagactatgacgataatgtgctatggatttacatatttgttttgtcattaattatgacatgcaataaattcatatgaaaagattcttatcgcaatagcatcgtggacatgttacagtctgtaatatccaaactttagcatagacgttttttgttgtacaaatattttggtatgttaagtgatattcaaatgaaagctagatgtgcagatatgtgaacatataaatctttcaatggaattcaattttcaatcattgaatatttggatacactcgctctgtacttgaaatattttgactgtctgaatattatttttttacaggattaattattttgtataccaaaattagacggatgaagaatgaagatgtagtagttatacaaagtcaattacaaatggttcagtatcttgatttcgatttttgtgctgaaaatgctgactaaagcgtgtagaagagctttttcaacaagaaataacctggctaagatttttttaagaaatctgattattaatatatcgcaggtaatatgaaaaagtatcgtcgactttttataagagtgacaactaaatcattttgctcataataaagccacaattattattagtatattttggtcgttttaatacgaggaaaaataattgtcatacaaaatttacagaaatggagtagcatcgtagctcctaggaattcaattatttatttgcaaaactactaaaatggtggttatcatattaaacgtcagcagaaactttaagtatttttgaaatgatattaatttaagagttcgttaagctgtcttgggcgggatcgttgagagtcaaactcctcaaacgacgccgtattcagaacttcactttcaattactgtatctgcgtctcggtcacgagatcgaaccataaatcttgggaacgtgcacgtatacaacgaaagatccaccttctctcactttttttattttcttatactttcttctcttttcttcgaacggccgctgttcttgaccagtctgaagctttctctgtccagaacagttctgtaagaagaagtttttatcaaatattatataaaaatatctgtttcgtattatatcagactttccatctttctctctctaaatctaggacaaaaaaaaacatggaagagttagagagagagagaggcagcagaaaatgattggtaaacaacaatgaatcgtttttgattctgaagtgcacagagaaaagtaattgccagagaaagtcgcagaggtaacagagtgaagaaccttttttagtatatatctttgttgaataatcacaaaaagaaagtttcctttattgatcggattcgaaggaaacccaaaaaaaaaagagatttgattatttccataaatcgcgaagcttttttccaattgaatcttaggcaatgaatggctttaagtttttcgaagtactagtcgtcaccagggtttagagaaaccatg

SEQ ID NO: 20181 - DNA, 3003 bp, Unknown; identical to SEQ ID NO: 20180
  misc_feature (1)..( 3003): 2750-1469P.txt file - cDNA_ID_1824700; gDNA_ID_1620714; Annot_ID_165577

SEQ ID NO: 20182 - DNA, 3003 bp, Unknown; identical to SEQ ID NO: 20180
  misc_feature (1)..( 3003): 2750-1469P.txt file - cDNA_ID_1824700; gDNA_ID_2926217; Annot_ID_142297

SEQ ID NO: 20183 - DNA, 3003 bp, Unknown; identical to SEQ ID NO: 20180
  misc_feature (1)..( 3003): 2750-1469P.txt file - cDNA_ID_1824700; gDNA_ID_2926217; Annot_ID_203083

SEQ ID NO: 20184 - DNA, 3003 bp, Unknown
  misc_feature (1)..( 3003): 2750-1469P.txt file - cDNA_ID_1824713; gDNA_ID_1620714; Annot_ID_49075
ccgtatagatattgacctcaaacttagggaaaccctaatataagagcaaaccctagcagcgctatctccctcagcctcatctttcacccactactattcgccgttcgcttttccctcgccgtcgaaatcaacatggtatcgttttctatcatccttttctctaactaatcacctgtattcattttcttctttctcttgtctgaatcgttactttcgttgtcatggttacaggcgccgaagaaggataaggttccgccaccgtcatcgaagccggcgaaatccggaggtggaaagcagaagaagaaggttcgtttccgaatataatttaggtttaattggaatgtgtagagagatctggtttgtagtttctgaaattgtgttgtttaagtgaagcttgtaaatggatttgttttgcgattgatgttagattagtgttggagtttgcattgtctttgtacttaaatcgttgctctctttgtttgatggtaaacaaaaaaacagaagtggagcaagggaaagcaaaaggagaaggtgaacaacatggtgctgtttgatcaagctacttatgacaagcttctcactgaagctcccaagttcaagctcatcaccccttccattctctctgaccgtatgagggtatattatcaatctatcaactccttgtttcctcaattactaatccagatctagaaaatgatagttatatcatctggcagtgaattggtttgagcttctattgaatctagtagagaatattgtgaggtgttgataacttgatctactttacctaaaagctgtctgatgttgttggtatgcttgttcaggatatggttctttactttcacataggcttactgtgtgtctaagtagatactcatgtgttatataatgtcaatttggagcttgtcctcaacgtcaagcttattttattctctgtttctcctccctgttttttttttttttctttccataacttaacagatccaaacttgatgtgtttgatgttgttgaaaattcagatcaatgggtcgctagcaaggagagcgattagggagctaatggccaaaggtgtgatcaggatggtcgctgctcactcgagccagcagatctacactcgtgccaccaacacctaagatgtttggtttctttatccacctaagatgtttggcttctttttcttatctcttgttgtttgattcttcaggaacttgttagaatcttttgtttcgtattccgtttttttgagatatatggttatttaaaacgcatcaagacttctaaaattgagtcaatcctttgatatatccgttctagaattcggtaatggagttgttccggtttagttatgcatcaaataatttaaaccgtagttctttattatagggatttgaactaattgaacgaattcattcaaaatattatttgaatgcttggatttattttataaaggaggttatgtaatgtagacatttagattgatggactaatatgaatgaatatgatgaaatgaaaataacgcctacagcccatttgacaagtttcagtgtcccttaatattttgttaataaatacatttacttttcttatttttgtcttctaactaaagaattttagtgtttataattatgctaattggttttgcacttaaagagtaggatttattcaaataatttcccgacataatccatgcgtgatatgtcctttcaatttcgtcttctcacccgttaatcaaatgggcccagcttttcaatccatttgctaatctgatcaaattttcctataacgcttacaaataacaatttgcaaaacatcgtcgtcgatcacaggaaaacttccctttagacatttatttcgccatctcggaagcttagacgttggaatatatatctattttcttaactaaccgctgatttttgtattttcattacaaaaaaaaaaactattgtaatgccatattcaaaatagtatatgctttggtacagtagaaataatatcaaccaattaggataaattttctttccattatataattagtctccctagcttagaggcaaatttgtagtttgtgttacgacgtgtacggactatatagcacctcaaagttgggccaatgagatgaaaatgggcctgggtccacatgcaagcagacaaaagaaatcgacgtgtcccatatgagtctcgtagcaagagtatgggagaaaccagagtcgtccattttttgggttcagtgactgtcattgtcagatatctatagctttgttggtaaaatttcacatgaaaaaattacataataaatagagaagagattttggaagagagaaaatgcaatttagctcctcacgtattagcaatttaagttcttgtcttggtcttccctcgatttcaaacgacattaaccaaaaccagagaactacgaattattcggtgagttctctcattgatacgatcctcttctatatatctccgtgttcttctagcttgaaagcattttaaaagtttttacttttggaggtttcacattctctccctgaacgattttgctttattttgttcagcttcggttctcgtcgaatcttctgtttctctgtcgattcattgatctgaaaatctaaaaatggattcattctgatttaacttttatcttgttcaaactcatttatgatcccaaatttgttcgtttcattctttataaattagaatccttttttgttcttgtggcaattatcttcctccttttctctgttttgaaagatttgttacctgcagaagttaattccattgatttcttgaagatgcagtatctcttgctacttaaaagagttagattttttgtctgatacgttaaaattatgagaggctcgttcgttctttaatctgtgtggtcaaagtttcctactttccgagaatttctttattgttgtgttgttcactttgcatttataatagtttttactaacgagctttacgattctgttcttgtctcattccagctaaaaaaagatg

SEQ ID NO: 20185 - DNA, 3003 bp, Unknown; identical to SEQ ID NO: 20184
  misc_feature (1)..( 3003): 2750-1469P.txt file - cDNA_ID_1824713; gDNA_ID_1620714; Annot_ID_165570

SEQ ID NO: 20186 - DNA, 3003 bp, Unknown; identical to SEQ ID NO: 20184
  misc_feature (1)..( 3003): 2750-1469P.txt file - cDNA_ID_1824713; gDNA_ID_2926217; Annot_ID_142291

SEQ ID NO: 20187 - DNA, 3003 bp, Unknown; identical to SEQ ID NO: 20184
  misc_feature (1)..( 3003): 2750-1469P.txt file - cDNA_ID_1824713; gDNA_ID_2926217; Annot_ID_203076

SEQ ID NO: 20188 - DNA, 59 bp, Unknown; identical to SEQ ID NO: 4584
  misc_feature (1)..( 59): 2750-1469P.txt file - cDNA_ID_1824741; gDNA_ID_1620715; Annot_ID_49111

SEQ ID NO: 20189 - DNA, 3000 bp, Unknown; identical to SEQ ID NO: 4573
  misc_feature (1)..( 3000): 2750-1469P.txt file - cDNA_ID_1824783; gDNA_ID_1620715; Annot_ID_49096

SEQ ID NO: 20190 - DNA, 3003 bp, Unknown
  misc_feature (1)..( 3003): 2750-1469P.txt file - cDNA_ID_1824787; gDNA_ID_1620715; Annot_ID_49095
tggattaattaagatatcatacaaactaatcataatttgtagtctagtaccaaagtttgtattatcaccaattccagaatttatgcaagtttgccgataagtatgacaaacatgcatacatattctctttgtcttataaacccaaaatgttttagtatactctattcgtgccaaaaaaaaatatgaaagaaggtatcctccaactataatcaaacatcaccttttaaatgatttactaaaatggcacaagatcactcttgttctgaagttggttactagtgaaacatatatagaaaaatgaaaactggattagcaaaaaaaataatgtggaattaaaatgaattttaatcttctattttataatgaattgtaattggataaatggaaatgtttttcctatataagtttaaaaacataacgagacgaaaattttctaccgttaacaacaaagatgttcttgcaaataagataagcgtttttttattgcacaaatatatctataaattttagataaaatataaattcttacccattgagatttgcataatactattcagagtgttttttttccctttcgttaaagactactagtcagagtgttaatctagtaattcaccaattaatttaactatacttaaaaatattacagtttttaggaaacatgctagaaaaaacatatataattttgcaattatattattccatgcatacacatgtagagccaaaaacggagaaaaatcttctatataaacacaagttgaaaccattcatgtttattttaagcagttgcagtagactcttccacttctgtattcaattcttccttcttttttctcttataatataaataacatacaaagaaaatacttgcactcacaaatattgattaaagttaattagtgaaccctaagatttataaatctctagctatactctaccatatcatatatattacataatgtctagcagaaaatcacgttcaagacaaactggagcttccatgatcacggatgaacaaatcaacgatcttgtcctccagcttcatcggcttctccccgaacttgctaacaacagacgctctggaaaggtacaacgttctaatcaatttttcattatgattccttttaaaaaatttaatttcctctttcaaaccttaaatcttttctaaacctttttaaatcttccttggattagtagtgggtacttaaaagaacaaacctccggtttaaaaaaaataaaaataataactaatatatatcctccatcaaagtttaacagtaattctttcatctttctgttgttgcaaacaaacgagagtctttagttagaattataaataaatattaaactaatattccatatattccaatattgcatgtatgtattgattcatttgattgtgatgcattttgtgacgagtgctaaattttaatttccaaactaatcgacaataaatagcatgctgcatgcatgataattaaattgttaattatatataagatccttcttcttatcaatatattggttactttcaggtttcagcatcaagggtattacaagagacatgcagttacataaggaacttgagcaaagaagtggatgatcttagtgaaagattgtctcaacttttggaatcaactgattcagctcaagctgcactaatccgaagtttgcttatgcagtagaattagtgcaataaacgaaggatatttttttcttttcttttttttgaaaaaatgtcttctcagttttaattccccttcttattgtatttataatgtctggcagcttgtgtcccctgttaattatgcaatgttttatttttaatatatgtagggttttgtttttgtcagttgttgaacgaagcaaatggtttgggtttacgttcacattatttaaggcaacacactcaatatatgggcttaggtatttcttagattctaggcattccaaccaaatccatcacattttagtagcaaaaacattgattaaattttgaatttacgagaagaacaatgttttctagtgtcatgcatatacgattataacggtgtttttgtagttaatatcgataggaactaaactaacgcaagtcaaattttctgatcaaaattagtcgttaatttcgcttaatggtataaagtatattttaagaaggaataaaatatgctaataagcccccacggtttccatttctggtaacaagaataccattcaacgtctcgatcagcagcaacgttgaatcgttgatatctatatatagaagtatagaaccaaggggtaatttggtcattccagttctaacccacttctattacaagagcagtttactacgtaaaaacgaccggccttccactttcccgaaaacagccagcgcccgcacgtagagatttactgcatattcagttttcagtaaataaatagtccacaaaattagtggccttgcgtgtaaaaaattaaatttcgagatgctgtttaataaatgtatttattgcaaataagaaatcagatagcctttaatagttgacaaaaaatagccttttatatttacaagttcgtgtatttgttaataacgtgggattaatgagtttaatgtaatcgtgacaaaaacaaaagtgggattagtgtaatcgtgtgaatgtggacacttctccttcacggcaaaaggcacaagacgcaacaaatattttaatagaaaagaaaaaaaacgaaaacagacaacaaaacccaaaacaggaagacttaaacaaatcagaacacagtgtaagaaaaatcttttccataactgtatttttaactattcatatatatatgtttagtctctctgcagtttgaattcaaacatttgtgctctctcatctcaaaaactacactaaagctataaatcatcaatcatctaaaatcttcaaaaaggttttgattctgacttcttggttttcttttttgtaacgaattcatgatttttgagtctgattctgtgtttccttttgtttctcagcaatg

SEQ ID NO: 20191 - DNA, 3000 bp, Unknown; identical to SEQ ID NO: 4571
  misc_feature (1)..( 3000): 2750-1469P.txt file - cDNA_ID_1824794; gDNA_ID_1620715; Annot_ID_49093

SEQ ID NO: 20192 - DNA, 3003 bp, Unknown
  misc_feature (1)..( 3003): 2750-1469P.txt file - cDNA_ID_1824798; gDNA_ID_1620715; Annot_ID_49092
gaggttcatgaagcttgatccatgactatatggatccatagactagttctctggttggtgtaagaaggagcgggaaagattgtttttggtgtgtgtttctagtgtgtttctggttaggtgtttaaataacaagaacaagagttaatagtgtctggtaataatatctggttggtgtttaaaagttaatggtgtctgttttaagtgtgacatgacaatcaactaccaagtatcaaccacataccgacaacaagcattcaataaaagccatatatagtcatctaatataattcatgaaaagtcagaggttcaaagatataaggttaagattgttttaccttctatgagccttccattcggtaattgtatccaattcttacacaacagacatcaatcattctagcaactgtatccacttctccatttaacctcaacaaaaacagcataacaaaaacaagtgttatgtcatgaacgtaagacacaataaatctacaatcaaatacaaaacaagtctgtaatcaaatacaaaacaaatctgcaatcaaacataagataaatttacgataacaagcaaacatatatgtacttaaccaacataaaactgtaatcaatcaaaataaatctgtaagcaaattgataaaattaaatctgagtgtactaataaacaaaattgcaaacaaatccaacgacaaaatcctagttctacgaacggcaaacgacggcaaatcccaagaaatagcagcaatcaaaggaagacaagacaaaataaaattgtaacaaaaaaaaatacagattcgttggaaaagacaactccatgagaacagagaattggacagcaacctatgagaactaattttcctatcatcaattcccaattgtgaaaacccctaatttctgaaacaaatataaaccctaatttactatctacaactgaaaacaaagagaaataacacagatttgtaccatttatcatgcagatgatgataatagcggctcaaacaagtaattatgacttgcaactctctcaattcgaaggatgaaatgttggagagattttgccggcagaagcgagagataaatatcatgatggagaagaacaagaaagagagagagagagatgaatatcacgatggagaagaacaagaaagagagagatcgtcggattacaatggtcgccggcgtcttgagagagatggagagaaagagagaggaaaaacagaaagagaaacacgagtgtttttttgtttcctccttttatttattttttctacccactcaaaacacaacatgtgtactcttcttagttttaagaaaatatcttaattaagatgtttatcttagctaagatttgttgatctcattaaatttaatcacttttatacttaagaattagctaagaattgtctaagaaccaaggttggagttgctctaaagtcacaacgtatttctgacttccacgtcttctatctatttacaatttacaaaatcaatcaagcttttcaaatgcggtttaaaattgattaaatcatagttttagatcacataatctaaatcaaatttatgcttgtattttcatttgattttgacagaaaccaaaattttggaaatgaaaattgcaaacaacaattacataacaaaagaactgttatggttttgctgttctttttgggcaaactagttatattgatagaagaacaaacttgaagtagcagacaagtagagagtgcagttttagccaaaacgttagctaaccgattagacttgcaggaaacaaaagagaacttgatatgaaaaaaaaaacgactaagaaaggcaatatcgtggagaatcccttgtagattgttcgtagaggtctttgtatttagcagagatataaagacttgagagtcggagaaaacgttgatggaggtcaattccattctagtcgctgcgatcaacactgatttcatagctaaagccgaggtgagtgtgtgcgtgttgcagctccatggtggaagactcgattgttctaagttttgaaaagccaccccattccgcacaaacctgcatttgcagtctagaccgtatcaataaagcaagaaacaacctctctaggagataagatatgtatggaatcctccgtacaaggaagaaagatcaaagaaaccttagtaataaaaaaactgcatggatctggatttttggtgtcaacatcctccattacatgtattctgtatatttctcaacaaccttgaaataatgaaattttcaaattggattttattaatttgagtgaaagactactaacaaaaagttcttatccacctttatcaaattttctccattgttatgtaatccaaataaacattgtcctgcgtacaacgcatcaagaacgtatgaaatcaatattgcaatttgcaattgtattagcttaatgaaaaccaaatttggtgaggattatattttgaaatattgtggtttaatgaaaacccgtaaatcttgacaaaaaaacaaaacaaaaaaatgagaacccgtaaataaacgttgtataagtaaacgtggcattatattttagtagatttacgggtttgagatattttggttgaggtttactatatcatttaaattgggattctatactaaatttggtgatttgaatttaaaaatctttcaagaaatctatcaaaaatattctcatataatatgagtatttgtttttttttgtaaaagtgttggtcatatagaattaaataattaaaaattggccatctttccagttgccgttgccagccgtttcctacttgtgctttttcacttttccgttctctcaaaccttttttctctgcttccgtttcgtttctccgttcaaaacaagatcgaatcataaaaagtttcctcctttttttcttctcgaaacaaaagagaattcttgacgtcttctactccattttccatcaatacccatttcttctatcgctctcgtttccaagaaaaaagagggttttagagagaagcaaaactcaaatg

SEQ ID NO: 20193 - DNA, 3000 bp, Unknown; identical to SEQ ID NO: 4591
  misc_feature (1)..( 3000): 2750-1469P.txt file - cDNA_ID_1824809; gDNA_ID_1620716; Annot_ID_49124

SEQ ID NO: 20194 - DNA, 3000 bp, Unknown; identical to SEQ ID NO: 4591
  misc_feature (1)..( 3000): 2750-1469P.txt file - cDNA_ID_1824809; gDNA_ID_1620716; Annot_ID_165653

SEQ ID NO: 20195 - DNA, 3000 bp, Unknown; identical to SEQ ID NO: 4591
  misc_feature (1)..( 3000): 2750-1469P.txt file - cDNA_ID_1824809; gDNA_ID_2926190; Annot_ID_141003

SEQ ID NO: 20196 - DNA, 3000 bp, Unknown; identical to SEQ ID NO: 4591
  misc_feature (1)..( 3000): 2750-1469P.txt file - cDNA_ID_1824809; gDNA_ID_2926190; Annot_ID_200975

SEQ ID NO: 20197 - DNA, 3000 bp, Unknown; identical to SEQ ID NO: 4590
  misc_feature (1)..( 3000): 2750-1469P.txt file - cDNA_ID_1824833; gDNA_ID_1620716; Annot_ID_49117

SEQ ID NO: 20198 - DNA, 3000 bp, Unknown; identical to SEQ ID NO: 4593
  misc_feature (1)..( 3000): 2750-1469P.txt file - cDNA_ID_1824833; gDNA_ID_1620716; Annot_ID_165644

SEQ ID NO: 20199 - DNA, 3000 bp, Unknown; identical to SEQ ID NO: 4590
  misc_feature (1)..( 3000): 2750-1469P.txt file - cDNA_ID_1824833; gDNA_ID_2926190; Annot_ID_140996

SEQ ID NO: 20200 - DNA, 3000 bp, Unknown; identical to SEQ ID NO: 4593
  misc_feature (1)..( 3000): 2750-1469P.txt file - cDNA_ID_1824833; gDNA_ID_2926190; Annot_ID_200968

SEQ ID NO: 20201 - DNA, 3003 bp, Unknown
  misc_feature (1)..( 3003): 2750-1469P.txt file - cDNA_ID_1824837; gDNA_ID_1620716; Annot_ID_49116
aaatagtaaagactgaggtagtgaaaagcaatggacaggcattggttgaggcgtatgagtacacagcacatagcagcgttgctcatagttactatttaccagtggccaagtttcactttgagctctcaccgatgcaggtaggcttaaacattttttgtttgctgcctttctcacatgtgttacacagattagggatggtaagatgggttggaattacactctgctcatctttctctttgtttgtttgcaggttctcataacggaaaactccaagtccttctcacatttcatcaccaacgtatgcgccattattggtggtgtcttcacggttagtaaagaagtttgaagcctcttcttcttgtaactattcattaatgtattcccatatgactcgtatttttgcctcttttcaggtggccggaatcttggattctattctccatcactccatgacactcatgaaaaagatagaacttggtaaaaacttctgaagctccctaagggttttatttcgttttcctctgtaacgagtcagaaatttttgccctagttataccagacgtcacttaaataattcggttatatatattcacaaactgttatccttttgaacatatataagtattatcgatgtctctgaagtctttgggagttttagtagaacaaattgttatcacttaaatcaggggaatttacttccaaattctccaataccaaaatacagcttcttgtgagttggttcatactgatgatggagaaatgtaatttttagccaacaaggtttcaactttcaacgtttgaaactagatttgagcacaaatatagcaatcaactttcccccatggctgcttatagcaatcatcgacggaagtcacagcagaacggagagtcctctcgttccctttggacagagttgcatcctctactagaattttacttaggtagaagtaagtatccacagtaaagaatctccttcttgttacaattttcaattttgtgttctcttcaagctaattattagtttagttagcttagcatgattcaactttagccttggtatagaatcataacatagaaccatataaacgaaaataagactaagatcaaaagaacaaaaaactttgagttttgcaaacaaggtttcaaacttgaataatgtctgataattgagcacatactgatattgatagttccaaaaacactaatttccgaatccaaaatcaaaaaagaaagacaacagaattgtagataatatttgatcaggcagtgatctccttcttgagttttgcaagctcttgcctgacaacaccagctttctgcaaacagcaaaaaaacccattaacatttcagttctgacatgaatgaacactaccacagaatttcaaacatctaacaatttaacacactgaccttgatcttggccaacatgatcttgaacctatcaaagtcgttaaggttagccctacgtttctgcacgataagcttcctaccccatgagcttttctcccacttgttcttcacatctgcaagacttttccagttaagattgaaacacttcaaaattcaaatatttacattacgcagcactcaccagccttttccattgcctcgatcaaagccttcttctttggcacacggttgatgtcaatgacaatatcggtaagagacaacctcttgaagttcatctggatcctctccatatcaggggcatccaccaaagcctaaatgacgagaacataataagaactccataaaaacaactagacaatattcagctcaatattcaccaaggaaatgcaataggctccaatcaatgatgcaaactgagttataactgtaagccaattatgcaaccaaagtctcaagctaaatcaaaattttccttaatcaaacaatttaccgaaacatacacagtagcattacggaatcaagcattaaaacagctgaaactcatcaatacatacatgataaagagatggaaatcttcataacctaagaatgaaataaacttactctgttctggtcaacaacgtcgacgataacgacgagctttccatgatcttctccgtagttcacaagtgctactctcccgatctcaacgtacctcttgaaaccctaaacaaccaatcaccagaaaatattaaatctaacaactttggactctaacctatacacaaacgtaacttgattgagaacgtcaaaagcctaatccccaaaaaaaaagatctagaagaaagaaatccgaaatgtgctatgaacatgagctaaatacaggagataatcacgtagaacacagacgaactaaccaaggtattagctcaataagagagtatatctcaccattttcgccgccggtagattggaaggtctaagctccgagtgtaaatgtagacgagcgacagcagaggaaaaaatcgattaggttttgcactatatataatcttcattctagggttttgtggtttgggcctatctttactaaataaatatcacaaaggcccaacattaaacgcccaatatggtaaagagagaaaacggcgtcgttttatgttggatatttttgggggaaaaaaaaaaaaagacacagtgtctctttcatgtggaagaagataaattagagagaagtgatggagaaactccgttatttgtggaggcaacaactattgtgtaatgagaccagctcatcaatcatcatctccagaaaaaaggaatgatacaagaaacttagttgatagatagacgacaggaaaataatatacgcagaaagaaacctaaaaaaaaaagtttctgtctttagactccaatccactaagctccaagctgggtccccttaaattctcaatctttttctccctaaatttcctttaatttcttcattgatcattgctcattgatcgatcttctgagttttgaggggaccccgatccaaagtgtatctctttctgttttgctcagcatttggatttgatttcttttttttcccgggaaagtttgatagagatg

SEQ ID NO: 20202 - DNA, 3003 bp, Unknown; identical to SEQ ID NO: 20201
  misc_feature (1)..( 3003): 2750-1469P.txt file - cDNA_ID_1824837; gDNA_ID_2926190; Annot_ID_140995

SEQ ID NO: 20203 - DNA, 3000 bp, Unknown; identical to SEQ ID NO: 4614
  misc_feature (1)..( 3000): 2750-1469P.txt file - cDNA_ID_1824862; gDNA_ID_1620717; Annot_ID_49137

SEQ ID NO: 20204 - DNA, 3000 bp, Unknown; identical to SEQ ID NO: 4614
  misc_feature (1)..( 3000): 2750-1469P.txt file - cDNA_ID_1824862; gDNA_ID_2926189; Annot_ID_140915

SEQ ID NO: 20205 - DNA, 3000 bp, Unknown; identical to SEQ ID NO: 4603
  misc_feature (1)..( 3000): 2750-1469P.txt file - cDNA_ID_1824872; gDNA_ID_1620717; Annot_ID_49134

SEQ ID NO: 20206 - DNA, 3000 bp, Unknown; identical to SEQ ID NO: 4603
  misc_feature (1)..( 3000): 2750-1469P.txt file - cDNA_ID_1824872; gDNA_ID_2926188; Annot_ID_140912

SEQ ID NO: 20207 - DNA, 3000 bp, Unknown; identical to SEQ ID NO: 4622
  misc_feature (1)..( 3000): 2750-1469P.txt file - cDNA_ID_1824899; gDNA_ID_1620718; Annot_ID_49155

SEQ ID NO: 20208 - DNA, 3000 bp, Unknown; identical to SEQ ID NO: 4622
  misc_feature (1)..( 3000): 2750-1469P.txt file - cDNA_ID_1824899; gDNA_ID_2926154; Annot_ID_139420

SEQ ID NO: 20209 - DNA, 3003 bp, Unknown
  misc_feature (1)..( 3003): 2750-1469P.txt file - cDNA_ID_1824911; gDNA_ID_1620718; Annot_ID_49152
ttttttttgaagcaagccaagagggttaaaaatcaaaactaactataggtgttgtttacacatactgtatttacctgttaatcagtttttaattacttaattaagccatatccacatgactagaagatatctttaactcagattgcaacatttatatattatgttttagttattgatattcttacttcattataaatccaaaagatcagcagaagattgatacaatttttattagatcacaatactataagcattatcattaaattgtgagaaatctagcttagacatttgcttcttaattatttcctttaatttgacttgtttttgtttttgatatactgatttgatttttgaaattttaatttcagtatacctaaaacagtagaaagatatcaaaagcgaatacaagatctcgggtctaaccataagagaaatgataattcacaggtaaccaaacttcatagaattgttagtttatcatggttattttcatatatatacatttgctaaaaatatacttatccagagctcaagtaaaaagaaattctatatcaatatctagtacaattttatggtgtagatcctttggtgtaccacttttaaaaaattaatatacatgctaaagtgtatgctttatttatcgaacatgggtgataattttttatattaatatttgtacttacaattttggttaagaaaatatgttttgcatttctcatgatcaaaccttgttgacagcaatcgaaggacgaaacctatggcttggcgagaaagatcgaacatttggagatttcgacacggtttttgaactcaaaatacttatacgaatattttgttatgaatgtaacgtttacattgtaagcgtctatttaccatatgtttaaaaaatatatacatttgcagaaaaatgatgggagaaggacttgacgcatcttctatagaagagttacaacaattggagaaccagttggacagaagcttaatgaaaataagagccaaaaaggtaacttctagattattgtatatgtgatcatttcttagttttaaaataaaatcttcactcttatcatatggttattgtttcatcgagatttatgacaatgacgtggtggccgcctggttcgattatcacaaatgagttgattatgtaaacaatataaacatgggatcatcctataaacactccaaatacacacatacacacacacacacacacacacacacacttggaggcatgcatgcatgcatgcatatgtgttgagaaaagacttatatgttatcttcttcttcttttttgtcatcaccttatatgttatctttaatgagtcttttaccaactaatttagctatttaattccttaatttcagtaccagttattacgagaagaaactgagaaattaaaagaaaaggtaacatgtagcttttttattaatttagtacaaatgtattggtcaggtactaatcatatttcccataattaaacggttaaaccatatttcatggtttattgtcaatattttaggagaggaacctcattgcagaaaataaaatgctgatggagaaggtacaaattaatattaacttacgggctgatttatgttctcaattctcattctattattatgaaattatctgctttttttcaaaaagtgtgttttaatttgaggaaatgtgtgaatgaagtgtgagatgcaaggaagaggaataataggaagaatatcatcatcatcatcaacatcagaactggatatagatgacaatgaaatggaagtggtgactgatttgttcattggacctcctgagactcgacacttcaaaaagtttcctccttcaaactaacatatatagtacaatgcttatatagatattatgtagggaattacttttttccctgaagaaaaattgatgttacttactgaatttagcagttgcataaaaaaaaagattactgcatttaagctttgctttttttttctttttgtttttttcttttgtatcgtctcacccaactttgcaatcctaaaataatttcagaataaattgtttaacaggttttttatttaacataattttttcatatctttttaaaaataattgtttagaatataactaatttgatcgatatattatatgttcgggacaagttcttggagagtgaaaacaaatccgggtgcgtagctaggtcggttccctataatggctttgcggataagatctccatgtttcatgctagacatgaagatgatgtatgatttatatacgaataatgggtcagttggaaagatttttgaatcctagtagaggtatggtcttttgaactcgggaaaagttgcattgcaccgacctcttaaagtccttttacacttggtctagacccaaaaatcgttggctttctatgatcggtctttgtcagcgtgtcatttacgtgacgtggttggtttggttcgaaatttctaagtagctgaaaattcagttccgttccttccaagaacatcatcttgaagtagaattctttgtgacaaacaaaaaaaaatggtagaattctatggttatatatatatatatatatatatatatatatatgtttattataacaacagacctaatatcttctatgttttatgtaatatctatttattttttgttatttattgaacctacatacaaataaaacaaaacaaagtaaacttctaaataatatatttttcattttcattttagttgaaatataatttgattttcaataccaaactatataatatcaatattcagaataagttaattgttacgtattaaaaacaatgcaagaacaaatgaagaagccaaaatatccaaaatgaatagtagaagtcaaggtcaacatagtggactctaacaatatcaacgaagtcaaccgttgaagaaattaaataacttgtctaataagttcttcttttttcttggattaaatacttgtttgaagcaaattcagagacactgtcttcgtcttcatctttgctatg

SEQ ID NO: 20210 - DNA, 3003 bp, Unknown; identical to SEQ ID NO: 20209
  misc_feature (1)..( 3003): 2750-1469P.txt file - cDNA_ID_1824911; gDNA_ID_1620718; Annot_ID_165723

SEQ ID NO: 20211 - DNA, 3003 bp, Unknown; identical to SEQ ID NO: 20209
  misc_feature (1)..( 3003): 2750-1469P.txt file - cDNA_ID_1824911; gDNA_ID_2926154; Annot_ID_139417

SEQ ID NO: 20212 - DNA, 3003 bp, Unknown; identical to SEQ ID NO: 20209
  misc_feature (1)..( 3003): 2750-1469P.txt file - cDNA_ID_1824911; gDNA_ID_2926154; Annot_ID_198254

SEQ ID NO: 20213 - DNA, 3000 bp, Unknown; identical to SEQ ID NO: 4621
  misc_feature (1)..( 3000): 2750-1469P.txt file - cDNA_ID_1824921; gDNA_ID_1620718; Annot_ID_49149

SEQ ID NO: 20214 - DNA, 3000 bp, Unknown; identical to SEQ ID NO: 4621
  misc_feature (1)..( 3000): 2750-1469P.txt file - cDNA_ID_1824921; gDNA_ID_2926153; Annot_ID_139414

SEQ ID NO: 20215 - DNA, 3000 bp, Unknown; identical to SEQ ID NO: 4620
  misc_feature (1)..( 3000): 2750-1469P.txt file - cDNA_ID_1824925; gDNA_ID_1620718; Annot_ID_49148

SEQ ID NO: 20216 - DNA, 3000 bp, Unknown; identical to SEQ ID NO: 4620
  misc_feature (1)..( 3000): 2750-1469P.txt file - cDNA_ID_1824925; gDNA_ID_1620718; Annot_ID_165716

SEQ ID NO: 20217 - DNA, 3000 bp, Unknown; identical to SEQ ID NO: 4620
  misc_feature (1)..( 3000): 2750-1469P.txt file - cDNA_ID_1824925; gDNA_ID_2926153; Annot_ID_139413

SEQ ID NO: 20218 - DNA, 3000 bp, Unknown; identical to SEQ ID NO: 4620
  misc_feature (1)..( 3000): 2750-1469P.txt file - cDNA_ID_1824925; gDNA_ID_2926153; Annot_ID_198234

SEQ ID NO: 20219 - DNA, 3000 bp, Unknown; identical to SEQ ID NO: 4619
  misc_feature (1)..( 3000): 2750-1469P.txt file - cDNA_ID_1824929; gDNA_ID_1620718; Annot_ID_49147

SEQ ID NO: 20220 - DNA, 3000 bp, Unknown; identical to SEQ ID NO: 4619
  misc_feature (1)..( 3000): 2750-1469P.txt file - cDNA_ID_1824929; gDNA_ID_2926153; Annot_ID_139412

SEQ ID NO: 20221 - DNA, 3000 bp, Unknown; identical to SEQ ID NO: 4618
  misc_feature (1)..( 3000): 2750-1469P.txt file - cDNA_ID_1824933; gDNA_ID_1620718; Annot_ID_49146

SEQ ID NO: 20222 - DNA, 3000 bp, Unknown; identical to SEQ ID NO: 4618
  misc_feature (1)..( 3000): 2750-1469P.txt file - cDNA_ID_1824933; gDNA_ID_2926153; Annot_ID_139411

SEQ ID NO: 20223 - DNA, 3003 bp, Unknown
  misc_feature (1)..( 3003): 2750-1469P.txt file - cDNA_ID_1824937; gDNA_ID_1620718; Annot_ID_49144
ggttctaccaagtccatccaaatgagtttcacaaattagcctaaatttacaaagtcattcacatggaacatccaaatgattcatctaaatgatctgttaatttgtaaaaaacaaacatcatttttcatctccatctagatgatccatatggatggagaaacaaacaaggcctagtaactttttggatttgagctctcactttttatttttgtcaatatcttttagatttcgattatgttttcatggattcaaatcatttgaatgagatgttaacaatgtttaaaaaggtttcttaattatatcatcaactattcaactttattcttagttagttatatctgtaactttatattttagggaactttatacattattggctttagaaaacaaaacaaaagtcttacgagttttaaagttatattaagctatcttctaatccacgtgggtgcattgctcaaacaaagaacagaagaacttattattggcttattaatttactactacttttgatatctttttcatcacatgactgatcactagtcattgtttttgttaccaccgatattgcgaatcgtggaattgtcagagtaacatgtaggatcattatatcaatatctaatactgatagctcgaatatattgtgtttcttctggttgttcgaattttttttgtacataacacaattcgagattcaaatgatcagattttagatttctagttactcctaagaaaaaaaaaatgcttagcaaatcagattttataacattactactataccttttttgttttaatgattacttcgaatgattactttcgctgatataaaaaaataaatcgtgatctaaactttcatatatctactggaattttacaaaagctacgtaacaaaattgataaagtgatgagcatgttacgttgccacgtttcattttttctataataaatagaactgttcattcgacaatgggttagtggttgtacgtatatatatatatgctcgctaattggacggtgcgcaacttcaagcgttttaaattatgtggcacttaacttgtctgtcgaattagtaattactttcgctgatatatatcactctccgagcataattaatttcatgctatcaaacaaaaaaagattcatgttatacttggtttggttgaatagaaactgcgtggactttaaattgatagataactttaagtataaaaataagaaaattaaactgctgatgtctccaaaaagacaaagtaacacatctaaaatctacgtatgtggatgtcatttgatacacgtataaacaaggtgtagttaatccaattaattaaaggaggagaaagtggtacaatggaccaatatggatatattttatgctttacaacgattgatgcaaaggtatcttcgtgttacacttcattattacatttatagattggacttgggcctttgctgattgtgaggactgatgactgatgagaagcatattggttgggttttatttgaatcataaagaaattaaaagagactagaatatgacccgcggtatatcgttatattctgtagtaaaaatataacgattaaaagagattacatataattgcattttggtaaacaagaaaaaatattataattgtaacttgttatttagatttctgtataatgtcttataaatatttgaatactgtaatttactcgatataatattgtaacgaaccttaattttttgtagctataatatttttgacaccgatacatagaatttaagaaactataatcgataagttaacattacatggtagttaaatttaagttacctttttaacaatgcttgtccaatattactacctaagaagatattcaacgaaaaatagattgttacaaatctaaagtttaattttgaaaattttcttctcaatatatacacaaaaagatacttattcaacaaaaactcatatctctcctatctcaaaaaggaaataaaaataaaaggataacgacacaaacatgaatctctatccgaatctatctgtcccgtttataaattaccccacagagctcagggccattgttttttttttcttggtgaaaatagggttaagagaaaacccgaaatattagcgttattgataactaagcaacagagaaaatctggggctctctttctctctgggcttttgctatataacttttgaggtatatagtctcttgatttttttttctgtgcatgaaaaaaatgatgagtttttcagtaatctttcgaagccgaatttgaattctttgaagattgtgacatttattgtagttcctcctccatttaaagctggtaaacaaaagtgctcttcgttgtttgcattttggttttccccattttgctgccggagataacgagggaaattataactcactaggatacatatttttttttggttttattgaattctttcatttgttttcttgttgcttattttattttataattttgtttttcctctggaatctgttgtatatgctgagaaaacactggaagatgccaataaaatagaaaaatctcgtttctttttgttaaaagtcgtcgttattacttatcacgagtattatgtgatgctagacactcattatcaaatagccgttttcttaaaagttacaatttgtttaaagctgtgtatttaatcgaaattttcaatttatttctctttgtgtactaatttcttctgcttttttcagaatctaaattcaccaaaaatacgaagaagaacgagaacaacaagaggtaccacacatttgtgattttgcttaacttttgtttgattataagttgactctttaattaaagaaaatcaacaatcaagttaataacttttgacttgaaaattttaagtccaaattgatacaaaggtataaacaaagaagtttgtagtatatatatacttgtataacaagtttagtcttaatgtaactagtctttctctagacatgtctctgattcttgttttgttgtagaaaatg

SEQ ID NO: 20224 - DNA, 3003 bp, Unknown; identical to SEQ ID NO: 20223
  misc_feature (1)..( 3003): 2750-1469P.txt file - cDNA_ID_1824937; gDNA_ID_2926153; Annot_ID_139409

SEQ ID NO: 20225 - DNA, 3003 bp, Unknown
  misc_feature (1)..( 3003): 2750-1469P.txt file - cDNA_ID_1824945; gDNA_ID_1620719; Annot_ID_49169
tatgcttgccgtaaaagtacggttacgtacgtagcgggtttgaaccaatcactaatggtaatagccaatcccaattggcagataatgttataaccgtcagattcaaattcgaattaaagggagccttggcatctgaacggttcagatttgatctttcttcttttctctctctctctctctctctctctctcagtttcagagatcaaaagagaccaacgaagaaaaaagcaccgcttttgcagaatcggtgacgatagaaagagaaagacagagagagagggagggttagagagtcaggggctatttgattcccctggaaaatttcagatatttgtttcttcatcttctttccttatttctctctttctcgtttttaccagatttgtcttacgaatcaattctcaaagatacccaaaagtggtagggaagcaaagtactgttttattttgcttttgattctatcaaaatcagcggtgaaagaaaggaattttttttattatcagagaaagagagattcttgataatcgaatagacctagatttttttttgaatttagggcttttttgatttttgagaaattgattgtggtaatggagacagatagtatggagtgcgtctcatctacgggtaatgagatccatcagaatggtaatggccaccaatcttaccaattctcttcgacgaagactcacggcggagccgctgctgccgccgtcgttaccaatattgttggcccaacagcaactgctccggccactagcgtgtatgagcttctggagtgccctgtctgtacctattctatgtatcctcctatccatcaggtgaatctccgatgctcttttggttgtttggttctcaattgattcctaatgatacgttttagctttatgtgtttgtgttcttctctgcctatatgttgtgtagcgtttaatggggatatagattatataatgtggttgttcataggttttgatgttgcttgtatcctagaattgagccaggggaagtaattgatctgaaaagtgtgtctcttttttgttattgttgttgttgcagtgtcataatggacatacattgtgctcgacctgtaaagtgagggttcataacaggtgtcccacatgtagacaagaacttggagatattagatgtttagctcttgagaaagtagccgagtcgcttgagctgccttgcaagttttacaatctgggatgtcctgagatctttccttactacagcaaactgaagcacgagtctctctgtaacttcagaccttacagttgtccttatgctggttcggagtgtggtatcgtaggggacatcccttttcttgtagcccatctcagggatgatcataaagttgacatgcacgctggttccacttttaaccaccgctatgtcaaatccaatccgcgtgaagtagagaacgctacttggatgctaaccgtgagcatatccttctttgtctaggaaaacatgattctcttcaatgttttcggtaactaaactgactgtttcttatgtgggttcaggtattccattgctttgggcagtacttctgcctccatttcgaagcgttccagcttgggatgggtccagtatacatggcattcctgagattcatgggggacgaggaagatgcacggagctacagctacagcttagaagtgggaggcagtgggaggaagctaacatgggaaggaaccccaagaagcatcagagatagccacaggaaagtaagagacagcaacgacggtctcatcatccaaagaaacatggctctctttttctccggtggagacaggaaagagcttaaacttagagtcactggtaaaatctggaaagagcaacacagtccagattctggactttccataccaaacctatcttcttcctgatcattcttttatctttttgttttttctctctttgagaaggaatgttgtatgatgattcgtttgcactcttcttctttgtctgtatctaaaacatatcatgaatgaatgtttcatcttatagtctcatattttggcagatgcattacaatttagatacatggagataggagatttgatcaagtgaaacaaaaaaaaaactaagtgattccgtggtaacaagtaacaacttgttcaaacgcaactaaaatgtgtttatgaaaaaatggaggtgcggggaatcgaaccccgtgcctctcgcatgcgaagcgagcgctctaccatatgagctacaccccctgtttgatttctgataacattaaactaattctattttttgctaacactgtgattaccataatacaatatccaaatgtatagtgtgagacaagaccatatatgtaaaatatttagtctatgttaaacaagttgcccaatcgacaaattattaggaggattgttgatgtatatatgcatttatcttaaaaataaaatctaccaatattttcaaaagtgttcaaacattaaattgatatcaaattaataaatagaaaagataaggttaaatatgaagttattcaattcatataagttttaaagattatgtaagattttctcttaacaagatttcaacaaatctttttaaaagatatacgagtatgaaaacaaatcctaagcttttttattttccaacaaacaaattcttgagctttaaaacaatttaaatgtcctaaattgtataatctaatctaatgttagtgaattgcaattattcaaattattaacttaatagataaataggaaaaaaactaaataaggaaagttaggaattgaggaaaaggaaaaatcttagaaattgaattcgagagggaattaaaggaaaaaggcctaatacaaattgaaaagggtttttaacttttaagttctgtttcttctagaactttactttttagccttcgtggctttccctataaatttcccaatctttggccatcggacgatcaaagaaactcattctgatttttaatctctgacgagcaaagaaccctacagctaaaagattaaaccaatg

SEQ ID NO: 20226 - DNA, 3003 bp, Unknown; identical to SEQ ID NO: 20225
  misc_feature (1)..( 3003): 2750-1469P.txt file - cDNA_ID_1824945; gDNA_ID_1971690; Annot_ID_175081

SEQ ID NO: 20227 - DNA, 3003 bp, Unknown; identical to SEQ ID NO: 20225
  misc_feature (1)..( 3003): 2750-1469P.txt file - cDNA_ID_1824945; gDNA_ID_1620719; Annot_ID_165750

SEQ ID NO: 20228 - DNA, 3003 bp, Unknown; identical to SEQ ID NO: 20225
  misc_feature (1)..( 3003): 2750-1469P.txt file - cDNA_ID_1824945; gDNA_ID_2926191; Annot_ID_141070

SEQ ID NO: 20229 - DNA, 3003 bp, Unknown; identical to SEQ ID NO: 20225
  misc_feature (1)..( 3003): 2750-1469P.txt file - cDNA_ID_1824945; gDNA_ID_2926191; Annot_ID_201081

SEQ ID NO: 20230 - DNA, 1518 bp, Unknown
  misc_feature (1)..( 1518): 2750-1469P.txt file - cDNA_ID_1824945; gDNA_ID_2926192; Annot_ID_201113
aatgttttcggtaactaaactgactgtttcttatgtgggttcaggtattccattgctttgggcagtacttctgcctccatttcgaagcgttccagcttgggatgggtccagtatacatggcattcctgagattcatgggggacgaggaagatgcacggagctacagctacagcttagaagtgggaggcagtgggaggaagctaacatgggaaggaaccccaagaagcatcagagatagccacaggaaagtaagagacagcaacgacggtctcatcatccaaagaaacatggctctctttttctccggtggagacaggaaagagcttaaacttagagtcactggtaaaatctggaaagagcaacacagtccagattctggactttccataccaaacctatcttcttcctgatcattcttttatctttttgttttttctctctttgagaaggaatgttgtatgatgattcgtttgcactcttcttctttgtctgtatctaaaacatatcatgaatgaatgtttcatcttatagtctcatattttggcagatgcattacaatttagatacatggagataggagatttgatcaagtgaaacaaaaaaaaaactaagtgattccgtggtaacaagtaacaacttgttcaaacgcaactaaaatgtgtttatgaaaaaatggaggtgcggggaatcgaaccccgtgcctctcgcatgcgaagcgagcgctctaccatatgagctacaccccctgtttgatttctgataacattaaactaattctattttttgctaacactgtgattaccataatacaatatccaaatgtatagtgtgagacaagaccatatatgtaaaatatttagtctatgttaaacaagttgcccaatcgacaaattattaggaggattgttgatgtatatatgcatttatcttaaaaataaaatctaccaatattttcaaaagtgttcaaacattaaattgatatcaaattaataaatagaaaagataaggttaaatatgaagttattcaattcatataagttttaaagattatgtaagattttctcttaacaagatttcaacaaatctttttaaaagatatacgagtatgaaaacaaatcctaagcttttttattttccaacaaacaaattcttgagctttaaaacaatttaaatgtcctaaattgtataatctaatctaatgttagtgaattgcaattattcaaattattaacttaatagataaataggaaaaaaactaaataaggaaagttaggaattgaggaaaaggaaaaatcttagaaattgaattcgagagggaattaaaggaaaaaggcctaatacaaattgaaaagggtttttaacttttaagttctgtttcttctagaactttactttttagccttcgtggctttccctataaatttcccaatctttggccatcggacgatcaaagaaactcattctgatttttaatctctgacgagcaaagaaccctacagctaaaagattaaaccaatg

SEQ ID NO: 20231 - DNA, 3003 bp, Unknown
  misc_feature (1)..( 3003): 2750-1469P.txt file - cDNA_ID_1824949; gDNA_ID_1620719; Annot_ID_49168
tcaatccatttatgatttaggcattccctgcctttagtactgcaaaacggtgattcccgtctgctaaacttcagtggctacttcggtgtctaggagaattaaatttgcaatgaatctccttttgtactcactatgatgctgaaggaggtttgtaacatttcagcattagcattgaatgtatttattttgtgttgtcaaggtggggcatcatctagtgtcttggaagctaatccgccaccacgtgagtccattgtcccagtagttaatccatcgcgtggtaacctaagtcctatgcgaaaggatacgacaggctcagccgttgttcagcctgatgcagccacttcgattcaaggtacatataagcaatgtcactcttagaaagtggaacccatgttcgtgtgttgtagtttgagcttttgacgttgacaagcaactttaataaaaataaaaaacgtgatagccaatacttcttctcttatttagcttttgcgtctctcgtttgacttttaaagactccagcactattttcttaatatgatggcagttgcaaaatcaaacgatacaagcgaaattgtaaacaatggagctattgttggagacgggcaaaagtttctggctcctatggtggaggagcaaacacagcaaaagattgacaatgatgattctagtacagcagacgggaatcacacgtcagacaaaggacgtctctccccaattcaaccatctcatggcatgagtatactaaacacagtgactaacggacccgacggattgaaagtagaaactacaattcatgaagaaggtgcccctcttctgtttgaaggaaaagacactcctgacacaagcacggcagattttggtctgaccaaagtaacaggtaatcttaattctggttataatgatgcgaggaaatcatattcatagcttcagtgccaaatacgtagaataaaaccggtttctgtctctcctttgtttgaagattaacttcttaccgttctgtctagtaattcctattcataccttgcaaactttccgcttctgtttaggtgtgatggacacaggtgacagaggagttattaccggtccagcaaatcctgaaattgatatttcagcagggaatttgctggaagaagggtctctaagggaaccgttaatgagacgagttgttgttcaaggacgtaaactggaaatcttgaaaagcattgtctacggaggtctactagaagccatcacaagccttggtgttatttcatctgccgctggttctggtgcttcaatgtgtaagtaccgcttacccctagctatccattttcatttgtaaaacacaaaacacttttttcttgcttgaaaatctaaatcttgcttgaaaatctcaacacatgtttgtattgttgtggttgcagtgaatattctggtcttggggcttgcaaacttgcttggcgggcttattcttattattcataatgtgagtgatcaataaaacctttgtaatgaacttggtaatgaaccatgtaactggcaaattcaagaaacttacagagatacttcttctgcagctccaagaacttagagaggaggaacccataagaacaacaacagaagataaccagactaacggtagagaagaagaagaaggtcggtataagcgactccttggacgaagagaaaatttcacacttcacgcaacagtcgcaatcttatccttcataatcaccggaatactccctcctgtagtctactatttctcattcagtgaaaaacacaacaaagactacaaagttgcttcagttttcggggcatctctattctgcatcgtcttgctcgccatagccaaagctcatgtgaggtacccgagaggcagctacctgaagagcattctgtactacgggtcaattgctgtatcggtgtcggggatttcttatgtggttggtaactttctggaacagttgcttgagaagcatggatggtctgatggatcggaaacacctgtgggacagatgatgctttcatcacttatgggaagaaaagccggctttggatactcatcatcgtactgaaactgaatcttgcctggagaatgatccaaactgaaacttgctgcttttctcttttactctgcttttgtgagctctcgttccaaatctttgttgtcggcaaatctttgttgtgacttgtgagtgtagaagaaagtcgtttccacttgtagaataaactaaaataagcataacataataatgatggaagatctgtgccttttaataagtttaaatcatttttaaaaaatgacaaaaagaaggttctaccgagaattgaactcgggttactggattcagagtccaatgtcctaaccgctagaccatagaaccatttgatgacagtcctgatataaactagtatatactaaatattatatgcttgccgtaaaagtacggttacgtacgtagcgggtttgaaccaatcactaatggtaatagccaatcccaattggcagataatgttataaccgtcagattcaaattcgaattaaagggagccttggcatctgaacggttcagatttgatctttcttcttttctctctctctctctctctctctctctcagtttcagagatcaaaagagaccaacgaagaaaaaagcaccgcttttgcagaatcggtgacgatagaaagagaaagacagagagagagggagggttagagagtcaggggctatttgattcccctggaaaatttcagatatttgtttcttcatcttctttccttatttctctctttctcgtttttaccagatttgtcttacgaatcaattctcaaagatacccaaaagtggtagggaagcaaagtactgttttattttgcttttgattctatcaaaatcagcggtgaaagaaaggaattttttttattatcagagaaagagagattcttgataatcgaatagacctagatttttttttgaatttagggcttttttgatttttgagaaattgattgtggtaatg

SEQ ID NO: 20232 - DNA, 3003 bp, Unknown; identical to SEQ ID NO: 20231
  misc_feature (1)..( 3003): 2750-1469P.txt file - cDNA_ID_1824949; gDNA_ID_1971690; Annot_ID_175080

SEQ ID NO: 20233 - DNA, 3003 bp, Unknown; identical to SEQ ID NO: 20231
  misc_feature (1)..( 3003): 2750-1469P.txt file - cDNA_ID_1824949; gDNA_ID_1620719; Annot_ID_165749

SEQ ID NO: 20234 - DNA, 3003 bp, Unknown; identical to SEQ ID NO: 20231
  misc_feature (1)..( 3003): 2750-1469P.txt file - cDNA_ID_1824949; gDNA_ID_2926191; Annot_ID_141069

SEQ ID NO: 20235 - DNA, 3003 bp, Unknown; identical to SEQ ID NO: 20231
  misc_feature (1)..( 3003): 2750-1469P.txt file - cDNA_ID_1824949; gDNA_ID_2926191; Annot_ID_201080

SEQ ID NO: 20236 - DNA, 3003 bp, Unknown
  misc_feature (1)..( 3003): 2750-1469P.txt file - cDNA_ID_1824953; gDNA_ID_1620719; Annot_ID_49167
tcgtttcgaaaaaagatggaaaagagacaagagtacaaggttttagctgtttacgcagtgtctctactctgcatcgtcttgctctcaatagcgaaagcttacgtgtcgaagaaacgcgattatgtcaagactctgtttcggtacacgacgacggcgacgacggcgtcgggattctctcaatttgtgggatacttggtgagtcaatggcttgagaaaagcgggttttatgatgattctccagaaactcaacgagtttgaaacgagttcttgttcgtcttctcttcacttcccctgttcttttcgtactctttacgtggcccaatttattttccttaaaagtggtagaattgtttgattttgaccccaagaaaaaaaactttttttgtgtgctagacttggctctctttcaagttagttttggatcaaacacttgttgttgctgagaaggttccgtgaacaagaattctgtaacatgttctagtgccaaaaataaccagttcataaggttttatagtgcatgttaattaataaatgttgttaccttatgtgtcttttaaacaatggcgattacaaacaattagacatatgcatggaaatgcaaatagcactgcgtgcgaggagaaaattagggtttatcaattagattcaattggtcggacgcctactaaaaatgtggaacttaaagattggtggtggtggcaaatacagtttcatagatatggaaaacaactgatacacgttctgagataagcaaattttgtgactaaacaagttgtataatatatggagattgaacttatgttcaccttgataccaaaaaaagaaagaaaaacttatgttcaccaaaatacataatgtatcatcagcaaaaggggaaaaaattacggtgactgaatgatgaagaatcaaagaaaataagaaaaagttgatgaaaaatggcatcacatgaaaaacgcttggttaattatttcattttaatcatggatcaaattcagggatgagtgaaaacataaacaagcaaaaattattcagcacaaaaaaattcaactacattaagcaaatgatgagagtttttggcactttgtgccattccagaagctacagtttaatatctaatttgaactaaagtttaaccaacgtgtactattttcatcttgttgattctttctactcgtatgggaccatctaatgcgaatacctaacaattattatatatgatataaaattataaatccatgtgaactcaaggttacgttcacattcatgactcatcatattgagtgagtcgatcatataattaaattcaacctacattcttacacgattctaatatagagttaagattttaattaaaaatgatgacacaaattagtttgaacacaacataagcatgttagtaacgtgcttttggggttatatatcattattttaggtggtattattgatagaatggttaagattttaggaatcatggggatttgggcaaatattgtgtaactaagtatctatgtgtcacatttcttatttcctttcaatttctcctgataaacgtaggaaaacgaatatatactaatggtgatggtgattgatcacaaccatatcatcgagaaacttcacgttcaaacgtaaaagacgagaccattatcgaaacaaactagtatgaagaagttttttttgttaatgaagaaggttttttttgtgtgtgaagaagttatatatctgaatgcaaattataatgcaaggaatgtgtatctagccaattttgttgataaaagattagccataactgaattaaatatggattttttttttttcgaaaaatgaaatatggatgttattatgttagcatgattaagttaataatgttgacatgttgtaatggtactatgtcagcaaacgtgttgcatgaaaaatttatacggaatatttctatcgagtattaatttcaagatgcgactttcttattagaatattagtatattaaaaacaactagtggtggataaacaaacattattgtaagatgtgttgttaattcttaatttgagtactattattgtcttttattaatatttttgtcaactctatgtgtttgatgtagataagaattctttggccgtattgattattttccacgtttgaggcatcgatgtagttgggacgtgatcgtgaaatgaatgcagtcagtgtctccaatctgtcatccatgtgccaataaatccctgaaaagaaggtgacaaaatcttcaactaatttgtttgttaatttttactactaagtatacaattttactagttacaatatactatttcccataatgaataatcagttgtaaatttgtaataggaaaatatagtaggtaagcatttagatggtaaatttaaataaataatttggttaagaacaatactgataaaataaactatcaaatactaaacaagttatttaaaataagctaagttattttgttgtgtattttcgaaaagtctatatatctaaaggtgtcaaataaaagtcacataatgtttcgaaaatcccataatagtaggtggtatttttagaaataatgaaatttgggaggaaaaaatcactaatactacttactttgtcaactatatgtagtaaaggtaaatattaacaaaattacaaaagaaaacaaaaagtcctacagttttagtaactaactaacaaagagctttaaacacgtgaaaagtttttgcataaaactagtactagtatattagaactaggagtagtgctcaatcaacggccaagtcaaaacaaacaaatcaccatcaataatcatataattaataagcagaatcatcatttatgtatttgataatgttcaagtgaggaagaagaaggagacaaagacgaccccaacataatatctatcaccttctctatagatagttagatctcagaatctctccttttttgtttgctttacccttatttggccattcctgtcttccactttgtcatcttttccctttctgatg

SEQ ID NO: 20237 - DNA, 3003 bp, Unknown; identical to SEQ ID NO: 20236
  misc_feature (1)..( 3003): 2750-1469P.txt file - cDNA_ID_1824953; gDNA_ID_2926191; Annot_ID_141068

SEQ ID NO: 20238 - DNA, 3003 bp, Unknown
  misc_feature (1)..( 3003): 2750-1469P.txt file - cDNA_ID_1824961; gDNA_ID_1620719; Annot_ID_49165
gagagtgacttggtgaatccaattagttattcttgtcaacttttggctttaatacaaataaacattaatggatctcaaaatggtcatgaagaaagctcgaaaggtcgatctcccgagaaggctttggaagagatacgtaagcaagacactcatgatctctattgccctaagtgtactagtaacatcactaaaacagctctaatcgttgaaaagggagatgatttttctcccgacgaccagaaacctttcgtgctctggatccctaccttcaagttcctttcaagttctcccaaaggtatccatatgtacacgtaaacatgtatatatattgttctctatgatgatgaagataactttttttctttgaatgctgagtgaccggttttttttatctgtaggatctgtcgaaagtaaaccattgaatcctaatctcagtggtatgtgtagacacacttttttatgatggatgcacttttgctttgaactattgcttatatgatcgattttgtatctgtgtaataccagtcgagaacatttgtttgtttatgatgaaaacgtacactttcgtctttaattcctgaatgatcgatttcctattttgtaggaccagacgaagaaaactcatctcaacctgaatccagtggtatgtgcactcatatttctttatgatggacacgttatatctttgaagtactcatggttaaatggtcgattttctatatgtagaaccagtcgacaaaaactcatcgtttaatcgtagtctcagcagtttaggtatacatttccttatgatgatgaacaaaaactctattaaaaaaaattccctttgtcgtccttcatcttcaatgacacaattgccatatatatatatatagctaaaaccttggaacgattgcctactcttttacggaattcaataattattcgtagagacgaaaatagtgctactcctctacaccaagatggtgcaggtcatcaaagttctacgagcacatcaggtcattcccaatgctttcgctgcttcatttctttccaatacaatataaaacaaagacatacgatattttcaaaagaaataatcccatttttcttgtcttgacccctggaaaatatgcagtgtctgagcaacgtggacgttggaaaattagtcccggtggatggataattcatcgttaaacgcccagcaaatagacaacgaattgactatcctctcttcttaccccctaaaatgaacgagttttttgtttgattgaaacccatagtaagtgattgatgatagtgtaatgatcattttgtactgagtttaaagcatagaaatcattgcactattactggaaactaattatttcttaaactaataagtttcataaatatattgcaaaagatgcaatagagtgctagagttttggtaattaattttttattttatgaatgaaatattcttatccaaactcatgtatagcttattggatattaacggttgatgatttgaattttagtttttacttcgctggaaacaaggaaatcatattgatcaaattttccatgtatgataccttaaaaagatcgtttataattgttttgaaaaatctagaaatttaacaaataaatattatacttttgagtaaacaaaataataataattgaacttatatattatcatttttgattccaatcttgtgaatttgaaacataccaccaagaaaaaatcttgtgaatttgaaatagaaattttccctcaaaaatcaacgaaacaaacaaatctaattaactaaaagtctaaaatacaacttaatgaaataaataataaatcctaactaaaactttgacaaaaaaaatcctaactaaaataaaatattagattattgttttgataaccaactccatttatatgcacgatgatcttcggtcatttgattaaagaaagacctcatctttagaaaagtctacatataattaagaaattaatgtgacaatgtcatatttcttattatatataattaaacatggttgatagcaaaccggacagaacaaattattaaataaaacccttttataaaacttctaacgaaaatccgtaattctaatcaagccataaccaaatagaagccacataatcccaatacaggtcgtatatgtattatttttttatgactcggtctgttaaatacaagcacaacaaatttaaagttcgaaatattatgttaatagtcaactctactaatattcctcaagtcacaaaacaatgacgaaaataaaattcacataataagaatattccccaagtcataaacaatgaatgacgtaaattctagaggcattaaaatgaaaaaaaaaaaaaagaagacattttcaaactctaaaacatacagtcacattcattgtacaaaagcttttgattgaataaaattttgcattcgattcaaaaaaaaaaaaaagacattgctataacaacttcttaaaatgcgtgacttttgcacccttgactttacagggtcataaaatattacgtataattaacaaaaagaccaacaattggaataatcaatttcttcctattattgaatgttaacttttctataaacctgaatcttatgatagaatgtacatgaattgtgtcccattgcataagaacttaaagcatatgcagtaggagattttcaaagaggtacaacaatataaaaaaaagtaggatagagataaaaatcggctattattgaagaactttttagtttttagccatctccattgacagaaacgagaagattttttcaaaaagaataaaccacaagtgatatgacaactgtcaattcagttgagaaccattttctatttgagaaccatctcattcacggtatattaaaagaatacgactatgaaaaatcaaatgttagagaagtagatcagcgaaatataaaaatgagatagtaagcaggtcgtgggcatataaataagcgtccttctgttttctttgtcatcattaattcattaccctcaacaatg

SEQ ID NO: 20239 - DNA, 3003 bp, Unknown; identical to SEQ ID NO: 20238
  misc_feature (1)..( 3003): 2750-1469P.txt file - cDNA_ID_1824961; gDNA_ID_2926191; Annot_ID_141066

SEQ ID NO: 20240 - DNA, 3000 bp, Unknown; identical to SEQ ID NO: 4642
  misc_feature (1)..( 3000): 2750-1469P.txt file - cDNA_ID_1824967; gDNA_ID_1620719; Annot_ID_49163

SEQ ID NO: 20241 - DNA, 3000 bp, Unknown; identical to SEQ ID NO: 4642
  misc_feature (1)..( 3000): 2750-1469P.txt file - cDNA_ID_1824967; gDNA_ID_2926191; Annot_ID_141064

SEQ ID NO: 20242 - DNA, 3000 bp, Unknown; identical to SEQ ID NO: 4637
  misc_feature (1)..( 3000): 2750-1469P.txt file - cDNA_ID_1824971; gDNA_ID_1620719; Annot_ID_49162

SEQ ID NO: 20243 - DNA, 3000 bp, Unknown; identical to SEQ ID NO: 4637
  misc_feature (1)..( 3000): 2750-1469P.txt file - cDNA_ID_1824971; gDNA_ID_2926191; Annot_ID_141063

SEQ ID NO: 20244 - DNA, 3003 bp, Unknown
  misc_feature (1)..( 3003): 2750-1469P.txt file - cDNA_ID_1824977; gDNA_ID_1620719; Annot_ID_49159
atgggtgggttgggttttctcttcatgagatgctcatttgagcaagcaatgtttggaagtgggactatttaatatcatgtatgagttttatcttttgttataagaaaaaaagttgggatttcattttcgtgcccacttcacgtgaatctaatgccttcaagtttgtggtctaccttattttctcttatggatacatgtcaatttacgtgtcgtatgagtcaagcctttaatcatcccaacaccatgcacgtcttctagatttgttttcgaccacgattccaccacaaaatttgacattgttattgaattcattaacttttttacgtgttattgtgaaatatttatttaattttgttggtaaaaggagcaaaaaagattagggtacaacacgtcgacttcttccccaattagacccatatgtgatctgtcgtcactcgtcgccaagtttttttatgtgtcgtcttttaaactttgatccaattcattaaaaagtcttaacgcccacaacgaaaaggaacttctctttttgtttggtgactgaatcggtggaaaacaacacaagtttgttcctttttgtctctccagatcccttggcttccttcttcttcttcatcctcctcgtgagactctgtgttgaaatttctctagggttttaattatcggcgttggtttttcgtttttgagaatttgatttcgtttttagaaataatgggtgattgggctcaacttgctcagtctgtgatcctaggtttgattttctcttaccttctcgctaagctgatctcgatcgtcgtcacgtttaaagaagacaatctctctcttactcgtcacccagaggagtctcaattggaaattaaaccggaaggagttgactcgcgacgtctcgattcctcttgcggtggtttcggtggtgaggcggattcgcttgtggcggagcagggtagctcccgaagtgatagcgttgccggtgacgacagtgaggaagatgatgattgggaaggcgtcgagagcacggaactcgatgaggcttttagcgccgccactctttttgtgactaccgccgccgcagatcggctttcgcagaaggtaccgagtgatgtgcagcagcagctttacggattgtataagattgctacggaagggccgtgtactgctcctcagccatcagctctcaaaatgactgctcgtgccaagtggtatctctctctttcgttgaatctgctgtgccattaacttctatgtatcattttctggtgtttttgttcaactgtttgagatttgatttgaggtggaaatttttgaggttttaggttcttcatagacaatcacctagtttgcttcttagcttatgcaactgctggacgatgatgtggtttttactgttgtaacagttgattgtatatggaattgtggtttgttgtaagattgcaatttcattgattgggatgtgccatgatcttgttctatctcaggcaagcatggcagaaactgggagctatgccacctgaagaggcgatggagaagtatattgagattgtcactcagctttacccaacttggttagacggtggcgtggtataaagctttttccccttttctttgtttgattgcttcggtttcttcctctggcctgttcatgtgagcttcactaacagaaagccggaagtcggggtggggatgatgcagcctccaactcaagaggaaccatgggaccagtttttagctctttggtttatgatgaggagtccgaaaatgagttgtaaggttctcttcttgtattctcatgtgttttatatcctgatccttgcgttcatgtctagattagatataagtatcctgatttgtgaaagaggctcataaactcggtgaatatgtaacattactgtctcgttctagctgtagcaaattttgatggtgaaatggctacaattgtctcatggaactttgagctgttcgtttcttcctgtctatctgaatgaaacactaatcctctgctcattgaacttttgttttatctctcaggaagattgatgccatacacggatttgctagagaaggagaagtcgagaatttactgaaaagcattgaaagcggcattcctgtaaatgcaaggggttagtctctgcttgtatattccgtttcttggaagttcattctcgtgatgttggatctgcattctaattttcccataaactgcagacagtgaaggtcgcacaccattgcactgggctatagaccgtggccacctcaacatcgccaaagttctggtcgataagaacgccgatgtgaatgctaaggtgacgaaagagaaattcctacccagtcattatctgcaaagttagcaacttctttatttatgtgtttttggttcttgtgttgaacaggacaacgaaggccaaacccctttgcattatgctgttgtatgcgacagagaagctatcgccgagtttctggttaaacagaacgcaaacacagccgctaaagatgaggatggaaactctccccttgatctctgtgaatcagactggccctggatccgagattctgcaaagcaggcagactaaacaaatactaaccacgtcttctctaaatccgcaatgtatatgatcaaatgacttagtaagaagcttttctttactttaaactttctttccatccctaccacatcactgggatgttccaacactatatcacttggatgttaccaagtcttgttctttgatttctttcttcttacattttaacaatcttttgttcctttaggctttatgatatgtcgtaaccggttttgttggtttgctataaatacacacatatagacagaggaagagtcattggatcctcaacgaataaataaccgactttggcggcaaaaacggttgatagaacataatttaatgatttaaggaaagcccccaataaagcaaatacaaaaacagaattagcaatcttcgtggccctttcgtcttctctccctaccccaccttggactaccggaaaatg

SEQ ID NO: 20245 - DNA, 3003 bp, Unknown; identical to SEQ ID NO: 20244
  misc_feature (1)..( 3003): 2750-1469P.txt file - cDNA_ID_1824977; gDNA_ID_1971690; Annot_ID_175070

SEQ ID NO: 20246 - DNA, 3003 bp, Unknown; identical to SEQ ID NO: 20244
  misc_feature (1)..( 3003): 2750-1469P.txt file - cDNA_ID_1824977; gDNA_ID_1620719; Annot_ID_165739

SEQ ID NO: 20247 - DNA, 3003 bp, Unknown; identical to SEQ ID NO: 20244
  misc_feature (1)..( 3003): 2750-1469P.txt file - cDNA_ID_1824977; gDNA_ID_2926191; Annot_ID_141060

SEQ ID NO: 20248 - DNA, 3003 bp, Unknown; identical to SEQ ID NO: 20244
  misc_feature (1)..( 3003): 2750-1469P.txt file - cDNA_ID_1824977; gDNA_ID_2926191; Annot_ID_201070

SEQ ID NO: 20249 - DNA, 3003 bp, Unknown
  misc_feature (1)..( 3003): 2750-1469P.txt file - cDNA_ID_1824997; gDNA_ID_1620720; Annot_ID_49178
ttagtatatacagtttatcttgttctcattcgagatgataaatttgtaatttttttttaattttcttacatattttggcattttgctccttttccaataaattatacattattgctttaatcaatgagagtataggtgcagtatttatgattgtgcatgaactttctaatatgattttctttttttttaaatgaaaataaagatatgaaagttgttaaatgtggagaggcgtgagagtagggatgtgtctatgttaatttatgaatatgtagctttcattttgttatccacaccacacaagtcgtgttcgatgaatagttcttatccccatcttcatttatatcatttctcactcaatattagtcccagctagcaaacatcgttaaaaaaaacaaagattctatgaggcaatttcgcattctagtgtcatttgacatttgtagtacaaccatttttggttggctaaatcgctctagacaggaccatctcaagtctcaggtcccaactcttgagctatttgttacttatgtgcaaaaaaattatccaatcgtataattaggatcttagaacaaaatattttctaattataaaaataaaatttggaatcctattctaagtgaaaaatacggttttggctatggagcatataagttgattagattcctactaattaatagagccaattgtatacttcaactttgaaaaactccggcaaaaaactattgatataaatggcaaggttaaactcacacattccgttttgatgcaatatttggctatgttaagctatcatgtaataacaatgtaaaatacaccctggatttttttgcatgaaaacgatggttatcaaaagaattaagtctaattaatatagaaggagacacaacattggacaaatccacatggaagtaagaactatggataagtaattgacagactccataaatttcatgaaacaaagctctatgtttttttgattaaaaaaaaaaagaagaagaacgaagactctattcgactcaaatttaatgtcatgtctttgaatgattttaacttttgcattataatttatttaatatgatatccatctttttcatccatttgccacctttttcttgtcgtacttgtttaaaaattaaaatagtaacataacacggccgacaataaaaatgatttgagctatattggaaacaaaaaacactagtagtagttttctttttcgttaatagtagatttggtaaacatatcttaaagtttttatagatgtcaatttctgtgaatatcaatactctgcacttaatgtcgacactctgatgtatccaaataaactgaaaaaaacaatttagttttcctacggtaagttttaaagcattttagtattttacacaagattggggatttttgtgggtttagccagttttgtatgtgctgtacaaattgaagaaattgcatgtactatattatatatgtaattgctgaatctgttgggtctttagaaattgagaatatgccaatgatagacttttcgtaaatgggctttcttcggctttttatacaatcatgggctttgtatgcccaacagagacatatattactcacatatattcaaccaaaaaaccttgtttacaaatgatgcatctttgttttgaatgttaatactcacatgatacttcagtttgaatgctttttttttttgttaaatagtttatcttaaaataaagcataatatatttcaaagttaatgtgtcttgtgcctgaatttcaaattaaagtatttcaaatatctataacagatgggtttatacatttttgctagtatcatcaattaaagaaaaaatgtttaacagcggttaactggacatatccattgagcatataattgattaaatcattggaaaaagcaattgggaagagtgagcgaaacgtgttgagacagttctatataaatattttagataaaatatgacccataaattacatatataaaatatataaaagtttttggttagaagaatacgaaaaggcaaagaggcacggtattggtcggtcaggtgaagtagggtcctttctactgctccagtcagtctattaccacaagaaaccgcagaaaccagaactcaaaaagcaactttcatatttttttataacaattgtacaatacaaaattcttatagacaaaaatgtattttagcatattgcttttatttatttttgtttgtgtgtattgtattgtcacttttaaaacaagaaagaaatatttatctgacgaccaaaaaaaaaaaaatttatgtattttgtcgtcttcaaaactttgattttactattggcttgggcttaagtatttaacattagaactgttcttttacgttaaaattaattattcatcctgctcttttgtacctacgtaatttccttttcacctgattcttgttttattcgactcttgtagtcttgtagacatacgtatcaatcaatacatacacgttaaatagaatctgactacagttaattatacatcaaattatttcaagaaaattaattttccttgtacttatataacataattacataggtcccgacatatttttgtttgtttattattcaaatactgactctgtaatagttttttatttttttttatttttgactctgtaatagtttaatacatactgtgtaaatctgtgatgatacaaaaaagtgtatataaataatattcataaaaagacattactattattaatgtcaactcatatataaaagagaaacgattacgtgtataaatatgatatatccatgcgtgtagtactctttaggaaaaatttatttgcccttcatagggtagtcactttcctttttcttctttacttacaaatcttcctctacacatcaacacacagagaaagagagagagagagagacagatagagagagtgagaatagaagtgagtgagagaaagtctaattgtttctcctgtaaactgcaaaccgatctcgtgtctgaaaatg

SEQ ID NO: 20250 - DNA, 3003 bp, Unknown; identical to SEQ ID NO: 20249
  misc_feature (1)..( 3003): 2750-1469P.txt file - cDNA_ID_1824997; gDNA_ID_1620720; Annot_ID_165779

SEQ ID NO: 20251 - DNA, 3003 bp, Unknown; identical to SEQ ID NO: 20249
  misc_feature (1)..( 3003): 2750-1469P.txt file - cDNA_ID_1824997; gDNA_ID_2926214; Annot_ID_142121

SEQ ID NO: 20252 - DNA, 3003 bp, Unknown; identical to SEQ ID NO: 20249
  misc_feature (1)..( 3003): 2750-1469P.txt file - cDNA_ID_1824997; gDNA_ID_2926214; Annot_ID_202836

SEQ ID NO: 20253 - DNA, 3003 bp, Unknown
  misc_feature (1)..( 3003): 2750-1469P.txt file - cDNA_ID_1825007; gDNA_ID_1620720; Annot_ID_49173
atttgatgatcttcttctcagtttatctgggtaagtacacacttcaatcttcatggattcatgatttccccctcaaatttctcgggaaaataatgatggattttgacttctttatttttgtttgattaaatctttattaggaggttatgatatggaggagaaagctgctcgagcatatgatcttgctgcactcaagtactggggtccctctactcacaccaatttctctgtaaatcatcttttctaaactttatgtctctttgaccttgttgtatgatttatttatataatatgataatggatatttgaaggcggagaattatcagaaagagattgaagacatgaagaacatgactagacaagaatatgttgcacatttgagaaggaagagcagtggtttctctaggggtgcttccatctatagaggagtcacaaggtccttttaaattacatttatataactttatataatacatagtttaataatgtgaatattgactttgtgtgagttttttgtactagacatcaccagcatggaaggtggcaagcacggattggtagagtcgctggaaacaaagatctctaccttggaacttttggtaattcatcatgccgatgattttgattgttaaaacttaacattttcaattgcttgtgtcttacgaaatcttttgacactatcataggaacccaagaagaagctgcagaagcttacgatgtagcagcaattaagttccgtggcacaaatgctgtgactaactttgatatcacgaggtacgatgttgatcgtatcatgtctagtaacacactcttgtctggagagttagcgcgaaggaacaacaacagcattgtcgtcaggaatactgaagaccaaaccgctctaaatgctgttgtggaaggtggttccaacaaagaagtcagtactcccgagagactcttgagttttccggcgattttcgcgttgcctcaagttaatcaaaagatgttcggatcaaatatgggcggaaatatgagtccttggacatcaaaccctaatgctgagcttaagaccgtcgctcttactttgcctcagatgccggttttcgctgcttgggctgattcttgatcaacttcaatgactaactctggttttcttggtttagttgctaagtgttttggtttatctccggttttatccggtttgaactacaattcggtttagtttcgtcggtataaatagtatttgcttaggagcggtatatgtttcttttgagtagtattcatgtgaaacagaatgaatctctctataacatattattttaatgaatctcctttgctaagtccttctctcttcgttacgtattttcgatatattatacttattcatgtgctaaaaaaggtgaaaacaagggaaatatgttggaacaacacaaaaggttgcatgaatatatctaaactatgcgaactattatggctattgatagaaacatgaacatttagtagttgattttatggctttgatagttttggcaattgattagaatgttaatctctttatagagaaatagtaagaaaatatgtaaagagaatgtgcatggagctgaaatgacccatatctaataattaggtttcttgtcactttatttatctttttgaaacacattgttcttttaagtacagagaaataataagatgaataatggtaaatatgtaatgtctctccaataatgcgatatgctttattgaccatatcgttccacaacaatccaacataccttcaccacctcatttctaaattccctccttttgtctctttttcacacccccaccgtatcagcttttccctaaagtttcaccaaaattttaaaatattccctcctccatcatatttagtgattttttttctttttgatatttattaaagttagtttatactgtatctaaaaaatggagaatttattggttggaacttttaagagccatttactatgtcccaaaataaatatgggggcagcaaatttactgtaacccatacgtggggtaaatgaagtgagtagttcaaagttgaaacttgaaaacctttgatctttaaacataatgtccttcgcacgtgttttccacacgcgtggagtagtttgcagaaactcggaagcgaaagatggttattgggccttggaccattataatcacaaatctggcccacttttatcttttattcgaagcacgtttgcaggacattaatttgatcgtgcttttcactcgtgaggaagagttggtttagaatccggagagaaacgtagttattgggctccggcccaagtttaatttcaaaactcacttctcataaacccaaattttgggcatatgatttgagttggacaggatgtgattctttttttttttgtttctctaacaatataatgtcttgggttattttgtggtgaatatgttgtagggttcaaaacattatagtccacatgaaatcatatttttgggccttgatattttcatatcaatcaatcgaattaataacacattaattgcatcgaaaatgtggtttttgtttgttataccaaaatacgaaggcaaaactcttccacgcaaaaaactcttccacgcatgcctctaacttcatccagttctgttcgttatgataaaaaaaaaaaatataacaaaatctataagatttctaatttgatcagaactttataaaagtctaataacttttgtcacattataagcttttaggaaaaaataaaacgaccgaccttatttaattgcattgtcctaacttcccaaacgttttaatgagattttgcgtaatagagaaacaagccacgagttcgattcacagccacaataatctttctctaccaaataaagacttgatctttctcttctccttctatatccacgcgtcaattcgtaaaaccaacggcttgaaccaccggcaatagccgcgggattgcggcggaggattaatcaaaaaacgcaccacctgaaatctctctgtgtacgctaatg

SEQ ID NO: 20254 - DNA, 3003 bp, Unknown; identical to SEQ ID NO: 20253
  misc_feature (1)..( 3003): 2750-1469P.txt file - cDNA_ID_1825007; gDNA_ID_2926214; Annot_ID_142116

SEQ ID NO: 20255 - DNA, 3003 bp, Unknown
  misc_feature (1)..( 3003): 2750-1469P.txt file - cDNA_ID_1825011; gDNA_ID_1620720; Annot_ID_49172
aaaaggcaagaaaactattgtcgaaaagacataaatgacactaaaattggattattaaaaatggtatatatgtttggtggaatttataatcattaccaaaatcaaaggaaggagagagggacctcttcgtgcttatgatttccctcctaaacaactgctcccactatccttttttacttccaacaaaatcattcacacgagaaaatctgtctcgtgatcactttcatgcaaaattaaactaaattttggtattttttgtcaagttcttgctgttttaagtcgattatttggtaatactatatgtgtggatatacacatccaagctaatcaataattgatctccttctcttatcaataaattacaccacattagctaatcaagctaataaattacaccacattctcttatcaatttttatatggtataaataaaacaaccgactataggctacagagttggtattaaggcattattgccttctagtcgaaggaatttttttgttatgataacactcgtgggaaaaaaatccagcctaatatgctcatttaaaggataattgatttaaatgctttaatcattaaaataaaaggtttttgcttttaaaggttaccaccgcttaattcatcattaggagaatattaactttgatcgaaattccaaaatacttttttaacacataagaaaattttcagcatttttaaataaagggtacatttattgggttcaataaatatgtttccacgtaaagtttggaggtttaaccacatgaatgttttttgatttaaaaaacacataaattttcttagtaattacacatttttaaccgtccatccagattgtaataagtgacaaatctgaaaacatttttttttttcttgaatcttgtttaaattctctctgctgcatacttgcaggcatttgaccaacgactatacatattgaaagcaaaatatccaccagggatgatagggttagatcccacattcaatatcttttgtctttgttatttatgaaaaacaaatatttatcaggaaaaaaacgtttcttctctagtggtataagataataacaaaatttaatacttagttaatgtatttactatcttcaaacttaccatccttcaacattaatattgatcaatttttattttttttactaaactacttccactaaaaaaatgcaaaagaagagatatatatttaagtcaaagtaattaaagatggatgggtgattcttcagcaaaacggcgccgtagaggtgtcttatcctacattacagctgggttgtggcagacatcatagggcctacgtatatttgagctttactgtacgtaaagctttaacatatctagttagttctcactgtacaaacaaaacaaaatccaattcgtaacatatatacaaatactactagtactagattacgctacgtatacatcgctttttcgcaaatttctaaactaatctatacaacaaacttgaatgtttgttttgtaatttatcttaaaccaaagttttgaattgtgcattgggagctacactctagtccccttttttccccaaaataatctccttacatcgaccggttaaagtatttaaaccaacaaattttaatttgttgctgaaggtacaaacatgtcacatatatagagacagcatcgtttatacaaataatgttcgatgtattggaaatcaaatataaatacgagtagcgactcacttggtttaatagtttggaagataatgaaataaaaagatgaattcaaaggatacagagctatatatgtcgggtcatttagagccgtgaccaaaagtttcgtcgtaatttctacggtcggtcataagaaattttggacttttcttcacccttttatgaacttctgtatagtttttgtcggattatatatttgtattcgtatattttttgtttctaataatgatacgtaaattcacgataagaaagacttctttttatttaatttgatttaaaacttttgtttttggaaatgactcatacacaaggttaaagtttgatggtatccaatttacaaaaatgtttcgagagtgcgttcgagtgtcctaccaccatcgtaccaactcgtatgggtttattattaggtttttttcttctttttccaatgtctttataattgaaccactctaaatttctttttttaaattaggttaagaatcttgaattttctgttgattttaaaccaaggttttcaattcttcttagcacaaaaaaaaaaaaaaggttttcaattattaaagaatctaaattttttgagttcaagagtttaatgatagctgaaaagttatgaatgattgcaagtttgcaacagaatggtcgatgtagtacatatcaaaaacatgcatcaaaataaatattcgtgcttagcaagagaaacgattgaaataaacagaacaatcgttaaccacttaaaaatcttagaataattttgtagtgataattttctgtaagagagaggtatcatatcttacaaaaaaaaactcatttcagataaaataatgttgtccaatcgttaccaagtatgtttttgctgtcatcagttgtattgtaactcgtctcttagccatatagttctaagttttaaatgttttcaaagactttacaaaaataaaataataataaggtggaatttgtagggctaaaagcgaaaaataaaaataaaataaaagtaaagaaacgtctttctcaataagaacacagatcccaacggattcaaacagcaaatttgtgctttgctcttctctcttattataatatcctctcaaaaaccctctcctatatcctcctaaagccccccttccttgtttctctaccgcaacaaagaaaaaacaaaagtttgagaaaaatggtgtgttcgttgtgtaaccaatgattgggttttagcttactacttcgagagattataagaaagaaagagtgaagatacattatagaaagaagagaagcagaaaccaaaaaaagaaaccatg

SEQ ID NO: 20256 - DNA, 3003 bp, Unknown
  misc_feature (1)..( 3003): 2750-1469P.txt file - cDNA_ID_1825011; gDNA_ID_1620720; Annot_ID_165768
tttaaattctctctgctgcatacttgcaggcatttgaccaacgactatacatattgaaagcaaaatatccaccagggatgatagggttagatcccacattcaatatcttttgtctttgttatttatgaaaaacaaatatttatcaggaaaaaaacgtttcttctctagtggtataagataataacaaaatttaatacttagttaatgtatttactatcttcaaacttaccatccttcaacattaatattgatcaatttttattttttttactaaactacttccactaaaaaaatgcaaaagaagagatatatatttaagtcaaagtaattaaagatggatgggtgattcttcagcaaaacggcgccgtagaggtgtcttatcctacattacagctgggttgtggcagacatcatagggcctacgtatatttgagctttactgtacgtaaagctttaacatatctagttagttctcactgtacaaacaaaacaaaatccaattcgtaacatatatacaaatactactagtactagattacgctacgtatacatcgctttttcgcaaatttctaaactaatctatacaacaaacttgaatgtttgttttgtaatttatcttaaaccaaagttttgaattgtgcattgggagctacactctagtccccttttttccccaaaataatctccttacatcgaccggttaaagtatttaaaccaacaaattttaatttgttgctgaaggtacaaacatgtcacatatatagagacagcatcgtttatacaaataatgttcgatgtattggaaatcaaatataaatacgagtagcgactcacttggtttaatagtttggaagataatgaaataaaaagatgaattcaaaggatacagagctatatatgtcgggtcatttagagccgtgaccaaaagtttcgtcgtaatttctacggtcggtcataagaaattttggacttttcttcacccttttatgaacttctgtatagtttttgtcggattatatatttgtattcgtatattttttgtttctaataatgatacgtaaattcacgataagaaagacttctttttatttaatttgatttaaaacttttgtttttggaaatgactcatacacaaggttaaagtttgatggtatccaatttacaaaaatgtttcgagagtgcgttcgagtgtcctaccaccatcgtaccaactcgtatgggtttattattaggtttttttcttctttttccaatgtctttataattgaaccactctaaatttctttttttaaattaggttaagaatcttgaattttctgttgattttaaaccaaggttttcaattcttcttagcacaaaaaaaaaaaaaaggttttcaattattaaagaatctaaattttttgagttcaagagtttaatgatagctgaaaagttatgaatgattgcaagtttgcaacagaatggtcgatgtagtacatatcaaaaacatgcatcaaaataaatattcgtgcttagcaagagaaacgattgaaataaacagaacaatcgttaaccacttaaaaatcttagaataattttgtagtgataattttctgtaagagagaggtatcatatcttacaaaaaaaaactcatttcagataaaataatgttgtccaatcgttaccaagtatgtttttgctgtcatcagttgtattgtaactcgtctcttagccatatagttctaagttttaaatgttttcaaagactttacaaaaataaaataataataaggtggaatttgtagggctaaaagcgaaaaataaaaataaaataaaagtaaagaaacgtctttctcaataagaacacagatcccaacggattcaaacagcaaatttgtgctttgctcttctctcttattataatatcctctcaaaaaccctctcctatatcctcctaaagccccccttccttgtttctctaccgcaacaaagaaaaaacaaaagtttgagaaaaatggtgtgttcgttgtgtaaccaatgattgggttttagcttactacttcgagagattataagaaagaaagagtgaagatacattatagaaagaagagaagcagaaaccaaaaaaagaaaccatgaagtctttttgtgataatgatgataataatcatagcaacacgactaatttgttagggttctcattgtcttcaaatatgatgaaaatgggaggtagaggaggtagagaagctatttactcatcttcaacttcttcagctgcaacttcttcttcttctgttccacctcaacttgttgttggtgacaacactagcaactttggtgtttgctatggatctaacccaaatggaggaatctattctcacatgtctgtgatgccactcagatctgatggttctctttgcttaatggaagctctcaacagatcttctcactcgaatcaccatcaaggtcagtagtagtaatgttggagtttttagttttcttggtgttgatgttgttgtgtcttgtttgatgggaacatgtttggttttagggatttatgttttattttttatactaaggacattttctgttttttttggttgttatttagattcatctccaaaggtggaggatttctttgggacccatcacaacaacacaagtcacaaagaagccatggatcttagcttagatagtttattctacaacaccactcatgagcccaacacgactacaaactttcaagagttctttagcttccctcaaaccagaaaccatgaggaagaaactagaaattacgggaatgaccctagtttgacacatggagggtcttttaatgtaggggtatatggggaatttcaacagtcactgagcttatccatgagccctgggtcacaatctagctgcatcactggctctcaccaccaccaacaaaaccaaaaccaaaaccaccaaagccaaaaccaccagcagatctctgaagctcttgtggagacaagcgttgggtttgagacgacgacaatg

SEQ ID NO: 20257 - DNA, 3003 bp, Unknown; identical to SEQ ID NO: 20255
  misc_feature (1)..( 3003): 2750-1469P.txt file - cDNA_ID_1825011; gDNA_ID_2926214; Annot_ID_142115

SEQ ID NO: 20258 - DNA, 3003 bp, Unknown; identical to SEQ ID NO: 20256
  misc_feature (1)..( 3003): 2750-1469P.txt file - cDNA_ID_1825011; gDNA_ID_2926214; Annot_ID_202829

SEQ ID NO: 20259 - DNA, 3003 bp, Unknown; identical to SEQ ID NO: 16173
  misc_feature (1)..( 3003): 2750-1469P.txt file - cDNA_ID_1825035; gDNA_ID_1620721; Annot_ID_49206

SEQ ID NO: 20260 - DNA, 3003 bp, Unknown; identical to SEQ ID NO: 16173
  misc_feature (1)..( 3003): 2750-1469P.txt file - cDNA_ID_1825035; gDNA_ID_2926191; Annot_ID_141055

SEQ ID NO: 20261 - DNA, 3003 bp, Unknown
  misc_feature (1)..( 3003): 2750-1469P.txt file - cDNA_ID_1825039; gDNA_ID_1620721; Annot_ID_49205
gttcctttttccctacttactttaagagatgtcaataggcttccttatttactactcagagcgttcttaagctcatacaagattaaggcttaaatcagtaggatcatttgaggcacaatgttgaatcttactttttgtacagatggaagttggaattgaggattgcctgcacatcgagtttgagtacaataaaagcaagtaagacaaaatccgtttcatgatttaaggatttgactgattgattgggaaataagacagatatactctatgcctctggttgcaggtatcacctaaaagatgtcatccttgggaaaatatattttcttcttgtgagaatcaagatgaagaatatggatcttgagatcagacggcgggaatcaacaggtgcaggtgctaatactcatgtcgagacagaaactcttgcaaaatttgagttgatggatggaactccagttagaggtatatttggaatctgatgttttagtgatttctttaagatattagataactgagtgaagatttgcattacaggtgaatcgatacctgtaagactgtttctggccccatatgatcttacaccaacgcatcgcaacatcaacaacaaattcagcgtcaagtattatctgaatcttgtactggtagatgaagaggatcgccgatacttcaagcagcaagaaatcacgttgtataggttgaaggaagacgcatcatcttgatgataataactactgtaaggattctcattatccttttgagactttttttgtaaaaagctttagactttgtgtactcagattgttatttgggtcggtacttagaatgaagttttaacagtacttgtttagtttgttcatcaatcaagttccttttctctggattccggtcgagtttgctggatttcatggtaaagtctgaagttttacaaacctcaaaacactctctgaaaagccaaatctctaaatgcaactaactgaaatggacagatatacaaaactggacaactctagagtaaagaagttggttagtcttcttcaattgtttcaacaggaagaccttccttgccccatgtgtagattccaccttctaggtgaaatacgttcttatagccgttaaggaccagaagataagcagctatgagagacctgcaagaaccctaattatatgagcaccgaaacaaatgctttcttcgcacaaagttgtagacttttggcattacctcgattgttggccttcgggaagattttgtgtcggcttcattgtacccgcggatgaacaagctactatgatctttgcctctttgtcaagtttagcttctacacctgcaacatttccgaaacaaaacattcagccgctggattcaacggcattgtgtaaaaacagtccaaagcttattatctcatttcagtgcatactttgaataaactcagggttctcttctgtgccagagaagataccaaagaaagcaaagccaagacggcgagctatgtcccatgccgtccattcccttatgagtctgtacatctccacattgatagctcccggaggatgacccttcaaaaacaaaacaacaagacaaatgtcactcacatgaatttgccattaaaattacaagcgatcatgacacgacgagagagagagcatagtatcactcaccgccttgtactctgcctctggtcttacatcaagaatcacaaagttgttttctttttgtaaccgttgagcttccttcacgtccacacttctcacctacaacaacaactaaaagctaagctctatgttcacattttgatcgaaagttttagtaaattagagccaatcattgattacccttttctccaatagaagctctctcttctgtctccaatcgacttcagctaaaccctccaagagacacaaacagaagaacgagaggttaatctaaccgaactttaccattcacaagatcgatacacaagatcgctctcgctctacaagttgtatacctgcaggtttggcaggtttggttgaagtgcattgaatcttaagcgttttgtgaccggaaaccattgctgccgatcgaactccggcagagaaaagagtgtttccggaggatttcagacgcaaagcctgcgatgaagatgggtaaggcgtggctattgaagtaagtgaagccatctcttgatcgaagctgcttctgttaagtttctgttttttcagatattttcttgaaaatgagagaatttaattgcacgataatggaagaaagacgatgaaactgcgacttcttttcttcttgttaggaaaaaatctgaacatgtggtgcttattttattttcccgattttctatcttttgtattcaaacgatcaaaagttgacacaacataatcttctcttatcttcttttcgaccaaaacataaaataaaatatttctcttatcttctttagttttctcattgcgccattcttgagtttttgattggatcgcttagatttggttaacctggtttttacgttttcggttataccggtttacctctttttgattaattttctttcacaattacaaaaccaatggtcccatactcccatttgctagtttaccaatttttaaaacggtaagatttagtcgtacaaaagctgttattttcagttttttttaccgccttatcttattgtacttttttttttcatcaatcttattgtacttcttactaatggttatctctctatctttcatctaaaaatatcttaccctttagtgagctcttaaattatgttgttcaattttcttaacaactttaattatgttttaggtattaccgatcacatcattgttcaatagtaaatgttatgttgttccctttcgatccagaacttggtcgtgtacattactaagatacatttgtttttaactataaccagatttgcttatccagatcggaaaatataagtcaactacttgtgttcttgctaccaaaaaaaaagaaaaaaaaaagagctacttgtgttccttcttttaatg

SEQ ID NO: 20262 - DNA, 3003 bp, Unknown; identical to SEQ ID NO: 20261
  misc_feature (1)..( 3003): 2750-1469P.txt file - cDNA_ID_1825039; gDNA_ID_1620721; Annot_ID_165831

SEQ ID NO: 20263 - DNA, 3003 bp, Unknown; identical to SEQ ID NO: 20261
  misc_feature (1)..( 3003): 2750-1469P.txt file - cDNA_ID_1825039; gDNA_ID_2926191; Annot_ID_141054

SEQ ID NO: 20264 - DNA, 3003 bp, Unknown; identical to SEQ ID NO: 20261
  misc_feature (1)..( 3003): 2750-1469P.txt file - cDNA_ID_1825039; gDNA_ID_2926191; Annot_ID_201063

SEQ ID NO: 20265 - DNA, 3000 bp, Unknown; identical to SEQ ID NO: 4680
  misc_feature (1)..( 3000): 2750-1469P.txt file - cDNA_ID_1825043; gDNA_ID_1620721; Annot_ID_49204

SEQ ID NO: 20266 - DNA, 3000 bp, Unknown; identical to SEQ ID NO: 4680
  misc_feature (1)..( 3000): 2750-1469P.txt file - cDNA_ID_1825043; gDNA_ID_2926191; Annot_ID_141053

SEQ ID NO: 20267 - DNA, 3000 bp, Unknown; identical to SEQ ID NO: 4678
  misc_feature (1)..( 3000): 2750-1469P.txt file - cDNA_ID_1825050; gDNA_ID_1620721; Annot_ID_49201

SEQ ID NO: 20268 - DNA, 3000 bp, Unknown; identical to SEQ ID NO: 4678
  misc_feature (1)..( 3000): 2750-1469P.txt file - cDNA_ID_1825050; gDNA_ID_1620721; Annot_ID_165827

SEQ ID NO: 20269 - DNA, 3000 bp, Unknown; identical to SEQ ID NO: 4678
  misc_feature (1)..( 3000): 2750-1469P.txt file - cDNA_ID_1825050; gDNA_ID_2926191; Annot_ID_141051

SEQ ID NO: 20270 - DNA, 3000 bp, Unknown; identical to SEQ ID NO: 4678
  misc_feature (1)..( 3000): 2750-1469P.txt file - cDNA_ID_1825050; gDNA_ID_2926191; Annot_ID_201059

SEQ ID NO: 20271 - DNA, 3000 bp, Unknown; identical to SEQ ID NO: 4676
  misc_feature (1)..( 3000): 2750-1469P.txt file - cDNA_ID_1825061; gDNA_ID_1620721; Annot_ID_49198

SEQ ID NO: 20272 - DNA, 3000 bp, Unknown; identical to SEQ ID NO: 4676
  misc_feature (1)..( 3000): 2750-1469P.txt file - cDNA_ID_1825061; gDNA_ID_2926191; Annot_ID_141048

SEQ ID NO: 20273 - DNA, 3000 bp, Unknown; identical to SEQ ID NO: 4675
  misc_feature (1)..( 3000): 2750-1469P.txt file - cDNA_ID_1825069; gDNA_ID_1620721; Annot_ID_49196

SEQ ID NO: 20274 - DNA, 3000 bp, Unknown; identical to SEQ ID NO: 4675
  misc_feature (1)..( 3000): 2750-1469P.txt file - cDNA_ID_1825069; gDNA_ID_2926191; Annot_ID_141046

SEQ ID NO: 20275 - DNA, 3000 bp, Unknown
  misc_feature (1)..( 3000): 2750-1469P.txt file - cDNA_ID_1825081; gDNA_ID_1620721; Annot_ID_49192
gccagaaatagaggtagatgtgatgttttactacaatctctgttgcaactgaacattccaaattcaatgaaaggtctttgatctaactgactgatttttatatataacaaacaaagagatagccattgttaaagcttacaaagcataacatagaaacaacctaaaagaagtaataacaccaagagtcctgacatgatagagatagagagcaacatgcagagaaagagagtcatcgttaaaagacgaagccttcaagaatgtcgacacattccttaagattttgaatagccttgcggagattatgaatacaacgcttctttcgccttgcgttttcttcttcttcctcgtcgatcacttgagtcgaatcattctcttcctcttccttcttcttgttcagcgtgttctgcttgggacgagaagactcccccacgctctgacgaggacgacgttgagttctcacttccgttgttgtagctaccgagtcattgtccgattctggattcgctgattctgcaacggcgatgggaattggatgcgagggaacagatctggtcttggttgatcttccgctgcgagttcttattatagtttttgtgtctgtcacctctgtctctgaaagaggaactagggctttgtccgagaaaatagtggatgatctcctaagttcagtacagtggactggaagataaagcgttatcactttatttttctcgaaagactcggtctttttttttcttgataacctcttatgattgttttaaagactaaccataattaaaattaaagacattcgaatataaactaacttcagagttgataagcgtcatacaactgaattacatatgtgtcccaagaaagattttacgaacaatgcggtgaccattgaactacgtaccatcaatccgttgcgagatgcaaaccttatcaactatatagaaactttggtatttatgtatatattaagagatccaatgaaagttacgtacgtgatttcttggagctttattagaaacttagtagagtcatatatagacgtgattcaaaaggaaagggatctagtgaagaccttcttcacggctttccatgtgaatgaagaggttctaataagtgacataggaggtcttatactgaatctcggaggcgttgtagaatacgtataaaacgccgatgatttatcggtatcaaatgaagttttaataatagtgtcttcttttacgacaatgcaatcatcaacgctctctggattattattctcctcttcctctacattccaaaaccgagcttcttttcgcttctttttcaccatcgctaacacatcgagtttgttacaaatcccccacaccgtcaccttctgattgtagtagtctactttcactgaatatattcctgattattcgttataaagaaaatataataagcttattaattatttatgcatagtcgtctatgatatcataaccattaaaactattgattacgtacctttgagatgagaaagagccctcttgactttcttctcgcaaccgtaagaatacaaaggcaccatcatttctacgtactgtgcttccaccttgttgtacaccggcacgatttgaagatcacccattatactttaactatgtattttggtcgaattccaatttctaactcaaactatgcacacttacctttatatatagtagagatacacgaacttaggtgtgtgcatatatatattgacgacagtgattgggtttcatgcagaagagatgaggtgcatgttgttgaagtcgtcatgttataagctttttaggatctagtgacttggatttagtgtaaagtgtgtcaccactattctctttgttagatatagttcacaaaatataaccttctttagactttggatcccatgttacatgttcatcttttactttatcccaccaaaagaaaacttggattgaatcttttgaaatctaagcaaaagatagaaattattttcttagaaaagattagacaaaagaaagagaagacacttttgaaaggtgaaatgcgcttcgtcattacgaagcttttaattgttgccattttatttcttgacgtcggtatatctaaaagggaacggcgccggatctttgatgactcacacacagttcttcaccatgtgaaacccattagacttgttttttccatgcattctgaattttaaaccgcttttttccattatagtaaagtttaacaccccttcatggcttttgtaatgtctaaatttttcaatatccaaaacgtcgtataataatgaattaatgactatctacaactatcaaaatttcatgatataagtttattttcttgaaataaaatatgtattttattccttacaatataaatattcattataattcactcacatcattacatgatttttagaaactaaaagaaaccattacccaaattttttatattggctccgattggtgaccaaagaaatgaacaataggaattttggggaggaacaattttgttctatcattctttttttttgaggaatgatgaggaaaaatgtaggatccacctgtctgaaaatggatcaaaaattccttgcaaatggtaaaaaataccgaggaacaaaaaggaacacgactttcctattcattgttttcctcaaaagtggttaccaatcggagccattattttcttgcaatttctcgattcacaatgaattttggattcaactaaaaaaaactctttaaaataacaaccaaaacaatgaataataaattaataacagatggatatttcaggcgtctgaatgggctagagataagcccaataataacagcaggtaccaaactatccactaaagcccaataaaatatttgcctcctctccacgcatattgcgtgaaatcttcgtgatccggcgaagaaacagtacctgaatattgactacgcattataagaggttttgttttggggtttttccttcttcacatatcatttttctgattctcccacgaagatg

SEQ ID NO: 20276 - DNA, 3000 bp, Unknown; identical to SEQ ID NO: 20275
  misc_feature (1)..( 3000): 2750-1469P.txt file - cDNA_ID_1825081; gDNA_ID_2926191; Annot_ID_141042

SEQ ID NO: 20277 - DNA, 3003 bp, Unknown
  misc_feature (1)..( 3003): 2750-1469P.txt file - cDNA_ID_1825183; gDNA_ID_1620723; Annot_ID_49242
agatgtacgtaatctgtcgagttaggatataattaagagaatggtggaatttaattcgtacacatagaattaatggtataattaatttactattgttggtgtgagtagcatcaaatagatgatagaatagtattttgaacaaaaattctgatagatagtataagccttcaaactaaaattgtttccggacgaatacacgaaaagaaaaatgaaataatattaactttctaaaaactcatcgattgatgggtatacacaaaatggttaaaaagaaaaaaaaatgattaacagattttgagattatataatactgaaaatttgagtcggaaattgatttgcaatatgcaaaagacaagaaacatgaggcaaaggaaaaaccatttttcagagaaatctaaacatgtgaaattcgtttttctaaaagtaacaatttgcgaatttatcagcgacggatattttttaaaaataatatgtaatgtttctgttagaaagtacttttggttgacaaaaagaactgttacaaacttactttgttgtgtacgcactgttacaaaattatcaaatttgaatcttgaaaatggttaattagggttgtgtgatacgcactccagatctgtaatcacaaattagctaatgactataaagtcgatgcaaaaagtaaaacatagggaatgtatattatatgccgcttagttgaaaaccgctacatatctatgatcgatttaaatatttgaactctggaactgttgacttttctcttagacttaaattttggtaaacaatttcagcaactaaaatgagtgagaaaacttggttgttgaaaaaaaaagagagagtgagaaaactttggtttagttttctacagtgaccagctttggggttttgggcggaattaattagccaagtagggtctagaaaatgtgatcttttaacacatggccaaagtcgtttatatttggtgattctgtttaaaactcacaatttgtttttttcttttcttaaattttgaaatcatatctatttagaactaaagttcatcataaattttgatgaccctaataaataatatagcgtcaatatagagaacttagctggagatatattgtaaatatgttgttgtaacgatctattacgaataactattgaaatacaatacaattatttaaaagagcaatatataattgtataatttaccacatcattaggatacttcgccccaaacacatattttaattcgtttgaacgaacttaaataaaaaaaataaaaaaaatcattggttaaaactttttattgcagaaataattggttgttactgtagaaatagcggcttctattcgcaaccgtcagatatacaagtctaaagagatgtctttagtttagtcgtgactcctacaaggcatgtgtgtacgatcgcctgatagggaataatttaactttgcataatccatattttccgacaatcatcgagttgacatgattcgacatttggtcatacacgtaaatataacaacgtgcttctaattttaattttataagattaaaactatcagatagtactttttgggatataggaaaaatgcatctcatgtaataaaactatagcagaaacgtgtcttaaaaataatttacataataaatagttaacttgttttatcatgactataatatgcaaacattattgcggttgtacgcatgtaataatattactgtatataaactgttatataccagctcttataactttaaaactctatccattttcttaacgtaatgtatagtataagtgaatgaaatttttctctttttacaaatttatctggtttataaaagttgctaatatcaggcataatatggcttatggcgtatattgagcatatcagcatacaacacacatccctaaagaaaagactttggtcaaacatccaacgagattatcttttatagtatagtggctcttaatatgcgtatatacatatatataaaaaacaagggattcgtgacagagaagaaggatttgctttgccttgaaaggataacctttaccaaaaggattattttttaataatggaaactgtggagggatgtcatggtttttatattcaaagcatattatattgaaatagtatcttcttaagaacagtatatctttagcattatatatctgatacgcaatggatatggacgtttaataaacatgtgaaaagactagttgcagtgtgagcaggtgcaaataaaaagaaaggatcggagcccacatgcgaccatcgcaacatcatcaacggttgagatttgaggttttgttttcatgtatccgaatcttaagacatggttgcactttcacgtcgacatttgtcaaatagttatattctccagttcctcctagttgtatgagaatataattttgttttagagaaaatgtgcattatggtttttttttttttccaacagtttgcgttttagatactaattctgtatttcatggaaagagatggattcgcaatggtatttcacataaaggaaattttgtgttggatgatggtatgacaaaagctgtttggagggtataaattattaagttgacattaatttcaaaaatttataattatgtgttttaattctcttaattaaataaactgtagaggattttattttgttatgtatatatattgactataagttgtattctactagtttgttacaaatcaagcccgaggctcatcccataaatgaaataaaaaaaaactgataactatttcaattttatttaaaaaaaaaaaaagagtaattccgtaacctgcattatttggtcctcctactgtgtatctatttaatatttaaataatggtcctccctctcacctaaggagacatagagaaccatctggttctttaaggcaccatcattcaacaagtaaacaataaaggaaattaaattatcacaagacagaaccacaaaatcctttggagatctgacactggtaaagctcaaagtgtcaaactatg

SEQ ID NO: 20278 - DNA, 3003 bp, Unknown; identical to SEQ ID NO: 20277
  misc_feature (1)..( 3003): 2750-1469P.txt file - cDNA_ID_1825183; gDNA_ID_1620723; Annot_ID_165865

SEQ ID NO: 20279 - DNA, 3003 bp, Unknown; identical to SEQ ID NO: 20277
  misc_feature (1)..( 3003): 2750-1469P.txt file - cDNA_ID_1825183; gDNA_ID_2926187; Annot_ID_140847

SEQ ID NO: 20280 - DNA, 3003 bp, Unknown; identical to SEQ ID NO: 20277
  misc_feature (1)..( 3003): 2750-1469P.txt file - cDNA_ID_1825183; gDNA_ID_2926187; Annot_ID_200715

SEQ ID NO: 20281 - DNA, 3003 bp, Unknown; identical to SEQ ID NO: 15825
  misc_feature (1)..( 3003): 2750-1469P.txt file - cDNA_ID_1825193; gDNA_ID_1620723; Annot_ID_49238

SEQ ID NO: 20282 - DNA, 3003 bp, Unknown; identical to SEQ ID NO: 15825
  misc_feature (1)..( 3003): 2750-1469P.txt file - cDNA_ID_1825193; gDNA_ID_2926187; Annot_ID_140843

SEQ ID NO: 20283 - DNA, 3003 bp, Unknown
  misc_feature (1)..( 3003): 2750-1469P.txt file - cDNA_ID_1825197; gDNA_ID_1620723; Annot_ID_49237
tacgcgtaaatcgtatcttctacatcggttgacaaaaaaaactggtatcttctacacttttatcttttgagcttctctgttttgtcgccacctaatgtgtaatgtcttttattcaatgcaaaacccgtatcttctacatttcgttgacaaaacaaattggtatcttctacactgtgtagtgaccacaatgtatcatcaactggtattgcatcagctcagaagcgagtcatttgggcattgtatattctacggaccaatttttttcatttttagcaaacaaattttacaaactacatatcggttgtccataaagaaaacaagtacgtagaaaaataagaaaacaagtacgtatacttaacgctaataaatagcaaccgacttttgaattatttgatttaactctttaaattatttcttagaaagagttatggaagaattaaaagttttaaaaacatttgatgctaatctagtttttctttggtgactttttttcaaccaatttgagatgttttaaatggggatctgacaagtaactattgtaccaggaatacgcaccatttcctttttttgtgcttataaatacatatttatttattttatttatataataatttgaaaacttagaaattacactaatttattaattctttacttacaaacaattggttttagtttttaaaattatccaaggctgatttcacctaattaaaataaccatgactagattttaacccgcggacaacttattttttaaattagtatatataaaagtttgcaaattaaatctatttatttttattttatagtttacaattgttattaaataacgtcttaccaaacccgtctcgccaaatccgccccgtaaaaaaaaaccgcggtacaccgctaatttaaatatataattaaaagaaatattttacgggattgcaattgtattttggtttgtcaaacaaatatttgtttaaaatagttgccaaaatctagttcaaattttggagaaaaaagatttattggatagataaagaatatatttaggtgggttttgctcattttaagggattgcaattatatttttgtttgtcaaacattttttgttttaaatagttgctgaatatatttggaatatttttagtttattaatcaatttattgctggaaaaaaatcaataattaatactcaatggcagcctagtaaataagtcccaactctaagatttatttcacaaaatggctgcaaaaatgtatatatagatgattcattatttcattttatgcggtaggagtaaaaacaacattaactagcaaaaactataatacacacacaacagtaactactcatcgagtatggcattcatggatacgaatcaaatctcaaatcgtataagcctggccattattttattttacaatatttgataatgtgctacctaaatatcaaaattttagaatattctgaaataaaatgtcgaatttttgtgatagccttaaattactacatgctcacgtatgtaaattttctattctttcatagttaattttctattaaaatgtacaatttccagtttgatggtatgaagatcaacaaagtaccataaaaatgtataatttctatttcttcctaattaatattctttaaagtgtaattttccagttcatccttgttaattttcttaaataataaaatgtaaaacttacaaatttcacggactttattaacagaaatgtaaataattgtaaataaatgtaaacatactgtgtcacaagaagacatgacaaaaaataaaaacagtagaaataaacttttttctgggtgcgtgtggtaaaacaaacatggggactgatccaatgaagtttatcgcaatttctggaatttcagtcggtgtattaatcatcatcgcactgatagtggcttatgcctgctatcgtgcccgaaaggaaggaccagtcagaggcgacggacgactcacacctattgtaatgatgatatgatatatcacctattttcgatctttttctaataatttattttatgatgcaactttttagattactatatactatagaagagcatattgtaattctattttacctatataataataaataatatttcggcgattttgtcatatgctggagtgttacattagatgatgactagtagggtttttttttttatgtgaaaacaacaatcgttgtgtcatataacgcgaagtgacaaacaaacaattcgaaatattagcaatgttacaaaattcgaaatatacgcaatgttatggtggtgttgaccgaagggtagtttcgtaactttacatcatcgcgtggtcgtatacgcgccgatgagatcacagacggcattaatgggctccggaagaagaaacaaatgattaatttaaggaataaattaccactaaattcgtttgattatttccggaaaacaattaactaataaaactataactaacctttgtttaattttttgatttcgcgtcttcactgttgtggatttcttctgaatcttctgagctcgcttcacctacaagaagacaacaaggatcattttctctaggttcgtagattctctttcttcttcttcttcgtttggatctgcttagtgaagaagataatcttctgaaaaattgtttgttttttttctgaaaatctgaatacgtaatgatttgagctgaatctgagttagattcacatttatattctggatttgtgctatttgatgatttattagatcgatcatcttgttttcttctttcgcctttaagtatgtttgctcatagtgttgctcttccagattccagatcctgaagaaggtgaaatcttatctgtgatccagtggaagattgaatcaagtaacagattcacttagttcacttgcgtattgcatgcccctgaagataacattttgaataatgttgatattgaattatcacctataagctctggttcttgttgcttgtattggttctgggtatctactagtgaagaaaccatg

SEQ ID NO: 20284 - DNA, 3003 bp, Unknown; identical to SEQ ID NO: 20283
  misc_feature (1)..( 3003): 2750-1469P.txt file - cDNA_ID_1825197; gDNA_ID_2926187; Annot_ID_140842

SEQ ID NO: 20285 - DNA, 3000 bp, Unknown; identical to SEQ ID NO: 4698
  misc_feature (1)..( 3000): 2750-1469P.txt file - cDNA_ID_1825205; gDNA_ID_1620723; Annot_ID_49235

SEQ ID NO: 20286 - DNA, 3000 bp, Unknown; identical to SEQ ID NO: 4698
  misc_feature (1)..( 3000): 2750-1469P.txt file - cDNA_ID_1825205; gDNA_ID_2926187; Annot_ID_140840

SEQ ID NO: 20287 - DNA, 3003 bp, Unknown
  misc_feature (1)..( 3003): 2750-1469P.txt file - cDNA_ID_1825212; gDNA_ID_1620724; Annot_ID_49261
agaaaaagatatttaattgtgtggtggaacagatgatgtacgaagacatgaagagtagagtcgaacatgtggtcgagagcggaaaagttgagactgcgtttatcgcatgcgatcaatttagttgtgtgttcgatctgtggacagataaattcactcgtcatgaccatcctaccattattatggtatgtaactattttgtaatgcatggtaaaagtttcgtcacaaattaatgtttctaaaaactcgtttttatctattaatttgtggtgaaggtgctacaacataacgaaacagagatgatgccaaaccttatatatgtttcaagagaaaagagtaaagtttcaccacatcatttcaaagccggtgctcttaatactttggtatcaactaatccatatctcggttaaactgtcatttctatatttgtaatatttcgttaaccacaacatgtattttctttgtagttacgtgtatctgccgtgatgacaaactcaccaatcattctaacactagattgtgacatgtactcaaacaatcctacaacaccacttcatgctctgtgctatttgtcagaccctaaaatcaattttgatttaggatttgtgcaatttcctcaaaaatttcaaggagtaaacaaaaatgatatttatgcatccgagctcaaacgcccatttgacatcaacacggttgggtttgatggacttatgggaccagttcatatgggaactgggtgtttcttcaatcgacgggcgttttatgggcctccgactactttgattttgcctgagatagaaacatttgggccaaatcggattgccgataagcccattaaagcccaagatattttggcgttggcacacgatgtagcaggatgtaactacgagtgcaacaccaattggggatccaaggtaagattaaaatgaactttagctttcttttatgtatgttgattttttggttatgtttacagattttgtttcttttacatcaactagtcttctcaaaatccatatttataaacatattaacaaaatttttgtgtaattaacataaacacaaaacacacataaaaatgaaaaaaatgaaaaaaaagtatgtttgcattcacatgtaaaacaatcgactctccaatcttgatttctgtgacattgttttgttattacttactagccatttgtcaaactttacagataggtttcagatatgggtcattagtagaagactacttcacaggatttatgctccattgtgaaggatggagatcaattttttgcagcccgacaaaagctgcattttatggagactccccaaaatgcctaacggatgtaataggccaacaaatccgatggtccgttggacttcttgaagtagctttttcaagatacaatccacttacctatggaatcaagccattgagcctattaatgagcttaggttattgccactatgcattttggccattttggtgtattcctctcgttgtctatggaattttaccccaagttgccctcatacatggagttagcgtctttcccaaggcatcggatccatggttttggctttacattatcttgtttctcggtgggtacgcgcaagatctatcagactttttattagaaggaggaacttatcggaaatggtggaacgatcaaagaatgtggatggtgagaggactctcttctttcttctttggttttacagagttcactctcaaaaccctaaacctctccactcaaggatataatgtcacgagtaaatccaacgacgataatgaacaaatgaagcggtatgagcaagagatcttcgattttgggccctcttcgtccatgttcttgcccattactacggtcgccatcatgaatctgctagcttttatgcgtggcctatatggtattttcacttggggagaaggacccgtccttgaactgatgctagcgagtttcgcggtggtgaattgcttaccgatctatgaagccatggtgttgaggatcgatgacggaaaattaccaaaaaggatttgtttcttagctgggctcctcagttttgttcttaccgggtcaggctacttcttcctcaagtaacttcaccattaggccattgtaaaaaaaaaaaaaacacttcaccatgagggttaattttcaacaagaatgatatgaattaatgcatcttgctcaagctgaagcaagagagaataatgtaatgaatccttcttaatatttacttttttatctacaattagcgcgcgcacacactatataacctatttgaatcttggttatgattggtcacttcttggattcatatatttttgctataaaagtatacacaaacgtagtatacattatacattttatccatatatacgaatgtcttaatcatacaatcgtgtggaagtaatggtggttcatattactatatcgctttaagtaaataaatctcgttttcaatgtaattggaacatattgctatgtgttagattacgacattatgaggtaactatttgggtactattttaatattttttcatctcctctctcgccgacgccaagatatgtgaagactgaagacagttgctctcacaacccctatcatcagccacgtgtttttttctcctttttattcaacattttctccttttaatttctcaacaaataccatcttttagaaagaaaaaaacaagtcaatatatatttttattatttatatgtatgtgtttaaattaatttgctttcacacaattttactaatataactgacttttaatacaaaaatggtttaggtatttaaaacaaatttcagtaatagtctagtgaaagaactaaaccgtaagcttaaattaaccattcattttgtgaaactgttgaaaattgaaatcctaaaattgtctgggagaacatatcgactctttttgacaactaaactataaatatcatcaatctagtagaggtaagtttaccagtcttctccaaaacaatttgtaaaaatagagtaactaaaacgatg

SEQ ID NO: 20288 - DNA, 3003 bp, Unknown; identical to SEQ ID NO: 20287
  misc_feature (1)..( 3003): 2750-1469P.txt file - cDNA_ID_1825212; gDNA_ID_2926184; Annot_ID_140712

SEQ ID NO: 20289 - DNA, 3003 bp, Unknown
  misc_feature (1)..( 3003): 2750-1469P.txt file - cDNA_ID_1825216; gDNA_ID_1620724; Annot_ID_49259
aaattgaaccgtttgtaaattcagaaaacgttcccaaatcagttatgctgaagaacaaaaggccccgtcaagttagtgaagtatctgcacttggtgaggcacaatctaaccgccactgatttgctagtacatagcttaagtttccttgctaaatctcacatgctgtgtttagatgtaggcataacagcttcaaacctttggagctctgttttgacgcaaccccatgagtttgcacaatcgtgcatcacctcacagtggagttctcctcagcaatgtcatcgtgatgcaaatgaggatgctaagaaatctgactggctaaataactcttactctgtgtcaaatgtagcaaaagactcaacactgaacgaccaaatggtttccccagtcgagcagaagaagcctgagacaaccgctaattatagattatttggaattgatctgatgagttcctccctagcggttcctgaggagaaaactgcacccatgcgaccaatcaacatatccaaaccgactatggacagccactcagacccaaaatcagagatttcaaaagtatcagaagagaaaaagcaggaacctgcggagggatcaccaaaagaggtccaaagcaagcaaagcagttctacaagaagccgtaccaaggtatatatatgcctacatggctaccgtgaagtgtatatacattgtgtaatctgtgagttgcaaaacagatacacattatgtataatgtttgcgggactgaacaggatcctgaattctttatcgctgaacaggtgcagatgcaaggcgtacctgtgggcagggctgtggatttaaatgcgctaaaggggtacaacgagctcatagatgacattgagaagctgtttgacataaaaggggaactgcggagtcgcaatcaatgggaaatagtgttcacagacgatgagggagatatgatgcttgtcggtgatgacccatggccgtaagtaacttactctttatctcttagtcaatagaatcactacacaaaactcatatctgttgacttaatttggtggtgcagtgagttctgcaacatggtgaagagaatattcatatggtcgaaagaggaagtgaagaaaatgacgcctgggaaccaactccggatgctgttaagggaagttgaaacaacactaacaacaacttccaaaacagataatcattccaactaatttttattctattctctatcagtcttcgtctccttcttatttgctttgtctttcggaattatcttgtttgtgtctgtgttttgttgcgcatggcttaaacaagaaactacatcccctgaggcaaaaaaaatggctcgtttttttggagcctcttatggagaaagggggtttatggggagagggttttctacttttaaaataggcttttggaagtttctttttcttctaggaacttgtgtgtaagagaaacaaatatgtaacgaacagaaagaaaaaaaaaaaaaaaaaaaaaaaaagagaatgagatttgtgaataacttgatgaaggacttttgggactctgggattataagagattaaagagggattatacctcatggctctcgtgttttctgattctttttcgtagttgtgttttctttgattttgtttttcatctaagttttaatgtatatataaaatttcaaacatggctttcttgtatttgtcaaatccccaaaggtacatatattatcaatatttaaaatgttaaataaacaaaactctagacctaaaactatttcaggttttcccactaaccttaacaatgattcaagattattgatgttttgtctgtgaggacatgtatgtggccgctcttgccaccatattcacaaacgtaattgtatgaagtatggaccaccttttcgctactacttctggatccccttatgtttgtaaagtgtatcattcccttatatcactattcactcacatgcattaaaatatcgaatgctgcaaaggaaaaaagagttatttttctctttagatatcatttgggttatgcatattacttggattagtccaatatgtcgtgtacaaccattctcgctgcaaaacaactacaatatgtcaacatagtataacacatgctgatctggtgagattataaattgtgaagtttgtctttataatatgtacatatagtatttctttgattatgacaagtgtgtagaaaatgttaggatattattctaaatcccacatacgaaagattagataatgattatccaacatataagttcaatctaattttaattagtgtatcatttggggaaaaaaaatcgtgcatatctggttgcttggtccaaatatctatattttctgacggtccaatatttatatacgtaccacataaatacacctatacgaatctctttactaatacgtcgataccgttcatagttaatgacgttatttactgccgagataatgaagtgatgatgtaggttatttattgccgagatttgtgaaggcagtggatctcacaatccctatcttttcctcttcttttttttctttttttctttccatatatagagaagtttaaatttaattgtaccattaaaagctcaccaaataccaacttatacatacagtcagtatctatatcaggaatttatatgtatgtgtgtataccgaataatagtaaactcattttactaataaataactttgttttattatatatttgataaacaacttgttataaattattttaatatgttaaatttgaacttattaaattttaagtaatattctagtgacggaagtatacattgtatttaaattgcatagatgtaattacttattttaaaaacttatagcactattcagtgatttacttttccaacctaaaatcgaggtgtagaatgtctactctggaaaaaaaaatcgcctataaaatatcaatatcaatggtgagttttgttctatgtaccaagtttctctaaaacaatttgtctttctattaaaaataaagagtaccacgatg

SEQ ID NO: 20290 - DNA, 3003 bp, Unknown; identical to SEQ ID NO: 20289
  misc_feature (1)..( 3003): 2750-1469P.txt file - cDNA_ID_1825216; gDNA_ID_1620724; Annot_ID_165907

SEQ ID NO: 20291 - DNA, 3003 bp, Unknown; identical to SEQ ID NO: 20289
  misc_feature (1)..( 3003): 2750-1469P.txt file - cDNA_ID_1825216; gDNA_ID_2926184; Annot_ID_140710

SEQ ID NO: 20292 - DNA, 3003 bp, Unknown; identical to SEQ ID NO: 20289
  misc_feature (1)..( 3003): 2750-1469P.txt file - cDNA_ID_1825216; gDNA_ID_2926184; Annot_ID_200492

SEQ ID NO: 20293 - DNA, 3000 bp, Unknown; identical to SEQ ID NO: 6203
  misc_feature (1)..( 3000): 2750-1469P.txt file - cDNA_ID_1825220; gDNA_ID_1620864; Annot_ID_51316

SEQ ID NO: 20294 - DNA, 3003 bp, Unknown
  misc_feature (1)..( 3003): 2750-1469P.txt file - cDNA_ID_1825234; gDNA_ID_1620724; Annot_ID_49251
aggttgattcgtggttgtcggttttgcgccttgattgcaagtctgaaccagaagaaaggttatcaaatggatcagtcgaagctccagaataaattgaagagcggtcactgctctggatagttttcatttatatgtatataatgcttctttttagatgtagtagaattcacgtcaatgaaaggttcttttactgaactggtggttacaatatttttggtttacttcttttagctgctaaagacattggaatatattcgtttcttgaataggcaataattctagttggaaaacaaaagtgattagaaaggcaataaatcctgagcctttaagtccttgtctgatccgacccgatcaaaacatgttggtataaaatcttccaataggttcacatttttgaggtccctgtttgcacatcactcttctcagtcctcacgcatcgtatcagagaaaatgagctcccaaatctgcagatctgcttctagagcagccaggtctcttctttcttcagccaagaatgctcgtttcttctccggtacgtaaattttctctctgatcctcttttttcctgaaaatgtgataaacgtcatgggatgatacatctagatagacgtcaaatattttatgaatctacctgtggttttcttcgttttctagattctcgattgtattgaatcagtgatctgttgtatcgtttccaatctaaaatatttgatcgaagcttttacttgatcctacgtgtgttcccatcaagaaaataaattgtttgtttcttgtgagagaatacttcttgctaacacattttatgtgaaactattggatacacaaatttagactctcatattccggtttttgtctcatcgttgctttgcctacataagacttcttattgattttcccattaatataaagaggatgtttaagatctgttggttttattattcacatatgaacagaagtcacaaaccgtgtttcgtttacattttgctgatacgttgattattatatgttttcagaaggccgagccattggtgcagcaagtgtggtgcatgcgactggaaaagtccctcagtatgcatccaactttggaaaatcgggttctggcttcgtctctaatagctggatcaccggactccttgctcttcctgctgcaggttttacatgcataatgtttcctataaatctgtgatttactgttttatgaatatattctacaggacacattcaaatcttcacttttgtaacacagttagtgtaaattaagcctttcaacgttttgactccaaaatgatgtctaatatcagttatacgtgcaagacttatagctgatgagcttttttgtttatctatattcatgttttactttgatgtgatgattaacagagccttattatattcgccttgctttcttttttatcatttctgttatagccttcatgctccaagatcaggaagcacttgctgcagaggtaactgatcaccaaaccaaacacacatatctctatatctttctcttgtgttatccctggtttctctgtttaattggatttctctgttcgaatcagatggaacgcactttcatcgctatcaaacctgatggagtgcagcgaggactggtttgttacttgttattctcttgtaatttcatgtcttctttattcaaatgctcaaaactcttaaatctttaaactccctccagatatcagaaatcattacacggttcgaacgcaaaggatacaagcttgttggcattaaagtcatggttccttcaaagggtttcgcgcagaagcattaccatgatctaaaggagagacctttcttcaacggcttgtgtaacttccttagctcaggccctgttgttgccatggtaaagaagcaactctcacataaaaccgacttgttttagctctaatgatccaataagacattgtttttaggtatgggaaggtgaaggagtgattagatacggacgtaaactgattggagccactgatcctcagaaatcagaacctggaactatccgaggcgatctcgctgttgttgttggaaggtaccattctatttttatgacatatgtatatatgattgcttgtctgttttctcggagattatagttttgcttttgttttttgggaaattgcaggaacattatacatggaagcgatggaccagagacagctaaagacgagatcagcttgtggtttaagcctgaagaactcgtttcttacactagtaacgctgagaagtggatctacggccagaactgaactattccctctttctcccttattttcaaccgttagatcagacataaataattacttcttttgttttttcttttacccaaacactgaaaacgtaccgggaataacaaatttactgcatttgttatcaagtttgttctaatagacccaatgaaattaggccacgtgtgcgatcatgtaaccggtttaccgtaatgtggacttgaaatccgattagcaagcgtaatgttgttttaatttctcgttggaatccgccgactccattataaaatctcagagaactagttcagctgcgagttgactcgttcatcggcttcttcagaacgatactttagcttcgacctctctctccgatcatcttcttcgtcgctttccctaatcgttttctcttgcaaggttcttacttcataattcgtaagagtttcctcctttcttgacgagtcctgatataggttttgattcgtgttcaattgaattgttagggtttagtgcttctcagggattcggggaacatatacttaattgttttcatttcatgcttggattaaatttctttatcttccctggattcgattcttcctttatcttctatcttttgactctcttgactaatttctcactattgtaacggagttttgtttgatttgtgtcaaatttttaaagaacagtgtataatttcttacatatcgtataaaagtttgtgtttttttcggtaaaagaatttgctttgtttgtgcagatg

SEQ ID NO: 20295 - DNA, 3003 bp, Unknown; identical to SEQ ID NO: 20294
  misc_feature (1)..( 3003): 2750-1469P.txt file - cDNA_ID_1825234; gDNA_ID_1620724; Annot_ID_165898

SEQ ID NO: 20296 - DNA, 3003 bp, Unknown; identical to SEQ ID NO: 20294
  misc_feature (1)..( 3003): 2750-1469P.txt file - cDNA_ID_1825234; gDNA_ID_2926184; Annot_ID_140702

SEQ ID NO: 20297 - DNA, 3003 bp, Unknown; identical to SEQ ID NO: 20294
  misc_feature (1)..( 3003): 2750-1469P.txt file - cDNA_ID_1825234; gDNA_ID_2926184; Annot_ID_200485

SEQ ID NO: 20298 - DNA, 3000 bp, Unknown; identical to SEQ ID NO: 4708
  misc_feature (1)..( 3000): 2750-1469P.txt file - cDNA_ID_1825242; gDNA_ID_1620724; Annot_ID_49245

SEQ ID NO: 20299 - DNA, 3000 bp, Unknown; identical to SEQ ID NO: 4708
  misc_feature (1)..( 3000): 2750-1469P.txt file - cDNA_ID_1825242; gDNA_ID_2926184; Annot_ID_140696

SEQ ID NO: 20300 - DNA, 3003 bp, Unknown
  misc_feature (1)..( 3003): 2750-1469P.txt file - cDNA_ID_1825262; gDNA_ID_2926151; Annot_ID_198058
ttgtccactttatgaaattatagtccactaactcacatgggcatggtctcatcatgcacttctagtctctctattctctaatttagattactaactctaaatccaacctaccaattcctcctaataatagtgacaaaaaatgttcctctttaagagaataaactttaaactgattgatattagagatcccttgatattatccatattaattgtcttaaattcgatgttcatcttgattaattctatgtatgaactactcatatatataccaaatgttaactgcatgatttataccattgttaactttttctatcttataactgaaattaaatatttgatattaaagaataaagaaatggggttcatgcattacaaaagaattagaatcttatcggtaaattaaatatagaattcttaggagctttatcaaaaactaccaaataaaatgtgcctaaacattcactgccaataactttttgacatggagattttgactagtccaagcaaaactcattcatatatgagaccttttctcgatgctacataagttaataaatattaaaagaatctcagtttcaaagttgtatttttggctaaaaccattattttgtagtcttcgaggtcttgtcgtccttcatttgcacgcctcgtttttattatcgttcgtatttcgtatctatcatgtatgcattaggatcttatgtttgtatgagtattaaattctgaaataagtttttgattgtgtccgtgacatttcaattaagcataaacccttattactagccaaattggaagttggttggaaattagaaaattaattttctgataagagtaatgtaaactgaaaaatacttttgagcattttcctcctactttttatgaaaaatgtataaaagtattccgtgtattatcattttttctctaaagaactcccaaatattggttaatgtatagtgtgatcattagagtttgaacaccttgttggagagtgatctaaactgatctaccaagatcgaacaaaacaaccttagatcatattaaactgattgagactaaccaaaattacaaacttatactgcaaagccatagtaaaaaatcttagataattgtgaatatatattatttatattattatagtttaggaatttagctttatagtatgtatattatttattctgtagtgatcttgaacttcaatttattttcatctttgtataataacagttaatactaattattttgtaacatacacaccttttttgttttgtttttattctcatcaaatttattgtttttttttttttttacagcaaatttatttgttttgttcaacatagcaggatagagaaacactgacccactaaaatacatcacctatgatttctgattactactataattctgatccaagaaaaaagcaattactctaaattcatatatatatatatatatatatatatatatatatatatttttttatcaatagagttgaaaacttttaaaaatagcttctgctagttttagcaaaaaggtgaaaaccagagtaaaagcattcttccaaataaaatagggtaaaagtattactctaaattacactttttctaatcacaaatatattaaaaattgaattttgtagattattattataaaaataattaataattattctcacacatttttattaaactctcatcatattaattaatttggtttaacatatcataaaaagagacaaactacgatttctaaccactataagattacttatccccaacataacagttcttgaagactacattctctagccacccaacttctatagattatcacaattttaactattacaggctctcttttcattttgcaatttcctaagaaacgttctatattgtgtaaacacgtgacaacaccaatgagctaaatcacaatttacaaaagaactaattcttttttcaaagaaaacaataaaaatcatgttgggaactttggattcttggtacaacgaggcattaaagtctgtggctctctccttcttgaaaatatttacaatgtcatcttggaccgtcaaaatcttcatttactatattacattaatggtggtatatatttaataatcccatgtaacatctgtgcaagtgcacttgcttattaatatagaacataaccagaaagctgcaacaattctgatgcacccttgtttgttatataatcatcatcacaaatatttttagtctattcttagttcagttatttttgttttatcataagcatcattttcatcaacagctgttatattttctactctgttcagtggagatagtgaaactgttgcttttttttggacgtttgcgaaactgttttaaatgtaaaataatcaagcacgagagagattatccctccttaattttcttgattaaacttaagctaatcgacaaagaaaaataaaataaacctttaagacgatattccttattttagcacataatttatctaagttataatttcaaaacaaaattcaaattacagtatttagtctctacgaaaattaaaactaggaaaattaagaaagttacaataagtttttttccaagtataaatatattttatgagagatgaggtttattcttttatcaaaaaaaaaatgagaggatgagaattatttatgtaatttatagttttttttttgttatacgagcttaccgtatatgtatttacaaaaggattgtaaaacacaatcgttttttaatttactaatatcagctagttaacatattgttaattactattatttgtttgtttaagttatataaatttttatttaccaaattaactcatttatttatgatgtttgtcgtgtatactatatatatacacattcatgctatcttccttcgtctcgtggtatagttacttacatgagcatcaacttcacttatagctaacttttttcttctctttctttctctctggctcgtcgcttttagaaaacgttaattcaatatg

SEQ ID NO: 20301 - DNA, 3003 bp, Unknown; identical to SEQ ID NO: 20300
  misc_feature (1)..( 3003): 2750-1469P.txt file - cDNA_ID_1825262; gDNA_ID_1620725; Annot_ID_49272

SEQ ID NO: 20302 - DNA, 3003 bp, Unknown; identical to SEQ ID NO: 20300
  misc_feature (1)..( 3003): 2750-1469P.txt file - cDNA_ID_1825262; gDNA_ID_1620725; Annot_ID_165940

SEQ ID NO: 20303 - DNA, 3003 bp, Unknown; identical to SEQ ID NO: 20300
  misc_feature (1)..( 3003): 2750-1469P.txt file - cDNA_ID_1825262; gDNA_ID_2926151; Annot_ID_139295

SEQ ID NO: 20304 - DNA, 3000 bp, Unknown; identical to SEQ ID NO: 4731
  misc_feature (1)..( 3000): 2750-1469P.txt file - cDNA_ID_1825277; gDNA_ID_2926149; Annot_ID_139239

SEQ ID NO: 20305 - DNA, 3000 bp, Unknown; identical to SEQ ID NO: 4731
  misc_feature (1)..( 3000): 2750-1469P.txt file - cDNA_ID_1825277; gDNA_ID_1620725; Annot_ID_49266

SEQ ID NO: 20306 - DNA, 3000 bp, Unknown
  misc_feature (1)..( 3000): 2750-1469P.txt file - cDNA_ID_1825281; gDNA_ID_2926149; Annot_ID_139238
gtgaggcatagaggtgtcttacgcgaatccatgagagagtctggagatatgctcggaagcgtttagtattgttgctcgaaggaaatgagggtcccaacgactcgtgaggagcggggtatgctcctaaggtaccggtaactcgagggacatggtgtctttagagtacgaggggtacggtggcttcgggtgacgatccgagagcacgctttagggtgacgatccgagagcgagttttgtggtattattttctccaagtgtcgtaactcgatgactttgtggctgagagtgagccgacacaactcagggtttgactttgagtggggaagataatatgtgtgatatccgagataccgtaggccgaggcctgagagtgacggtttatgctcgaagattgcggtctgagagtggagagtaagttgtgagcaacaatgactagtaaatcgtgagtatatcgactggatagagagacctagagggggtctggttggagggaatgcagactgtagtgatggttgcacggagttcctcggagtggaagggtgaagctagattcgaagacgaatctatgttagtgggggagaattgtaacgcccgtgaaccagaaaatcggttaggatttgtttttaaatcatccggtttaattggttgggttaattggaaaccctagagtgtgcctataaaagaaggaaactcgaaattagggctttagttagccacttttcgttttataaaggagaaaaagagagaaaaggagaatgagcagaatcgttagggtttgggagaaatcagtttcgtcatatcaaatcgtggtaaaaggtaacaaaatttggtagagttattcccaaatcctttatcgttattctccagtttacagaattgaatttggattaaaattggttgagttattcgcagtttcgtgagacacgttttctcagacgcgaattaggaccagcggagattgaaactgagatcgtggtctcgtctgttttccgatcggcacgagattttgtgggcagctttgtgacgtctgcagctaggattttaccggagcgattgaatagttaacggttagcttgtattttagggtttcgtctttgagactgtttgtttctggtgttttcctgtccagtttgcttcaaggttgcttttggttgtggacttgttgtaggacgtttctggactgtttccgacgcaaggagagtctctcctgggtttaattgctattagaatcaatttgttaaggtgagtgcgtgaccatgagcttatctaagcgattgggttgtgtgatttgttttgtgtgatgatatgtaagtgttgtgaatgtgttttgggtgaattgttcaatgactggtttgtttgtattgtattcgtgattatacctttgtatttgcttgtgtgtatagttcgtagatgggagtatcgcctcactaagtatttatgataatacttacgcatctcattgtgttgttgatgcatgtaaagataaagtgtgatcgtggaatcataacaaggaagagaggatgatctaggaactcgtttgttttatttttggtgtttttggttattggaacccggttaggattgtcagttattcttggttttgttggtcgatttatttatttattcataaaatagtatttttgacttgcagtttaattattatgttattagttggtttaattaaatatttatgagaatatttaattatatttaaaaaaaaaaaatgggtcaagttgtttcacaaacatttaaatatttctagatgtacctttgctctttttctcttttcattcattttagaaaatgatgaaattattataaaaaattcaaaaactgtattaattatttcaagttacaattctacgtattagtatacaaaaaagatcattataaaaaagttgtcagccaaaatttaatattaaacatcccgtaagtttaacgaatccaatgtatttcaagcagaagtccacatcagttgtctccgtgtaaaatggtatatgtctttgaaaagcatcacgtttgtaaatggaaacacaatgaacacgattacacgaataataagttaataacaacaaaggaaacatgatgtgtttgatgaactttgtggttgtggccatatttttgagaagaaacaaatctatttggtattttctatttaatatgtttgaaacattttatttatactgatatccgaaagcttaatataacaataataagtaatgtaattgtaaaataaaattttaattcatcactttaataaagaatatatttaattaatcatttttaatttatctatttttacattatattaactaataattaattataaaatagtaatatttatcaaaatgatcaaataaaataaaaatattaaataaatagtttagtaatagaaaattgtatttttattatgcttctgttcctttttgtttgatcttttaggaaaaatacaaatattaagaaaacgtattaaatgttgttttaaatgtattattttttgtgatttacaatttttaagaactctaaaccaataatatttaataatttgtattgaagtttacaagttatcaattataactaataattattgcattgaaaacctaaaaactcaatttttttgaaataatttgtttttcttaaaaaaaaaaaaggacaaagggagtattaggtaaaagtttgatgctaaaactatactcaaatggtgtatactgtattggcaatggttcatggttgcctggttggtagcaaaaaaacacagatataattacgttaaggctatcattaaacaaagagggtctcgcaattaaaactacactaattcattgtttacaagaaaagaaattgttacttctttggaaattggccattgttaattggaaatcgtgaatccaaccaacaagacatttctctgactctcttcttccttcttctcctccaatttagggttccttcaaattctctctgatttcgtttgaaattgggggctcctcttcgaagatg

SEQ ID NO: 20307 - DNA, 3000 bp, Unknown; identical to SEQ ID NO: 20306
  misc_feature (1)..( 3000): 2750-1469P.txt file - cDNA_ID_1825281; gDNA_ID_1620725; Annot_ID_49265

SEQ ID NO: 20308 - DNA, 3003 bp, Unknown
  misc_feature (1)..( 3003): 2750-1469P.txt file - cDNA_ID_1825293; gDNA_ID_1620726; Annot_ID_49299
gccaaaagaggagacattaatggtgaagaaagcagaagattgggttatgggtagacaagatgagatgtttatgagttgggaagtgaaaacgaagagagaggtttatgtgaaggaaatgaagtggggttgcattaatggagatgagagagagaatgtggttgaagagttggctaatggtttcttcacttcctttgtggatgaattcatctacgacttagtgttgtgataaagttagtgttttgggaggaaagttaagattttgattagattcataatgtattagatatatgctatctcaataaaactatatgtagttttgcataaggggaatgattcgtataaaaacttatgtaggtcatatgttcgttttccatttttaaaatctagaatgagagttaagagtccatagtcatttatgtgttgtttgtttttctaactagatcttaatatgaattattagttttctttatggtttatttttcgaattatctaaatcaaattcaatagccaaaatatttgaaagtcaaacgaaaactgtgtccttactcattgtatgatttaaaaaaataaactgaaaagacatttataatgtttcacaatcttataaaaccattattaactctaaacaaaatgttatgttcaaataagtgttaaactttgtataaaaaattttagtagccatttttgtaccagagatgtcaatcagctttcttacatcatagtataacttaaagacttgagatctcaatgaaatgaacacatttgaccaaagttatgtttttggaccttttcttgtttattcgagtattttcagtatctattaatatgtttttttcactattttcgaaatacatagatgcataattaattaacaaatgggtgtgctctgtataatgtaggcagtcacccataatccagcatctaaaacgtttaattaaagtttgttattttatacaggataagtgttatatcataatacaatatattttttttttgtcaaaaacataatacaatatataagatatataatctaaatatcttagattatttacggaattagtcaaatggttgatcagtagtggttgtgtttttgggaaaacatcgaatatactggattttagacccaaatatgagaaactcggtcgtgaaggaaaatcattctttatgatgcgatgccttgttgcatcttatttcttgggaagaagcatttgcgaggcccctaacatagtaaaaaatgcatctattcatatagagattatatctcaacaccaattgagggagatgatgattgtttagttgagagttaacctcttaaaagtctcgacaatattttttaaagcaaaccattcagattattttacgaatagttaataataataaaaaagtgtaaaggtatgattcaaacttctggtttagtttgatgtcgacttggttcagctggttaaattgttaaattacggtttaatgtcgcttagacattgattggagaagaatgacttcggttttggatttacaaggaatcaagagaaagactcttctggtatagagggtttgactttgacctctgcatataaatagtcttcgtcttcttcctttgttcgttgtaacagaaaattcttatttcaattcttctcccttgtaacacgtttttgagctctgggttttgagcttaagtaaacattgattcatagtggattgctggattgaatccggctccagacgtaggatcatcacaccggtgatctgaactgagtaaacaatcgtgtgttcgtttcgttctttgtttgattgcgttcttgatcgatctattgagtgttccgcgaattgaagcttgatcgagttgtgttgtgttgaatcgagttgtgttgaatcgatttttgagtcatcagattgtaacaaaaagaatagttgcaattttctaactttatatatctctatcatttcaccaattggctattttcaatttttacatcggacatacaaacctgaaacctatgtaaattggaaaaatcatttgtccggtgccctgatatatatttttcttcttaccaaaatcggatttgttagtaacaaacctgtcaatcaaagtgtttcagcttctccagcttaaacatcagaaaatgagtgtgtttttagtgtgtcagacaaatccccgtgaaccttgccttaaaaataaaataaaatcactccaaaatagaaattatttttacaaacaaaaaaatgaaaaagaatgcttattagtattttccacaattgaaatttaaaaagtatatttcccattatttttcacctaaaaaaaaagcatctaaaaagaagtattttttttgttcttctctttttaaagttcgtattttttttttaaatgtttatgaagaaagacacaaaaaaccctaaatataatttcacgcagctgcctctcttttcttcttccgatcctccttccgccgagtgaagccgcgactgtgaaatcatgagaggagtaaaacgcgccgccatctccgaatcgaatgactctcccgtgagtttttccttccgattgttttcgcagttttgttgattgaatctcgtgataaattcagtattgtatcgattctctgtttcgggggtagacgagaaaaattgacactttgggtatttcttggtggttgattgatgattggtttagctaagtttctatagattttgggtgattattgaataaagtcggcaactttataatataacaagttgtgggcattgtgcataatggtatggaactataggatttagctcaaggtatttgctttagatccattaccgagttagttgatgactggtttagctagtgtctacagaatttgagtgattatcagtaaagtcggcaaatttttaatgtaacaagttgtgggcatcgtgcattttgatatggaactataagatttagttcaaggtgtttgcttgagattcattactgagttcaattttgagcaattcgatattcaaatctgtgaggtcatattcatg

SEQ ID NO: 20309 - DNA, 3003 bp, Unknown; identical to SEQ ID NO: 20308
  misc_feature (1)..( 3003): 2750-1469P.txt file - cDNA_ID_1825293; gDNA_ID_2926153; Annot_ID_139407

SEQ ID NO: 20310 - DNA, 3003 bp, Unknown
  misc_feature (1)..( 3003): 2750-1469P.txt file - cDNA_ID_1825312; gDNA_ID_1620726; Annot_ID_49294
gatgacgttccttcgttgaagaaagcggatgttggtatcgctgttgcgaatgctactgaagctgcaagagctgcttctgatatcgttttgactgagcctggacttagtgttatcatcgacgcggttctagctagtcgagccattttgcaacaaatgaagcactacacagtgagtgagcaatgctcttattaaactatacacagcgttttgtttttcattttttctgatgttttctcatgtatcagatttatgcagtttcaataaccatccgtgttgtggtaagttaatcaatcttgaatgttttctttaatatcatcaaataatctctgtttatataatctctctttgtaccttttttacagtttgggttcatgttcatcgctttaatatggaagttcgacttttcaccattcatggttttggccattgctttgttaaacgaaggtgagtttttcttctttataaactttgtttacttgctataaaagccaaacaataaaaaaacattattaacaattactcaacagaaaccaccaaggctatcacaatggataatgtcaccaatccttctcctacaccagatagcttgaaactcaaagagatcttcgcaaccggcgttgtttatggcagttacatggctttaataactgttgtgttcttttgggctgcatacagaaccgatatcttcccggtatgtataaacaaatctctcttcaaatctcccataacaacacaagcatactataaagttataacctcttgttttgttttttatatagagaacgttccacgtgagagacttgagaggcaatgaagcagagatgatgtgtgctttatacttacaagtgagtattatgagccaagctcttttcttcgttattcaatcaagaagctggttttttgtcgaacgacctggagagttattgtttctctctttcgtgacagtacaaactgtaagtatatagaaaaacatgattctgtttcttcttttttatttttcattataaagaagtcttcattgactcataaacttgaccttgtagattgcaacaacactcgcggtatacgcaagttgggaaactgcgagaatcgagggaataggatggagttgggctggagttatttggctctacaacatcatcttcttttttccattagacataatgaaattcggaatccgttacatactaaccggaaaagctcagagtctctttgacaacatggtacacttagttttgaacagttatgcaaaactcagcaatggaatatacaaccatactcaagctgaccatacttactcactcttggaagtgtcaactcctccatcccaggacttgagaggcgttgggtgggtttaatatcataccgtggtctagtttgttttgttttagttctttttatttgtttttggtgtaattttttttacttttttttttaattgaaattttagttaaatagaaattagcataatttttctactactccgtcttcaattttaattttcttcaactcttttttttttctttttaagtgtttccttaagttatatcactaaattgaaaacaatatatatagtatacttaaaacagcatctccagtgataacacaaggaagaaccaaatttggtgttttggtatctcaaatctcacactaaaactgaatttattattattttattattaaatctaaaattattttatattttgataaacattatttatttatttttttaaccctcaaaaatcatttattgattatgaatattttatctattttgtaacccacaaaaacaataattattttataactaatataatattataatcggtaattaaaaataataataaacaaattattttagacatgaaaaattgaaccctgcaaactacatgattaaataggtagaccagtattttcctattttgatttatgaatcaattaaaacttacaattacatactagtgtataacaataaacctcaaaaacttgtgatgaatgatgtaggaaataatagtactcttttgaatatcaacttaaatgtattttagcaatttgactaacaaacaattgttcttcacttttaataatcatccaatagaaccatagagaaacttcaagactttccacaaaaattcatcatcatcacataaccaagaaaacaaacgaggaaaaaagcccaaaaaataagagaaaagaccttaaaacgacgagtttcaccgatccaatcttccattgcaattttcacataacaaatctttttctttccccttgctcactccaagtctccaagcccccaaattttttcacaatcaatcatttctttgttgcgaaccaaacttgtgatatggcgacaccgaatcaggaagcaatcgacactttcatcagcatcaccggcgcttctgacgccgtcgcccttcagaaactcgaggtgattcgaatttcttgattcatgtccttgttcgcgattccttatgattcagatgtttgatttcgaagtttgtttagaatcggtaaagtgaaactgaaagttcgatgagacgacgatcgtttgattattctgatgctttttcccttactcgttttgatatttgatgttttggggttgaaattgaagttgattttcagaattttaggttataggatggtctgattgagtttctagaaggatttttgttcttacattgcttttttcgctcaaacgatatctcctgaattctcgcgtttattacttgttcattgatgattgtatgattgtctccaatgttgacagagtttttaattcgaatttgagagctgattttgattactgcaggagcatcgtggtgatcttaatcaagcagtgaatgcatatttcagcgaaggagatcgaaatgtgtatgacatctctatctcactgatgattattttattatccttctctcttgcaaatttatcaatttttttacgttgttatgctctttgtgtagagtacgtgaagcgccggttaatgatgatgatgaaatg

SEQ ID NO: 20311 - DNA, 3003 bp, Unknown; identical to SEQ ID NO: 20310
  misc_feature (1)..( 3003): 2750-1469P.txt file - cDNA_ID_1825312; gDNA_ID_2926153; Annot_ID_139402

SEQ ID NO: 20312 - DNA, 3000 bp, Unknown; identical to SEQ ID NO: 4743
  misc_feature (1)..( 3000): 2750-1469P.txt file - cDNA_ID_1825324; gDNA_ID_1620726; Annot_ID_49291

SEQ ID NO: 20313 - DNA, 3000 bp, Unknown; identical to SEQ ID NO: 4743
  misc_feature (1)..( 3000): 2750-1469P.txt file - cDNA_ID_1825324; gDNA_ID_2926153; Annot_ID_139399

SEQ ID NO: 20314 - DNA, 3000 bp, Unknown; identical to SEQ ID NO: 4742
  misc_feature (1)..( 3000): 2750-1469P.txt file - cDNA_ID_1825339; gDNA_ID_1620726; Annot_ID_49287

SEQ ID NO: 20315 - DNA, 3000 bp, Unknown; identical to SEQ ID NO: 4742
  misc_feature (1)..( 3000): 2750-1469P.txt file - cDNA_ID_1825339; gDNA_ID_2926153; Annot_ID_139395

SEQ ID NO: 20316 - DNA, 3003 bp, Unknown
  misc_feature (1)..( 3003): 2750-1469P.txt file - cDNA_ID_1825346; gDNA_ID_1620726; Annot_ID_49284
aaacctctgatcttgattcacatgtataaggagaaagatgggaaagcttttaattcatttttgcctccgtttccaacattcaagctttgaacttctcacttttttactagagagagatagtgatggcacgatgaacgagggttgaaatggaaatcgcagattatgagatttattttctatacatcttgattcatataataaacacagtactagttgataccatgctatttgtagatttctagataattattgtttttagtaaaattgactaatggtaaaaccgataataaatagtgtattttgtgtgtgaatgatctaagcaaaaccactaaccggatataataacataaaatttgttaactaacacgtccaaaatctatgttccttcaaaaaaaacatactagataaataaaaatatacaatttggctcgaggtctcagtcaaaatcaatagtttagttatcaaccctatagtcctgaatccataaatgttggataacaagtttgcaatgttatataataaaaaaaaagattgcaatggtaagaattaacatcataagaattttattggagattagttagctgtttagttcatatataaaatgctttttagtgaagaaatagtcaactatcatatgaagatttaagatttaatcagtgatcattatacaattctatttctaacttgatttagattctctgccgatcttatctcatctccacttgttctctttctcaccttgttttctaatttctagtcttctagagaagtcaacgtaaacaaaaaatgtacatggactaaaggaatgtgatagttttatttatttagataagcaatgcacgacgtttattgtgcaataaaacagcgtggtgttctttttttctagctccgtgctgtcttctcgaatctgcaattccctgtaaacagagcaaactgaaatccccaaatcaaaaccctaaaccctaatctctaatttgagaaattaggttagttcacctttttgtcgattcctcttgcggagagatgcaatcgattcgtggcagtacacggttgcttcagaggcatcgtttctccatctccaacactcttcgtttcacttcttcttcttcttgtggaagctggtctgaaaatgaatccagaaaactagggtttgattcttgcccttctagcagagctgcgacatatctcattagctcgttgaaaaatgcaggcttttcctcttcagctatacctgtaagccactttcgttctctatcttggtttaacattgtcgaaatgtagaagaggtttggttggtaatggagatcttatatcaaatgggtttgaaaattgcaattagtgtagaaaaacgcaaactttgctcttgtgtggtagtaagagttatgtagatatagaagaaccagctttgacacaagttttatgatttcacaagttgttctactttatatgtttgggtcacagtgatatctatctagtatgttaatgtacattaggtttctacgtgtttacgatgttcttggaaatattttggcagaaacaaaactttacgtatgcgtcgaggtgtttttccaccactggagattcttctgttcaaggatctcctgagtcagattgtgttgtgcctcagagaatcaagtttaagcggcttgataaaaccgctaagcatataatgcaggtactacaactcaattactagacaactgtcatggataaatcatgtcatatgacacaatcttctgcagattgtagacaaggaagcggttgaggaagtgagatctcttagagagattcctgagataaagcccggttacattgtgcagctaaaagtggtaatttcttttttcttggtgaatgggattgaactatctttgtctttaaagtgaaaccttttcataggcttgccatttacttttgtttttaacaggaagtgcctgagaacaagagacgtgtatcaatcgtgaaaggcgtcgtcatagcaaggcgtaatgctggtctgaactcaacatttagaattagaaggcttgttgctggagtgggcgttgaatccatgttccccttgtaagtaacttgaagctcaaactgcaactacttattctttttttctttctctcagaatttgtatatgatatgataactcaagccaccatgttttgtgtgccttaaattgatgtgagtgagggtgtttggtgacaggtattccccaaacctgagggagattaaggtggtggacaagaagaaagtaagaagagccaagctatattacctcagggacaaggtgaatgctcttaagaagcattaacaacctcagtaaaaaaaacaatctactcgtgtcttaaacaattttccaatgttttagttgcactctctcaaaaggagacgatttgcctcaaatttcacgtattgaatttgtgcaatggtgaatcttcttcaattctcttctctcccttgttggaaaaagcacatgggctaaagacatgttatagttttatatatggagacaagtaatccacgacgtttcttgtataataaaacagcgtgacgttcttttttttagctccataacacaacgctgtctttgagtaaatgtatctgtcctctcgaattctgcaatttcctgaaactgggcaaattgaaattcccaatcctaaaccctaagctcaaatttgagaaattaggtttgttttcatcctttctttgtctcagtcacttagtttttgggttttagtagactcctttgtattttttaacccaaaaattgcaatgtcaaaagtttcagtcttttgcaacttctgctgtgttcttttgtgatttgagacagaagagaaacttaatttgtctttaaagctaacatttttaggtagcaaaaattagtatattgagcataaagttaacaaatttgaagttatttaagatgattgaggatatggttttctattctgataagtaggaagttgatgaagtgataatgaagcttctttgaaatgtttttactttttagaaatg

SEQ ID NO: 20317 - DNA, 3003 bp, Unknown; identical to SEQ ID NO: 20316
  misc_feature (1)..( 3003): 2750-1469P.txt file - cDNA_ID_1825346; gDNA_ID_2926153; Annot_ID_139392

SEQ ID NO: 20318 - DNA, 3000 bp, Unknown; identical to SEQ ID NO: 8914
  misc_feature (1)..( 3000): 2750-1469P.txt file - cDNA_ID_1825365; gDNA_ID_1971923; Annot_ID_58564

SEQ ID NO: 20319 - DNA, 3003 bp, Unknown
  misc_feature (1)..( 3003): 2750-1469P.txt file - cDNA_ID_1825387; gDNA_ID_1971923; Annot_ID_58553
tctatcatgaacttttaaattatgactttaatcaaatatatatttaaaaaaaaaagtatcatgcaatttgtgaaatttgacaggtgagatttggcggatggagcacgtttttatttagtccatgctatatatacaaaaataaactacccttggttggcagagacatggcaaaaataatccacatgcatgattggttaacttttttcccatcactaagataaaattacatacatttatataaaattcgaaataaagaaagcaaaaaaaaaactgatgatataataagcttttattcatcaaagtgggtatggtgataggactacactctctgggttgtgttttggtattactgtgtaagacttcctagattcatgaaaaagtatcgaaagttagaatcgaattaatccaaaaggaattattgtggaattaactaaagcaatccatacaaatcacaacaaaagctcgtcaagtatatataatcagaatagtcaataatttagctttgaatgccgaacttgactaaaactcagacatgttatagtaccaaaatatttgtaatttagggaatatcattgctaatacaatataaaaaagatcatagctagattcaaaatgttgaacatgacctacgacattgttgaattcattgatctggtcttgctaaaaactttaaaattgatgagttcaacatcttcaaatgcatgataacgggtccaacggaaattgacttttttttcatgctcctgatatataataatatctaacgattacgggttccactaattgtcattactcattaacattcctatttaaaagttgtgatagttttagggttttacgtagtcgtgtcatatagcgattaactacgtacttgtagatttatcaattacttctgttgtttacgagaacctaaaaaaaagaagcagatgcctagtttatagagcacgtgtactgtcttgaaaacttaggtaggttggtaaggttaccaaaagaccttaaaggaatataaagttactaattaacttaagtaaagttggtattgcttatatattgcaaagtattacaaaccaatcccctctgtatattgttttaaaccatagatttttttacaattaagtttatgatcaatcaattatttcaccatttctattaaattatgtaaaaagaaaaggatatatatatatatatataattaaataagaataaatcaaaataccgaaattttttattatccattctttgtggacatcgcccctaatatataaaaaaaaaaaactttcgtataactgatttatatttttttgtaaaaacttaaaggaagcctaagaaatatcttgtgatatttttgacaaaatgtggtatatatctttttataatatcatttataaagaaaatattgattacatggtgaaaaacattttgctagcgatcaacaaaattaaataggcacatgttaactgatctcatacgaccttgaaattttaatctttgtgtcgagagaccgatctttatgcaaattatgaaactacacatggtttatgcacggaagatcacattgcatgtataccatattataaaccaaaaatgatcaagaagaaggcgaaaacatttgggtaaattttaaatttcgatcatgcgattttttagctcatcatcaacagacaagaaactatcttttgtactgtaaatactaaatacaaaataaaatcttcatcattttttgcatgtgtcaaataaattacgcgaactttttttttttatcgactattaatagagaaacctgttttatttgccttgatttggaaaaatggagaaattgacttaagacttagtctcggtcacatcggcaacaacggagcttaaacggcgtccgcaacatggaaactcaagccacgaatctgatatattgactatagaagtagtaagtaactttgactcgtcccacatcagtttcaatttccacgagggtatttggcaggtgaactctctacgtacccaaaacataatggctattttatttcataactgatatttagcaattaattattcgtcctttttaaaccaatttctatagttgggaaaataatcaatttttacactttcaatgtatacgttacagatttttttttattagtcatgcacatattttcaatttttacactttcaatgtaaacaatcgattcttaattgttaaaaataggtttacgtaaggaattaaagatttgtttaaaatatgttccggccggtctaataatttacttgacgttaatttcttaaacacttttagataggaggctttgtttatcccaaatgattttgtaccactgcgacaatactagctagacataaaatgttaataaatttttattaagtaatataatcgaagtattagatcaatgtagtagacagttaggttaactaaaacaagagtaaacacttttttttttcttttcaggataggtaaaacaaatttcacactattttgcgtatttccttaaatttgttgttcgttttctcagcaaagatgaatattttgtttcatagtaattcacaagtataaactcgccagaactcctcaaacagtgaaatataatatagcttttaactgtttttcggctggaccgggtttttaagtgcatatataacacgaggaattttggcaggtcaccaacaaaacttttaaaaatattaaaaattcccatcaagaatagaaattaataaacaatgatatctctaataatatagatattttgaaacgttaggaataatcgtaataatgttcaacgttggtggtggtactcaagatggaccctccctcccacattttcctcactccttcgtaagtcctttccacgcataagggtattatagtcatttcacataaactaacgactactagacttgtatataaataggaaggtgaagctctctctttatccatgcagagacaacagaaaccacaacaaaaactttgagtcctcttcttctctatacacaaacatg

SEQ ID NO: 20320 - DNA, 3003 bp, Unknown; identical to SEQ ID NO: 20319
  misc_feature (1)..( 3003): 2750-1469P.txt file - cDNA_ID_1825387; gDNA_ID_1971923; Annot_ID_177204

SEQ ID NO: 20321 - DNA, 3003 bp, Unknown; identical to SEQ ID NO: 20319
  misc_feature (1)..( 3003): 2750-1469P.txt file - cDNA_ID_1825387; gDNA_ID_2926219; Annot_ID_142365

SEQ ID NO: 20322 - DNA, 3003 bp, Unknown; identical to SEQ ID NO: 20319
  misc_feature (1)..( 3003): 2750-1469P.txt file - cDNA_ID_1825387; gDNA_ID_2926219; Annot_ID_203214

SEQ ID NO: 20323 - DNA, 3000 bp, Unknown; identical to SEQ ID NO: 8911
  misc_feature (1)..( 3000): 2750-1469P.txt file - cDNA_ID_1825394; gDNA_ID_1971923; Annot_ID_58549

SEQ ID NO: 20324 - DNA, 3000 bp, Unknown; identical to SEQ ID NO: 8911
  misc_feature (1)..( 3000): 2750-1469P.txt file - cDNA_ID_1825394; gDNA_ID_1971923; Annot_ID_177200

SEQ ID NO: 20325 - DNA, 3000 bp, Unknown; identical to SEQ ID NO: 8911
  misc_feature (1)..( 3000): 2750-1469P.txt file - cDNA_ID_1825394; gDNA_ID_2926219; Annot_ID_142361

SEQ ID NO: 20326 - DNA, 3000 bp, Unknown; identical to SEQ ID NO: 8911
  misc_feature (1)..( 3000): 2750-1469P.txt file - cDNA_ID_1825394; gDNA_ID_2926219; Annot_ID_203210

SEQ ID NO: 20327 - DNA, 3000 bp, Unknown
  misc_feature (1)..( 3000): 2750-1469P.txt file - cDNA_ID_1825398; gDNA_ID_1971923; Annot_ID_58548
ttacatgaacttgatattattgtgtacatagttaaatatcttcgagatactaaatgtgcttgatgaagtgcctagtatatcatatcttgtcatcatcatttagataattgtatgctagtcattctgtggaaaaaaaagagagggtgtaatcataagtctgatcatagttattcattctgtagataagttcccagaagaagaaaacaggtgttattgcgcctaagcgatttgtacagaggttgaagaaacaaaatgagctgtttcggagttatatgcaccaggtgatctttgcaaatctccccatcttttcgggagctattttacagaagatgcgagataagcaattaacatttgattgattttacgtttcttatctcatgtaggatgcacatgaattcctgaattatttgctgaatgaagttgttgacatactggagaaagaggcaaaagctacaaaaactgaacatgaaacctcgtcatcatcatctcccgagaagatagcaaatggactgaaagttcctcaggcaaatggtgttgtgcacaaggagcctattgttacatgggtgcacaatatttttcaggtcagttgtttctaatgaaaaggttcacttctccttataaggtgcgactatgttgtgctatttttggcttattttaaattcggggtatgtacacagggcatacttaccaacgagacaaggtgtctgcgatgtgaaacagtgacagcaagagacgaaacattcctagacctaagccttgatatcgaacagaacagttcgataactagctgtttgaaaaacttcagctccacagagacgcttcacgctgaagacaaattcttttgtgacaaatgctgcaggtaaaatgttggttcaaatatcaattcctcacctttcctttatagtagctgaaactgaaaactggtctttaagctccctcttaatccttcaataagcgctccacagtgttagactttgttaggcgccatgggagtgaagcctgattattgaatgtttatatttgcagcttacaagaagcacaaaagcggatgaagatcaagaagccaccacacatcctagtgattcatctaaaacgattcaaatacatcgaacagctaggccgctacaagaagctctcctatagagttgtcttccctttggagctaaaactgagcaacacagtggaaccatacgcagacgtggagtactctctgtttgcagtggtggttcatgtgggaagtggacccaaccatggtcattacgtaagccttgtgaaaagccataaccattggctcttctttgatgatgagaatgttgagatgattgaagaatcagctgttcaaacattctttggatcgtctcaggagtattcgagcaatactgaccatggttacatcctgttctatgagagccttggaccgaccaagtgaaagctgagaaagcagaaagaaggactttcttcgttttttttctcttaactattattagtaatggtatatgtttgtcttaaaagtcaaactcaattgacagtaacttttttttttttttggtttttgttctttctctgtgtctctctcccaaagatatttggtgagttttaaaattggaagttttaactggaatttgtatactttgaaaaaggccatgtacagtttatggcaaataactccttgtctttgtatctttagcaaaggaagaaggttacaatatgttgaattactttggctacaattgtgttgttgaattagttgtttagtgttaatgtcgtcttatcacaacaaaagagagtcagagtacgaaattgttgttgactaatttctttatcagcccaattgttcttaatgggccgtatcagtcagtatgatggaataaatataaagtctgatacgacccattaagaaaaattgggctgataaagaaattaggcccagcgataatcacgtagtggtggtgagaataaagttaaaaaagaaagaaacaaagagacaaaactcaaaaggaaagatcacgggagaagttgacgaagaagatacagacagaggcccgtgagctctgtatgtgcctttttctcatacataaatgttttgattttgtgatttttacagattcaagagttattaagattagctgagtagtactacttcaaaaactatgccatatttctttttatatatatatatattttatttagttaagaaagagtgagtcaataaacaataaaaagctggcaatggcacgggagaattaaatgcatatgacatttacacaatttagcaaaaaagaaaaaaggaagtgcatgggtggattttatatggtctgttgattcttgtatataccatttatcatattgtttcctccaaaaataaaataaaaaatgatgtgtttttgtgcattacaaaaaggtagtagacagctcataaatagtaaattgtaattatgactgatagtatagtagtatcaaacagcagaaatctacagacatgcatttatttgtcagtaaatgtcattatgttgatgatgatcccatatgtagtaataattaaaaaattatgaaatccctaactaatcaagtttaattagtaacatgatcgaggagataatagaaaaagtaaaagggtagattggtaatttaagggaggacgaagaatgaggatttgtcgttatcccgtgaattgatgtcgcaatcagatgaaggagaagccatcacaggagaagagagcgtcttcctcatctctctctctctctctctctctctctctctctctctctctctctctctctctctctctctctctctctctctctttttacttcttcttcttcactttctctctgaatctgccgtcacgcggaagcttccgattcaaaacactctctacatgcattgttgttgtacaactacaacactatacgacgagtcttcaagcttccgcgtcttcttcctcttttgagaatcgcttcttctttcctccatcgttggttcacgattctctctgcaatg

SEQ ID NO: 20328 - DNA, 3000 bp, Unknown; identical to SEQ ID NO: 20327
  misc_feature (1)..( 3000): 2750-1469P.txt file - cDNA_ID_1825398; gDNA_ID_2926219; Annot_ID_142360

SEQ ID NO: 20329 - DNA, 3003 bp, Unknown
  misc_feature (1)..( 3003): 2750-1469P.txt file - cDNA_ID_1825410; gDNA_ID_1971923; Annot_ID_58543
tctcaatcctatgcctctcatcgctcgtcaccggaatcgaaccactcaagtttctctacgcaacatcgagctcaacatacgtttgcttgcagatcctgcaaaccctaggctacgtcttctacctcttgcttcttctcatgtacctcgttctcgtcttctccacggattgtggtttgggccttaaggtattgggcttggcgcagacctttgtgggctttgctgtaggtctgcattattacgtggcggtgtttcatagggtggtgcttcgtcagcctccgaagacgaactggaagatacacggtgtgtatgccacgtgtttccttttgatttgtctgttatctaatgctgagaggaggaagaaagagtacttggaagaaggcggtgacgaagggaagaaaaattgaaattttctttattttattcttctctatctttgtatttttatattttaaattttgaaaaattcggcaaaattttagctgagaaatgcaatagaaagaacaattactggtggatggttggaaactttttttaaaaacttcaattgtatttataataaatcgataaatgtggaataaaatttcataatctcattataattgtctcttttttttctttgtaaaaattacaaatatgttgtgaaatgtggacggcgagaagaatgaattaattaaatgtttttcttgataaccgcgaaaattaaatgtttctgtttgaaataaaaaaaatatgagaagtcaaaaattaaataaggtggggtctacggaatcgtagagtcgacgactttcgtgaggatggggcatttcggtcattgaaggagttaccgacggaactgggtgctgtagtgttttattgacttgtgtcggtggattggcgattgagtgtggggcgtatggtgagaaaaatggggcttttgtgtcctaacgtgttgttgtatgggccactcatttctcaaggcccatcacctcacctcatattgtgccggaatgttgttttaactttatgacgtgacgtgtgtattatgaaactgaaaatagagttcctccaactttgaatctattttacaattttattattattttttttttttgtcaaatcatagaaattacatgcacaactatcacgacgatagaaatttataagcacaattagccaaataaaaaaatcgaggaaaaagtttctaaatgtaggcaatgcccaaatgtcataaatagcctacttattttgtcaatcttgtcacttagaaactcggcacttgtataaaaacgtttcattcaacttttggtatcacatgtacattattcaattgtgaattcctaaatttattgtgtgctgtgataattcaccagatcaaccagtttaaagacccgtgaacaaaaatgcccataacatttttttgtattgggtttcaatcaagttaaggcccattttggtttagtatacggattgtgttgggcgaaaggagtgatgtaatatgtacttatcagaaacaaagtaggaagacatcacagtatcacaacattgatttgtgtgcttcaatcatgcggtgtacaatttgcacttttcccacttcacaaaattcacaccttaaatatcaatttgtgaaaagtattgacttttaactttaccaaattaaactcttttagtgaacaatctttaacaaccattttatttcacatatctgatgactcaataattcgtgcaaatttcaaatgtccttgtatattatcgtgtttgaatttcaactttttttccaaacatgaaataacaatccatgattttattgctaatatgtctatcatatatttaagtttacagaccaatcacaatttcctcaattagaaaaaacaaacttaccaatggaaggatagcagtgtatgtccataggactcgacacttctatacatagtactatttgtattcaaattatacataaaggaaataaatctgtctatacatggttttagtaccaagttttttaataagaaaaaagaaacaattgatagtttgatacattaccaactaggctaagatattttatttatttttacagtacagcgttaacattttttttaacgagaatgaaacggtggctagagttacctgagtaaaaaatctaaaaaataaggtaaaaatatctgatagcattcgtaacgaaatcaattagtactagacaagaagatggtataaaaatagaagaaaagtaaaaaatggcacgagtgaatatgttcgcacgtgtaaaataagcgtcatcatcttctcctcttcccaagtttcggctctcactttctctcgttctctctctctctctctatctctatctctcgatttgggggagttccgtcacggtggactagtacgtctcgttgccgttggtggcgtagtcggaattaatttcctcggcgttgagattcacatggtctagaattctagctaagtggttgttgttgttgttacgatttccgatttctcgagttttttttttatatttagcttctgtttcgtttatccctcccggagacactccttggtcgaatctctcatgctgaggtaattcgtcatggatttgtttaattgcataagcttttttgcaattgtctaagcttttatcggtttgttttgttttttgatttacgaatctagattttgcgctttcttatgtatgtaatcaggatcaaatttgctgggttgttaaacaatttttgtctgtgttaggattctaattacgcgtgttactatacatgaatcattttcattgtttttcttcttgatccaaaagtgtgagaatcttactttaggcgtaattcacattttttgcattaatttcaacggttacacgttttttttctttgctttagatttgttataatttggttgttctaatattcataaccttggagttttggtattacttcaggtgttttggacacttgttgtcaagaagaaaccagttttggttctgattaatcgttggttggaaaatatactcaattccaggccatg

SEQ ID NO: 20330 - DNA, 3003 bp, Unknown; identical to SEQ ID NO: 20329
  misc_feature (1)..( 3003): 2750-1469P.txt file - cDNA_ID_1825410; gDNA_ID_2926219; Annot_ID_142355

SEQ ID NO: 20331 - DNA, 3000 bp, Unknown; identical to SEQ ID NO: 4754
  misc_feature (1)..( 3000): 2750-1469P.txt file - cDNA_ID_1825465; gDNA_ID_1620728; Annot_ID_49342

SEQ ID NO: 20332 - DNA, 3000 bp, Unknown; identical to SEQ ID NO: 4754
  misc_feature (1)..( 3000): 2750-1469P.txt file - cDNA_ID_1825465; gDNA_ID_2926173; Annot_ID_140224

SEQ ID NO: 20333 - DNA, 3000 bp, Unknown
  misc_feature (1)..( 3000): 2750-1469P.txt file - cDNA_ID_1825469; gDNA_ID_1620728; Annot_ID_49341
aaaataaataaatttgtcagtccgcatgttaccatatgaaagcagtaattaattcgcattagaaatgtactattatattattattgaaattaaccaaatcgtaagcttgtttatttatttattttccaaaaaatgatagaatggggaggcttaagcaatgttggtcaagtctgctagtattggcagtgttggtgatcggaactggagccgttcccatcacttatctccaaagcgccgtcgctaaaggagccggtaatatgcaacaacggtttacataatacttatattcatatttacacaatttatcggataattcaataagtttttgagaacatatatatatatatatatatatatatatgtttattatgtagtgtgtttggatgggagtgcaccagcttaccattttgacaaagggtttggttcgggtgttaacaattggatcgtccacatggaggtaaagaaacttgttttttgttgcaaatttctggaccacttgatatatttttttgtcgttgaaatgactgtacatataaatcgagttcttttttttttttttttaatatatataaatcgtagttctttatagttgtgtgattagttaaaacttaaaaacattgcggcgtttatcgttagcatcttatgttttttttttaataattattttactgaaaagaaatgtaacataaaaataaggtagaattagttgaataaaatttgaatgaagtgtatatgttgtttatatgttagggaggaggatggtgtaccgacgttgcttcatgtaatgaacgtaagggtacaatgaagggttcttccaaattcatgaacaaagactttggattttccggtatcttgggtggcaagcaaagcactaacccaggtatattactgtttttttttttgtttctaatgatccagaggtttgtgggagagttatgatcaattaatgctgttgaatctatcttgattttcataaaaaaaaaatgattttcttttgctcagatttctacaattggaacagaatcaaagtacgatattgtgacggatcatcctttaccggcaatgtagaagccgttaatccggtaatttagtgactaaattgtgatatttcataaatattatttttagtcaaaacattcacatttttcttgaagtactataaattcttgcagtcaaaattgtatgatttatatatagtcggaaccttgaataatttcaggcaaacaagctgttcttccgcggtgcccgagtttggcgtgcggtggttgatgatcttatggctaaaggaatgaaaaacgctcaaaacgtatattatatgtgcatatttcgacatctctctttctttaatgtgtatcacttaaaaaaaattaacatcttataaaacttttcaggctatactctccggttgttcagctggagcattggctgcgattcttcattgtgacactttccgtgccatacttccccgaacagctagcgtcaaatgtgtttctgatgccggttactttatccacgggtacgtgtacatactcttaggcgttggccaaaaaagtatatggaaccaaaccgaaagtctaaactaaattactaaacccaacctaaactgataacaaccaaaataaacaaaccggttttatttgatgtcaacagtgattattatcactgaattcgattttatgaaacagtaaagatatcacaggaggatcatacattcaatcatattacagcaaagtcgtcgcactccacgtattactctttatctaatatatctctcaattgctaattctcttcaaccatgaggtgaatcctaaagtcagtgttgcttaatatctttttgtagggatctgcaaagagtcttcctgtttcttgtacctcaaaaatgaaaccagaactcgtacgtgcttaactaaacataccaacatcgttgatcttgacacttttttccatctatatatggaccgatatcaaagacttctccgatcgttttttgcagtgtttcttcccgcaatacgtcgttccttccatgcgaacaccgctctttgtcatcaatgccgcttttgattcttggcaggtcatatactaaccatgatatacttatatacataaacattcatttcattataaaatatacacaaatcggatacatataaactgaatttggtgattttttcagatcaagaacgttttggctccaactgctgttgataagggaaaagagtggaagaattgtaagcttgatcttaagaaatgtagtgccgctcagctcaaaaccgtccaaggtaattccataattgttccggtttatattggtttggttttgaatacgatcagttcggtttatcgagatttaaatttaaaccgggttggttaaaacatttcagggtttagagatcagatgatgcgagcattgtcaccggttcacagtacaccgtctagaggattgttcttagactcgtgtcacgctcattgccaaggaggaagcgccgcctcttggtccggtgacaaaggtccccaagtcgccaatacggtaaaattcaatcctccaatacttttaaaatcttttcaattcgattttagttctgattttgattatttgtttttgcagagaattgcgaaagcagtcggaaactggttttatggccggagtgcatttcagaagatagattgtccgtcgccgacttgtaatcctacttgtcctgctatctctactgaagactagaatcatctctaaatgttcaattttttttaatttgaaattgaaagagctcgcaaacattttggatttgttttccaaatcggatcaataataatcactgcaatttgaataaagagtatatctttactttgtattataatcgagtttacctataaagtttttaactttttatacgaatccagagagaaagagagagactgtgtactactcggtgctctgcttctctcattttgtagtgaagtgaagaaccctaaaaatcattgctttattaaaaagcatcgatg

SEQ ID NO: 20334 - DNA, 3000 bp, Unknown; identical to SEQ ID NO: 20333
  misc_feature (1)..( 3000): 2750-1469P.txt file - cDNA_ID_1825469; gDNA_ID_2926173; Annot_ID_140223

SEQ ID NO: 20335 - DNA, 3000 bp, Unknown; identical to SEQ ID NO: 4757
  misc_feature (1)..( 3000): 2750-1469P.txt file - cDNA_ID_1825476; gDNA_ID_1620728; Annot_ID_49339

SEQ ID NO: 20336 - DNA, 3000 bp, Unknown; identical to SEQ ID NO: 4757
  misc_feature (1)..( 3000): 2750-1469P.txt file - cDNA_ID_1825476; gDNA_ID_2926173; Annot_ID_140221

SEQ ID NO: 20337 - DNA, 3000 bp, Unknown; identical to SEQ ID NO: 4756
  misc_feature (1)..( 3000): 2750-1469P.txt file - cDNA_ID_1825480; gDNA_ID_1620728; Annot_ID_49338

SEQ ID NO: 20338 - DNA, 3000 bp, Unknown; identical to SEQ ID NO: 4756
  misc_feature (1)..( 3000): 2750-1469P.txt file - cDNA_ID_1825480; gDNA_ID_1620728; Annot_ID_165998

SEQ ID NO: 20339 - DNA, 3000 bp, Unknown; identical to SEQ ID NO: 4756
  misc_feature (1)..( 3000): 2750-1469P.txt file - cDNA_ID_1825480; gDNA_ID_2926173; Annot_ID_140220

SEQ ID NO: 20340 - DNA, 3000 bp, Unknown; identical to SEQ ID NO: 4756
  misc_feature (1)..( 3000): 2750-1469P.txt file - cDNA_ID_1825480; gDNA_ID_2926173; Annot_ID_199669

SEQ ID NO: 20341 - DNA, 3000 bp, Unknown
  misc_feature (1)..( 3000): 2750-1469P.txt file - cDNA_ID_1825482; gDNA_ID_2926148; Annot_ID_139189
acagtcttctattagtattacttttccatttagtggcgatggaatagctagctgctcatcgaaccctaaggctaaatcgaggagattcaaagaacgatccatggagaaatttggacggagaagaagaaaaaacgaagcttgagagtacaaaggagaggagattttaggtttttgcgaaaagaagactttaacaaaaaagaccttaagtttgatcgaatctatttttttaacccggaagaatactttttcttattttttgttaaattattgtcatatttgtatgaactacatttggactaagaattgaagtatggttcacgtttactttcttgttaaaatttgtttattctttaagaatttaaatgatatattttgtaagaaaattatttgaaacatgaaaaatatttaaaatattttaaagttgacattatttaatatgtatttgagtatcacttattttacccattttatactaacgatttgcttaaatgttactcgaagcggactaaaccattagcagattacaccatccaaattttggggtagacaacaatccgttgtaacctaagtttatttctagaaaatgggtatgtagttttagcggggttttttctataatttttggtttacactattatatgataatttattcataataaataataaacatttcaatctacagaaagatttattcgcctcaaccgctcgaatctatattcttctaaacatctccaatgtccatctctattttttttctccatttagaggtgattctatgttagatacattttgcttcaatatatgtctctaaaatagatttttctctaaaataaaggaatcttacgttttaatctatataaagagtaaaatctatttattttctctattttggagaaaaaaactattttagaagaatacattggagcaaaatctaatttcctctaaaataaatttgtctctaaaatgaaagaaaaaaatagaggtgtgcattggagatggttttagaccgtctactctattttaactgatacatcccctatatattaattgagaagtattttaaataaaaaaccttacattcacgtgtgatttacaagactatcatgctgacatgtcgtaaccagaaaaactttcaacaaacttaatagttatccaatatttactagactaattacatataatgccattagtggtacttatgcatatttttcctctacatttaagagagtagcaattaataaagaaaattaatcaaaaaaccatatatatttgagcaaacaagtaaaaagtatatatcataaattatgatgaacaacatataatataaatgtttattatatgtttcgtactttatttttttaggttttatagaaaacatttagaattttaacatatatgacattctatttttttgttataaattgcaaaaaatctaaatgtatatgtgagcccatatgattcttgaatatattcggaacatagttttacataaattagttagtaacatttcatttattacacattcactatgaacaatatttcaatattaatctatgttaaaaatgtatccgcttactgattactttcaatattatttcttttcaaatttttaccttatcaatttattaaaacttttacacagtttattcaatttaattagtcatttactcattttagttaaaatttatttacaacccaaaaccttatcgtaacaatataaattgattaataaaataagggatatgcaataaatcaatcctaactacatagaattatgaagaataataaaagataatcaaaaatttattacgtttaaaacataattattcatactcttttcagtttttatattgaattgtttccaaaataaaatcttataaaatacaaaaaatattcgaatatatttctgaattataggaatgatatttcagattttcttttgggtcaatattttaatttaaaatcttattccaaatatagaatatcctaattcctaactaataaaatctccaaaatatatcagttactaaatcatattcaaatattcacacttatatatcaagtgataatataaaatctgtttccaaaaacttgtttatatatttcatataactatttctccctgtacatagttcgggtaaatcatctagtatttgattaattcatttgatctgcaccatacgattcgtcgtgaaccctaattaaatcattgtgaaaaaccaaaaaaatgaaagaacaaaaggaataaataccatacttctctcaatctaccaacctttaatgtcaaaagatctagttgagtactgagaatgttacgtgaccaattagatacctctacataactacttcctcaaagtggataagaaccattcttttcgaaacaaactaaactattagagactaaaccatttaattttggagcggacaataatccgttataaactaaatttatttctatataaaatcggtctaaagtttttaccgattttttttttctatatttttggtcagtactattataaatactaatctataaataataaataagaaaatatttcaatctaccgatggatttatttgcaaaacccacctcaaccgtttgaatcttgattatatatatttttcttacatcgtctactctattttaaccgatacatatttgtttaattcatttgatccgcaccatacgatttattgccgaatcctaattaaatcgttttaaaaaataaaataaaaatgaaagaacaaaatgaataaatactatagttctctgaatctactaaactttaatgccaaaaaatttagttgaggactgagattgacacgcaaccaattagatacctccacgtaattactttctcaaagtggataagaaccattcttttccatcatcaaccgctctaatttgttgcgatccttttccaatatttggggttttatccattagggtttctgattattgcaatcccaatctgaaatcttcgaattcgatcatcaatg

SEQ ID NO: 20342 - DNA, 3000 bp, Unknown; identical to SEQ ID NO: 3853
  misc_feature (1)..( 3000): 2750-1469P.txt file - cDNA_ID_1825482; gDNA_ID_1620729; Annot_ID_49368

SEQ ID NO: 20343 - DNA, 3000 bp, Unknown
  misc_feature (1)..( 3000): 2750-1469P.txt file - cDNA_ID_1825485; gDNA_ID_2926148; Annot_ID_139188
ttagttgaggactgagattgacacgcaaccaattagatacctccacgtaattactttctcaaagtggataagaaccattcttttccatcatcaaccgctctaatttgttgcgatccttttccaatatttggggttttatccattagggtttctgattattgcaatcccaatctgaaatcttcgaattcgatcatcaatggatgattgggagcttcttcatcatggctctgatacagaatcaactgattcaatcacatcggagacgaaattagagagttcaagcgtaatcgatgacggtatgattctttctgatcatttctctgctactgatcgggtgattgaatcgggttattttgattcttttcgggttgattacgggtcggagtgtctgaatccgggtgaggttagtgttgattctggtttggatcagttcagtgttagtcaatcgggtgatgattgtgtcagaaatgaatttggggtttatgattcagaaactggaattttgggtgatggtgaggttaggcttagtgattttgaagctgccaatgagaaatatgttgagagcgaagctgctactgaattaactggtggaaccgtatctcactatgaaacagagaatctcgaagaattcgttgatggaaggcacggtgagaacgaatcgggtgttgaagaacctattgaggattcgagcaagttgtgttctgatttagggggaaatgaattggtttctcgagattctggggttgtgaatggtgaaaaagaagttgtttctgatagtgtagttgcttctagtgaagtaattgagggaagtggaggagatactgtggaagttggaggcgtgagttctggtggtgagggtaaaagtagagagactgtgtggtggaagatgccatttgtgcttcttaagtactctgtgtttaggattggtccggtttggtctgtctctatggctgctgctgtgatgggtttggttctcttgggacgtagattgtataatatgaagaagaaagctcaaaggttccatcttaaagttacgattgacgataaggtacactatattatcattgacccttgtgttttcattttgcttgaagttggtaagctggtctagattgatacgttttaggagttagctacactctatgttgtgttgatgcaattggtctgacttgagccgtagaatttcaagtttagtttagttcttgtcttgtcctgccttatattaaggtgggggtattggacgcatgaatttgatagacttcaatagaatcttaaattctagtgttattcaattagacatttcacaaattcttttaaattcttgtgttatttaacttgctcatttcttaattctattagttgcaagtgttattcagttttcggtagttttgtttgacaacgttacttcacaagaatttaatagaaaaattggtctaaaatgtgaagaacaaattctgagtttttgagttgagatttggatagaatataacacatccatcctttttttctctttcatcgatttgcttcaaccatacaaaaaaaattctcaaatctgagggagagtgtttaacacatttattagaatctgtgatttcgatccggtttattcttcggatcatcattcgttcgattatatatgaggagagtgcgttaatctatagagagcagatgagcggaggttgtgatgacgtcgttgtcgttgttgtcaaaatatggatctcttccatttcatgtaaacgtcaacgtagattgtttctgggttaagaggtttgtgaaggaaaaagtacagtttttagagattgggcatggtggctgtcccgataaagagcattgtggaacaaaagatttcagtaatttatcttcttaattctagtagaattctattaaaaatactgcaaaatatttatttgaattgagaagaaagattcgaaattcttttattatacctgaaaatctagaatttatgtccaatacccccctctaagatatagattttgtagttaatatgttcttgtaatctgtctgaattaagtacaaaaatactgaggcatcatccgctgaaaatgctgtgatttgatattttcccttagcgcacatctctttgcttggttggtatttgtttggtgttggtttacttctatcattatcacgtcttgggttgtttatgatctgtgcagaaggcgtcgcgggtgatgagtcaggctgctcgactcaatgaagtgttcacagaggtaagaagggtccctgtgatccgccctgctctaccatcgcctggcgcatggccggttttgagccttagatgagaagccgttttctacaatacctagacacagtggagaatcaatcatacaatgtccatcactttatgtaccgtaagaatacaaatacatgtgtttatgtcgtacctatgcataagtagtagtttaccatcttatgaaatcgcgtatgtgagtcgtgtcccaaccgtgggatacactgcagagtgattaccgtagcgatttatgtatgttcagagactgaaaatcccagttggtaagcctttttctatgtttgatcttaagaatttcataagctatatgtgggttttgttatggatttcattggggtttcaagcttgtaaactattatagagaggaggacatagtccaaagtcgataaaaccactacaatggaaataaagaccctacaaatttctactatgttgtcgattctacaaaatttgagtagaagctatcgtctcaacaacatcccctcgacgatcaacaaagaaaacatcattatttttgataactttaaaaaaaaaactggtagcccatttttaggcccaataaaagcccgaacattataaatagacgttaaagccttaaacgttacttctccaccaccgttcagagtcgcaacccaaactcttttcactgccggagataattctcttcttccccaaaccctacagtactcagctttccctaaattcctcgccggacgattcgtttccagatg

SEQ ID NO: 20344 - DNA, 3000 bp, Unknown; identical to SEQ ID NO: 3858
  misc_feature (1)..( 3000): 2750-1469P.txt file - cDNA_ID_1825485; gDNA_ID_1620729; Annot_ID_49367

SEQ ID NO: 20345 - DNA, 3000 bp, Unknown; identical to SEQ ID NO: 3861
  misc_feature (1)..( 3000): 2750-1469P.txt file - cDNA_ID_1825493; gDNA_ID_2926148; Annot_ID_139186

SEQ ID NO: 20346 - DNA, 3000 bp, Unknown; identical to SEQ ID NO: 3861
  misc_feature (1)..( 3000): 2750-1469P.txt file - cDNA_ID_1825493; gDNA_ID_1620729; Annot_ID_49365

SEQ ID NO: 20347 - DNA, 3000 bp, Unknown
  misc_feature (1)..( 3000): 2750-1469P.txt file - cDNA_ID_1825505; gDNA_ID_2926148; Annot_ID_139181
gcagatattggaacaggaggaggaggattcaatatttttccaccgagtaatattcccacaagtgttccacatagccctgaggccgagcttattgcagctggatggccttcttggttaacttctgttgcaggtgaagccatcaaaggttgggttccacgacgagcagagtcttttgagaagctggacaaagttagttccttatactctctttgttactatttttaatgtttcttgattgctataacgtttctattgtgttgtctcttttaacagattggacaagggacttacagtagcgtgtacagagcccgggatcttgagaccggtaaaatggtagcaatgaagaaggtcaggttcgttaatatggatccggaaagcgtgagattcatggctagagaaatcaacatcttgcggaaactagaccatccaaacgttatgaagcttgaatgtcttgtgacctctaaactctctggtagcttgtaccttgtgtttgagtacatggagcatgatctttccggtctcgctcttagacccggtgtaaaatttactgaatctcaggtacgttcaagggtttgattatagtgaaaaaggtaacagagaaatcttggactaatagggagacaaatcttgtttcttgttgcttcttgcagatcaaatgttacatgaaacaattgcttagcgggcttgagcactgccacagccgtggaatcctccaccgcgacattaagggtccaaatctcttggtaaacaatgatggagtcctcaagattggagattttggtctggcgaatatctatcatccagaacaagatcaacctttgacgagccgtgtagtaaccttgtggtacagagcccctgagcttctactgggagctacagaatatggtccagggatagatttgtggagtgttggttgcattctcacagaactgtttttagggaaaccaatcatgccgggaagaacagaggtgagttacatgtagattcatcagacaatcagttctttgaatccattaagcacaaattattgatatctttgagaatgtctcttaggtggagcaaatgcataagatcttcaagttttgtggttcaccaagtgatgattactggcaaaagacaaagctaccacttgcaacaagtttcaagccgcaacaaccttataaacgtgtccttctagagactttcaagaacttaccaccttctgctctagctcttgttgacaaacttctatccttagaaccagcgaagcgtggcacggcttcttcgacactaagtagcaaggtagctttatatttcttcaactagcagttcctgattcacctcctcaatgcaaactcaattctttcttcttcttttgttctctagttcttcactatggaaccactcccttgtaatgtatcaagtttgccaaagtatcctccaagcaaggaacttgatgcaaaggtccgtgatgaagaagcaagaaggtatgtgataaaaactccttatacaagtattattgcaccaaaatgattcatgtgaattcctaaacacaagttctatataaattcaggaaaaagtctgaaacggtgaagggtcgtggacctgaatctgtgagacgaggttcgagagacttcaagagtactgctacaacaccagagttcgttgcttcagggcagtcaaaagacacaatcaccaccaagagattcaatcctcaggaagacagtagaacaggcttgagaggcgacagagatcagaaaggcttttctcataccaattcaatgattcatccaagcataacagcaacatggagtaaaaatgagagctgtaggaacaatgtagttgagctaaaggctactcgatcaagcaatgtgcccatgactgggagatacttgtctccttcacataaagaagatgtagccgtacaaaccacaacggtaatatataaaagatattagcaatacacttttttcctattagattacatggatcctaagatgttctttttttcgtgtggtttcagacatacgtacgcaagaagaacagaatgcattgttcgggaccattgatgcctcctggtggaaacattgaggacatattgaaagaccatgagagacaaatccaagaagctgtaaggaaatcacggcttgagaaatctgctacaaggaaaaataacaaaacatgtgtaaagtgaaagaagacatggatgaaaccttgctaacatcgaaacaagaaaaaagattacctgaactggaagaacgaagatcgaagatggtatcatcggctctgctattcgattctgcggtgaaatagacattagtcttacacaatgttaagcaagccaaagccacagttatgttcgtggtagtaagatctgttagtactatgtggttcttgtacatggaaatttcagttttctctgtctgaccagcattacatgtggtttgaggaaggaaacaagtgtgcatatttagcaatcgtgtttagttgtgcaacttaatatgtagctagaagattctacagtcattaacctctatacaaacaagccaactaaataagctaacagtgacacacctaagtgatcaatcaaaagcaacatgtcttgtacataataaaacccatcaaaggtttttaacccttaaggctgcaatgtcgtcaatattcttcactacctctataaccgaagaaggcgacccaaaacaagaaatttcacacgaagagccaacagaaccatcgaaaactaaagttcaaactcgaatggggactgaagaaagtgaaactattgtgagagagaagaagaaggacatatttacgtgttttgcccttctttataacggactttatttgtatcttgtcgaatatctgagggtaaatatgtcattgacatcgagaactcgtcgactgtgttgtttcgagtcaagccaagcgccaaacttttggaactttggtgaatcgattgttctcctttcttcgatatcgaattagggtttctgtagaatccagtttttgataggaacaatg

SEQ ID NO: 20348 - DNA, 3000 bp, Unknown; identical to SEQ ID NO: 20347
  misc_feature (1)..( 3000): 2750-1469P.txt file - cDNA_ID_1825505; gDNA_ID_1620729; Annot_ID_49360

SEQ ID NO: 20349 - DNA, 3003 bp, Unknown
  misc_feature (1)..( 3003): 2750-1469P.txt file - cDNA_ID_1825516; gDNA_ID_2926148; Annot_ID_139178
attaaatagaagatttaaatctatatacacatttttgcagctattttaacaaataaatcctggatttggacttatttataattcactgccattagcattaaatctttctccaaaataattaattttactttaaattcttgatttaaattgttaaccacattatcaatcaaatttaatccaaacaaacttcaaatcaatcccttaaaattagcataaacatatttgttaacaatattttaaaacaaagtttttgtttaaatttaaataaataaatcatgtatttgaacttatttacaatgtcatgacactgacattaattatttaggaatgaaaatatttaatcttctaaatccttgcttttagaattattatgtcattacttaaaaggctcaaaatataaaaactttaaatattattatttatatatctaaactttataaaacattattaatatttaaacttataaaaagtttaatatatcatgattttttaacattattatataatatataaagtttaaaaaaatcttaattctttccgtcatattttgtgactcaaaattttaaaaatgaacatatattaaccaattggcgaaaaagtgtgagttctacgtcccacatcgactaaaatatttagacaatgattcataaacatatcataaataagattaacattaataaaataatggtttttttacaggacgggtttggcgggacgggtttagcagaacgttacttaataacaaatgtaaactataaaataaaaatattttataaatagttagaatttgcaaaattttatatataataactttaaaatataaattgtctccacggtgtaccgcagattaaaatctagttttttaataattttctaaggaagtcatggacctttgtcattcgtttatttcggttaaccaaaaattcacataaaaccaaaaaaaagaaaggatttagaatctttcttaacataatatatataaactatgtacggccacggcaatgttactaattcaacgtatttagggtgtgatattggttggggttgttactgaagtttttaactataaaattggctgcaagaaatttgattattgcaacttgtttgttgttaactatgacaaaaacaatgaaacaagaaaatatgaaccagaaataaaaatttgaactttgagtaacgttaagaaatgtgagaaattttagtaaataaaaaaattgattggtaaatcttccctatataattaataaacttatatcggtctttatatcaactcttaattaaaatataatgcctcaagatgtttcctaaggctttatatactagttaatcaaccaaaaaaatgtgattttagttaggttgaatttacatatgttttcttgtaatcgatcattaaaacaaagttgctcttcttgtattatgttcagacaacttggctgtattaatgacgagttagaaaagatgtagaagttgtgctcgaacttattttggaaacacgttttcataaagttaacaccaccggtctggcctaaacatagcaacccaataatacatagaacaaatactttttctttctaaacaaaactaagaagaaaatgattcttttctcctatagttttgtgtataacaggttcatcaaattaagtcttttagcacaaaaataaaacaaaagagatcatgtaatcgaggcaaatgagcttttgtttgcgaatttaattgatagagaaatagatacttgagaaaaataaaaaagctactagagaattgttacaaccttcatgttcacgaggatcttgtttctttttgttgaaccaacacatcaaaatcactcactgtccactcagcagtttcttgtctattgctaacatatatatctgtaacaacattgatcgatgtccacattcgctttgctggtttggttcccgggtactcctgtctacaaagacagattagtttaatgctaagtccaagtcttaagatatgtgcacataatcattataacctggtagaagtagagacggcttgatagagctccattgacctcccaagttcttgaatcaccaatccaaccatttccttgcttaattctcgggataaaattggctgtttggtcctgtggtgggtttataatgttgtagagaacattatagagacaaagaagtaaactaaaattggattctacaaactttaaaagactatttataaactaagtctcagtaacttcttgtacacgcaactcgaaatggtatgaagtatgaacacaatgattctcatgcttcatgatctcgtttcgtagagaatcgcaaaataaaatgacgaaagtaacgaatgatcggcgagcaatacctgcgaggatcaggcaagagagatcggcgcaatcagcgagtctagggttttccattgaaggagcttcgttatcaacttcattacagagattccaaacttctaatacgattcttcatccctctgtctcctaacgctgagacatatctctccgccgcgcagttttgaacggaggaagaagaactctccggtaggagaagcagagcaagcaagagtgaaatcgcaggcattgaaggagcaaacttaaaagcgcgtgaagttgaaggaatggtataggcgcgtgagagtggagaaattcgcgcgtgatttattgcggtaaaaaggtaagatgtcgcattctggaaaatctgaatgattgcttttctctgcttttggaagaatctcatttactccgtttagtatttatatttacatccctacactcttcataaattacaaatagacatataaatttcacttaattacaaacataacccggtactttttcacctagagatattccaaaaagcaaaaagaaacgtcattttcagaaacagaggaccctctgtttcgttcagtgagtgtttgagctgtctctataggcaaagaaacgataattggggaccatatgttcttctttttccagatgaagacgaagccttttagtccacgaagaagacaatg

SEQ ID NO: 20350 - DNA, 3003 bp, Unknown; identical to SEQ ID NO: 20349
  misc_feature (1)..( 3003): 2750-1469P.txt file - cDNA_ID_1825516; gDNA_ID_1620729; Annot_ID_49357

SEQ ID NO: 20351 - DNA, 3003 bp, Unknown
  misc_feature (1)..( 3003): 2750-1469P.txt file - cDNA_ID_1825531; gDNA_ID_2926148; Annot_ID_139173
gtaaataagaatatgcaaatgtttaggaaaaaaactgaaagtatattatacattctgaattcaagattttctatttttaaggaatctgtgctatttcaagaaggatcttgtgaagagactgaggtttagagaagaatgggcaatgatcacttcctttgatcttaaaaactgcttcgggactattctctcgaaccagtttctcttgaacgtccggtgaaagagccaagtcatcgagcgtctggacatagaatctccgacctttcccatatctttctgcactaagtgacaacttctccatcatgggacctaatggtacaggccgcatcgagatcattgacaatgcaatgtcctgaaacaattttaagtaaagacaaattgatcacttgttgcattaggcctatccataaaaacagaacatgaactacactctagattggggctgttactgatcacttagcttgattagtgtaagagtttaccttatttggtgactgattgaagtacaagcctttcatgtgttgtttctcgaacatgaaccctgtcgcggggttgtccttgccgtttccatagatcaagaactgtgactctttcatgaaccgttctgcagaaccaagctgcaatgaagacagtttccaaagtgtgaggggaaacacataaacaaggaatattcacaagatgagaagagaactaactacagaattattcattattggtttcattgcgatgaaatgactcaacaaccaattttgtccacaatttcttaagagatgaaaatacgttcaagaagcatgtgtcaaggaaactttgctagtgttacctcatcagcgaagacatcgaagggtctttgtccatcagtaaccatagttgcacaaatgaatatagcttttgagattttctctggaaaccgctctaacgcatatgaaacacatgcccctccagtactgtgacctaccagaatcacctgccacaattcttcatctgataaatgcttcctagttcatattacaaccaatacaaggaccaccattttcatctaaatcttagcaagacattgacacttccttccaagttccaacataaacctatctatctaatggagcattttctaaccttttcttcagcaggaagattttgaatgagctcgatcaacggttttgaatattcttctaaggtggaaacactatttgcgtctgtcatattaaatccagatccagcgaggtcaaccgtaacaggagacagtccagactcctccaatgacgcaatagttttgtaccaacaccatgccccaaacccttcaccatgcaccaaaacgaatttcttaaccttcaagctctccaaaaactcaggaacctaaagagataaaaaaaaattaactagcataagtaaaactgaacataaaaagcaatgacaattatgtgtgacaggaacaatcatgaacaaattctcgagtgttcgaacaaagtcctctgctttcaataaccataaagaagcttcttttctcactctttgttctaaccacaacaagacaggcccgtagggtaataagacaataactatcatttgagaacaacactcaacaaacgataaaaagatactagcatcagtaaagtcaaaacataaattgtgtactgatctctagagacctggtttctcatagtcataggcagtctcaattacaaagaagtaatatttacacgaacaaagttcactgccttctccaacaaagaagcttcttttctccatctttgttctaatcaaaactagacagacccataaagtaatatgacaacaacactatataaacattttaaaaagcaaaacgcactacaagaccttttaagaacacttattctgttcttttggtcccaaccacttttaagaacaatatcaaatttaaaacctttataaatacttttgaattctctcctcaaagtttaaaaatccaaactttatcattactatcaaaaagcttggacctgcttgttattagaaaatgagtcagagagtgttcctcttctagagctagtagacccgattcgtctagacatggatccatcaaatctctgagaaacttgagcttgatgaatagccatagacaaagctcttcgatgcaaattctcttcatcagcaagcaacttcctctgtgaacgattcactctcttgcttctggacccatctcctccacttctgataacaacatctttcttcttcatgcagattactctgttacccattcttcacaaaaccctgaatttagcccaaagaagtggactttaatggaaactcaagaaaattctcaaaatttattaaggtccattaattgaaaaaaatcttgacttgatgatagagagaagaagaagaagaagtaaaacggtgtcattgattaggatgaataaggacgattcagatttaagacaaagcagccaaagtttgttaattgtttcgtctatttgtgtgggatatttgatttcttgtgtgtttcgacatttttgttctcattattatttctctgttccttcacaaaaattgggacatgtatttgtctgactctcagcatattcatatattttttttttcattatttcatgaaagagtctaaaagagaagaaagagtcttattagcaggcccaaagcccaggcccacttaggtagcaaacaattctcaacgaatctcagtgattgtgagtttcttctgctaccttcttcttctttctccctttctcgatttcagaattgtagattttccagaaattcttccgcagagttcttcaggcgcttttgattttacctctaattccggttcagaggcagaaaaatcgagcatttactgaatttcactggaaatagtctcatcaccacctaacaatccagagctttctagggtttatctctttttcctcggtgtgtggctgtgttttttttttcttgtttggttggcttgagataatgattgtgtttctatttcagggtcggtgacattttcttgatttttgtaaagagatg

SEQ ID NO: 20352 - DNA, 3003 bp, Unknown; identical to SEQ ID NO: 20351
  misc_feature (1)..( 3003): 2750-1469P.txt file - cDNA_ID_1825531; gDNA_ID_1620729; Annot_ID_49352

SEQ ID NO: 20353 - DNA, 3000 bp, Unknown; identical to SEQ ID NO: 4776
  misc_feature (1)..( 3000): 2750-1469P.txt file - cDNA_ID_1825553; gDNA_ID_1620730; Annot_ID_49382

SEQ ID NO: 20354 - DNA, 3000 bp, Unknown; identical to SEQ ID NO: 4776
  misc_feature (1)..( 3000): 2750-1469P.txt file - cDNA_ID_1825553; gDNA_ID_2926157; Annot_ID_139584

SEQ ID NO: 20355 - DNA, 3000 bp, Unknown; identical to SEQ ID NO: 4773
  misc_feature (1)..( 3000): 2750-1469P.txt file - cDNA_ID_1825565; gDNA_ID_1620730; Annot_ID_49378

SEQ ID NO: 20356 - DNA, 3000 bp, Unknown; identical to SEQ ID NO: 4773
  misc_feature (1)..( 3000): 2750-1469P.txt file - cDNA_ID_1825565; gDNA_ID_2926157; Annot_ID_139580

SEQ ID NO: 20357 - DNA, 3000 bp, Unknown; identical to SEQ ID NO: 8528
  misc_feature (1)..( 3000): 2750-1469P.txt file - cDNA_ID_1825591; gDNA_ID_1971815; Annot_ID_58222

SEQ ID NO: 20358 - DNA, 3000 bp, Unknown; identical to SEQ ID NO: 8528
  misc_feature (1)..( 3000): 2750-1469P.txt file - cDNA_ID_1825591; gDNA_ID_2926169; Annot_ID_140049

SEQ ID NO: 20359 - DNA, 3000 bp, Unknown; identical to SEQ ID NO: 8540
  misc_feature (1)..( 3000): 2750-1469P.txt file - cDNA_ID_1825595; gDNA_ID_1971815; Annot_ID_58221

SEQ ID NO: 20360 - DNA, 3000 bp, Unknown; identical to SEQ ID NO: 8540
  misc_feature (1)..( 3000): 2750-1469P.txt file - cDNA_ID_1825595; gDNA_ID_2926169; Annot_ID_140048

SEQ ID NO: 20361 - DNA, 3000 bp, Unknown; identical to SEQ ID NO: 8530
  misc_feature (1)..( 3000): 2750-1469P.txt file - cDNA_ID_1825605; gDNA_ID_1971815; Annot_ID_58218

SEQ ID NO: 20362 - DNA, 3000 bp, Unknown; identical to SEQ ID NO: 8530
  misc_feature (1)..( 3000): 2750-1469P.txt file - cDNA_ID_1825605; gDNA_ID_1971815; Annot_ID_175946

SEQ ID NO: 20363 - DNA, 3000 bp, Unknown; identical to SEQ ID NO: 8530
  misc_feature (1)..( 3000): 2750-1469P.txt file - cDNA_ID_1825605; gDNA_ID_2926169; Annot_ID_140045

SEQ ID NO: 20364 - DNA, 3000 bp, Unknown; identical to SEQ ID NO: 8530
  misc_feature (1)..( 3000): 2750-1469P.txt file - cDNA_ID_1825605; gDNA_ID_2926169; Annot_ID_199377

SEQ ID NO: 20365 - DNA, 3003 bp, Unknown
  misc_feature (1)..( 3003): 2750-1469P.txt file - cDNA_ID_1825608; gDNA_ID_1971815; Annot_ID_58217
tagtttttttgaaaaaacttgaataataatttggtgtagattttgcaaaaaagaaactccataggatttggtttttgttcaataattggtaaagatttgtaaaatctagatatcaacggcaataaagggtttatgtacttgaacagttggtaagtagacactagagcaaagaacagggagaaaatattggcgtgctttgcccaacgatggcctctatatcgagcgagatcacaaaggagccagcccaaaccaaacaaagagagcaaggtgagcaggtcgaatgtatcctccatatccatcttttgcggatgagcgaccaatggaacggtgatgtgattttgtcgaaaggtaggctttggagaatgggagaacaagcctagtacaaacgcgccaaaaatttcatggaccgtgcaaaaagaatctcgttccaagtagcatttgtttccattggaaccatttgaatgccgttgtgatgtacttttgagatgatccgtttcttcttcctttttaaaaaaaatgcattgagcatttgagcatcaaagacgattacttatagtataaatgatttggaacacaagagaggctatgaaaggtttttgtttcatcagcatttcaaaatattggtatcaaaccatataagaatacatgttgttgtgatacattatcgaagtactagactatgcaatgagacttggtttttcgtccttgagccaaaaataataatgactagctttataatttgacaatcacaattagttttgagatactctactggactttgtaatttgtattactacgatgatctttgtgtgtgtatacataataataatatgatcaacctttttggtttaaacatgaatccaagtttcttttttgatatctgtattggtaatattttcctgccacgtgtggaggtctcacaagagccacatggacaagacacgagaaatctgaaatctcaaaaactcaacaacacgagaacagctgttctgttgcttaggaagatctattacctctaaccacaacactacaaagagagtactagttaattagtttaatttactggatttttctaataatttctattgatattcgaatgtaaaactcgatgtaggactacaattgtccatatatgaagttgaaatacataatgtaaaatctgattatagaaaaacaaaaaattgtaggttaactatcagccacatagaagaaaaacaggatctttctttgaagttaaatttataaactaatctccccatttcaatgagctgtatatcaactcacaagtcgtaacccgtgccatcattaatattgttcacgtacattttccttttggcagaagattacggtttgagttatactatttcgtggaattacatattttaaaaaatctttctccaaaactatttattttctcttttgtttatttcgtactaaactatttcatatgatgcagaaacttaaactgatcttaccacgtaaacgtggcaagaattaatttacacaattaataacaaatatataatctatattatatttgacagtaattcgagatctttagcatttaatttagtgtttttagtttggtgttcgaagccatcaattgatttttatttacatggcggttacatatttagggggttaacgtggcttttaattcatagaatgtgattagaacacacaatttataaaaattagttgtccccgtgcaaaaaaaagaaggtatacatgtgttatgtgtcaacgttggtacgactttgaaggatctaaaaggtcaaactttagttgagagttgagacagtgataacttggttttgactttcttacatgcatcgccacaacaatacaatatttctacgaatgcataaaaaacaaattctatgctttaatttttttttttttttcttgaatgattgttaacgataaactgtaagaggataagttaaatctctttttattgttagtaaaaatagaaattcgtgtaaggacttcacatatttgatctctttttaattagcgtgacacaataactaattctcagttctcgatgtacctactaaattccttaatctaggaggacaacgtatatcggtatatgactaagatctagttcttggaactacatgtttaacaatattggtactaattgggggacacatgcatataattatacaaatttgtatatctaaggataaaaattggatctctaattttcaaactaaaagaattatggaacgtatgttagtttaatatccttttcaacagcttttgacttatttaattttttcatcttgtgaacaagagagaaaaaagtactctttaatttattattaacttcaataattgcaagtcatgtgaaacccatcaatctaatcttttctcacttgccaaaagagaatattatttctgtagctattaaaagtaattatgtaaatttatacctatcctattatagaggtaaaaaaatgtaacaccacgagaatttttatttaccagaaatgtagaatggaacctaaaataatgaacaattattaatgctataggatcgattaatcgtaagaaaaaaaaattagaaagaataacattaggcaaattttttaaaacgatcatcaaacgaaaccgtaaaatggtgaaaaaatattttacattttgtcataaaaatgacaaaacatcaaagtacacccttaaaaatccctattttgtaaagtcataggacacgtaattttttaaattactcgaacctacaagagattctcgtagttcaaccaacacaatcacacgtattaacttttttcctctagccagctacatacatagtctacgcatcgcctacgcaaaccatagatccatcactctatatatacagaaatatatacacacacacaaagagctatatatagagaatacacaacacattattctattcttgtatactctaattacacacaaaaaaaaaaggagagagagagagagagagagtaccaatttctctccctcaaaatg

SEQ ID NO: 20366 - DNA, 3003 bp, Unknown; identical to SEQ ID NO: 20365
  misc_feature (1)..( 3003): 2750-1469P.txt file - cDNA_ID_1825608; gDNA_ID_1971815; Annot_ID_175945

SEQ ID NO: 20367 - DNA, 3003 bp, Unknown; identical to SEQ ID NO: 20365
  misc_feature (1)..( 3003): 2750-1469P.txt file - cDNA_ID_1825608; gDNA_ID_2926169; Annot_ID_140044

SEQ ID NO: 20368 - DNA, 3003 bp, Unknown; identical to SEQ ID NO: 20365
  misc_feature (1)..( 3003): 2750-1469P.txt file - cDNA_ID_1825608; gDNA_ID_2926169; Annot_ID_199376

SEQ ID NO: 20369 - DNA, 3000 bp, Unknown; identical to SEQ ID NO: 8536
  misc_feature (1)..( 3000): 2750-1469P.txt file - cDNA_ID_1825612; gDNA_ID_1971815; Annot_ID_58215

SEQ ID NO: 20370 - DNA, 3000 bp, Unknown; identical to SEQ ID NO: 8536
  misc_feature (1)..( 3000): 2750-1469P.txt file - cDNA_ID_1825612; gDNA_ID_2926169; Annot_ID_140042

SEQ ID NO: 20371 - DNA, 3000 bp, Unknown; identical to SEQ ID NO: 8534
  misc_feature (1)..( 3000): 2750-1469P.txt file - cDNA_ID_1825621; gDNA_ID_1971815; Annot_ID_58211

SEQ ID NO: 20372 - DNA, 3000 bp, Unknown; identical to SEQ ID NO: 8534
  misc_feature (1)..( 3000): 2750-1469P.txt file - cDNA_ID_1825621; gDNA_ID_2926169; Annot_ID_140038

SEQ ID NO: 20373 - DNA, 3003 bp, Unknown
  misc_feature (1)..( 3003): 2750-1469P.txt file - cDNA_ID_1825625; gDNA_ID_1971815; Annot_ID_58210
cggaacatcaagtgaaatgtgaataaccgataattcaattgaaatgaaaaccgaccggtttggttccgctcatattgacttcttgatttagtactttactaataaaccaagtgagcgatttactactaatcatgttaagtacagttgtcagtaaatatctgaagattagtggactataagtctattatgagtcttaagataatatacaatttatatagagtaaaaaacttgaagattagtggactatgataacatatacattacatacatgtctatatctcgatttttgtttgttttcaactgaagagagaaataaataaagtgtttctatcgaatgtcctcgaagatgcgaagtaaatactaattctatgatgtttatcgtcgactgagtctagtcttgtttcgtttttatggttgattaatttaatacaaatttcggaaaaaattaataaagagagaacaaagaaaaaagatgataagaagcgggtccatacaccgggtcagatttggcgtgccgtgtccaaagtgcttcaattttgactaaaccattcgatttttctttttattttttagtatttttttttttttagttttatcgtcaatgaaaataactcgtgtttatatgttcttacttcttaaactttttcctcacaattttatcatgagttaaacttaacggaacatgaattactatatcgtatatgtgagcatgcgtaatgtgaattacatttgtatttatcccaaaattaggatgaattgctataatgtagtagggattaacaaaattaacaaaggaaacacaagttatcaaagtgaaaaacaaatgtggatttggtaatatcaaggtcaagtggcgtcctttttcaaagtcaatggacaataaatcgcatgtaagacttgtgtgttcctattcaaatgactgcatacgtttttcaaaattgtcacaaaacttatcaccaatacaagatttatagtatcaatagtatgtttcatcttttctatttaagaaaaaaacaaacaaattggtatcttcatccatctaccatcatgcatgacaaatgaataaaagctgttgttatcatatgacgtctatagaatgcatattatatgtctcccttttattttatttccttgtcgtcattcttttattttattatactacattatatgcatttaaacatatattaaagacacacattatatgattcataaggtagaaacaattatttatcattcatcgggccaacaaattctatatccgcatgaaacacggaagtctaaatttaacaacgcaatgagtagactcttgtataaatgaatttcaacaaataattccatgtttcacctatcagagatttagaacaaaacacaaactgttgtaagaacagaaaaaaagtgttagttaaaatttgaattcaaatgtgacattacgtttaggctttatgaaactaattgtactttcatttcagatgagacatgacagcgatattcataaaagttttgctgaattaaattatgtgtatagtatgattttatataatcaaaggacatgagtttaaaatggaatttccttttcaagtgatgcatattggaatagttagtactgactttgcaatgttaatttacctaattaattagaacaacaaccaaacgcaagcactaataaacaaaagggtgtgttatctatataataacccatcttttgacctaaatttctgcattaattttctctttaataatttaacaagtgataaacaagtacacatggattaggttattatgtccaattcatgagcttgtctccgcttattgctcgctttaaaagctataacaatggaatctaattattgatatcatccatcttcttattatatacaaatacacaccaataataatgagaacaaagtataaagtgcgattcacacttgttccaactcattcttatgcacatataatagaaataacatataaacaaacacgcacatatacactaattttccataaaacgaaatttacaagtaaaaatgaaattttctttttcaacagtcaagttatttgaaaacattacgtcattcatattatatataattttttttggtgagatatctatcattgatgttatattacaacagtttaaaactatttaaccataaaagttacatgaatacatatacacgtcttagctattctagtaattttaatattttgaacaagcaaaataagtttttttaaaaatagaggaaaaatagagagaccacctgataaaacacttataatgggattctaaaggatagagatgagatgtcaaaagactcaatactacaataatggagcaatagttttctccacttggctaatataatatctaacacaaaaaaaacttcccacaatttttttttgtttttgctaaaggtaaacacatttccatattattactaaactttattttatacataaatgcaatgtgtatttaaaccaagaataatgttgtgctctaagattatgtaacgaaaaaaaaaatctagttatatatatatatatataatgatttatttctatataatatcttataacattgcaaaatattaatttataaacatataaaatattaaatcttgataaaccggaaataaatattattttgcaagtgagattacataatttgaagatttttttgtagagtgaatatgggaaaaatatatagagattctctctattggtaattggtatattatgagaaagatattgattttttttaattttaagtttgattaaagatattgtaaacatttatataattaaaaaaaaaagagaaggaaagaggaaggaggttgggttggtcgactttgctaagataagagaagagagactgactctctctctctctaactcttcattcttctctcttttaccttctctccaagaaatcttcactttctctctagaaaaaagttggaagctgactcgataaagactctctttttcttcttcttcctgcaaatg

SEQ ID NO: 20374 - DNA, 3003 bp, Unknown; identical to SEQ ID NO: 20373
  misc_feature (1)..( 3003): 2750-1469P.txt file - cDNA_ID_1825625; gDNA_ID_2926169; Annot_ID_140037

SEQ ID NO: 20375 - DNA, 3003 bp, Unknown; identical to SEQ ID NO: 20373
  misc_feature (1)..( 3003): 2750-1469P.txt file - cDNA_ID_1825625; gDNA_ID_2926169; Annot_ID_199365

SEQ ID NO: 20376 - DNA, 3000 bp, Unknown
  misc_feature (1)..( 3000): 2750-1469P.txt file - cDNA_ID_1825641; gDNA_ID_1971815; Annot_ID_58204
taaattaagatatgttctagaacaaataatccttcaataaatacgttaattttcaaggatttacctcgaaaaaattagtaacagcatctgctttcctttttctagagctggtttcttcatttcctttttcttctcgcatttcatctacctctttagtgcagtcatagcaagaccaactatcgggaaccttatctattttttccatcatgcaataactacaataacaaaaaaatgataacagatattcatataaaaacaatgctactatctaatggcatagttaaaagttacgtatattgttgacaaaaaatattacgtatgttctgcaccaactccgcagttgcaacagatcacaagtaaatattcatatccttgatcaccacatgtatcacaaacagttatctgcaaaatcattatttgatataccatcatatatcgataacatgcataagctaatatccgctaaattaattaaaataaaatcattatatacttctcgctcaatatgagacagttcattgttatcattgagtatagcctctgcaacttctgcatttttaacactatcgccatcaccatcatgctgcacatacgatgtcatttgctcctcattctaaaaacgtaaatacgtaattaactaattatattcatttttccatggaaatcaaagatatattcttccatcatgatgaacagaaatggataatatatatctacttctgagaaagatgttctgtaatatcagattcgtttaagtcatatgtgttcttagaggaaaataatggtgtcacctctttagatacaacaatatgatcatagtcatgattgttcaaaatcatagttgatattctatattatttcttgacaaatctattagagtccaaatccctgaatctttaagaaaaaaaaaactaaaacattaatgaatctcaaacatcaatagtaatgaaccacgatttaaaacctgattcataagaagaactaactaatagaattgatgattgtgattttctaacgataaaagaacagagcaaacaaaatcaacacaattgaaggagagaaaagggaaaaaatcttcataaataaaactagagaagtgatcaatcttaataaatttatatttcactccttgatatcatcaaattttaagataaaaatgaaaaatcttggaatccttgatccaatttgatttttgattcataatcaggatacaagttataaacaaatgatcatcttgaatcataattagacttcacaaataaaatttccaaatcattcataactttgaaaaaaatataaaccatatataatatcctaaatttatagaataacaataaaattattttagccaaaataatcaaaacaaaaaccataattcttcgaaatttaatacgtttttcacttgatgcaaagaaaaatccaaatcaaagtgaagataaatagatgaattttgaaaaatacttacataaaagtccaaacaacataaaaagtgatgagcaaagagggagaagatcacaaatatttaaagaccaaatttagagccagtacatcaattcattaacttattatgttaatatatcttgtcttattttattttctttgtaactaaagcaatttaatgatgaattgtatttcgattatctattttaggaattatattcagttagtatttgctcttattatctcttgattattattttaatttaatttaattaattttagaccatatatgcttgttaacttttaaatagaaatagatttatggctctatttttgttatttttgttatgacatgtgtttgaattaagaatacatataaattgagatgacttttgtatttgcatgtgtaacctaagttatgaaaacaaaatgtaatatcgtcgtaatgtagtttttatatattgaaccgcccacaagtatattcatgatttaactcaacgatttagtcctaaaactggtgggcctactctacaaatggctacattaggatttgggaaatattatattaactcttataatcaaaaactttaggttacatatagttacatagtaaaagagtttcctattgtatacgatcaagtagtatatattgttttgtcttttaatcgtgatagagaagtacatatatgtctcgtcacaattatatgtattttttaaaaactagtcgttatatgtgttaagtatgaaatagatgacataaaatgaattagtatcctttggaatcatgaagtttctatattaagtatattgatggacgtcaacaattaccagatcctaataagtgcacatcatgtatatctaacatttcatccctatgttaagattagagatatgcacctcgtatccattgataattaatgattgtttgtgatgtcaatttttagtaaatgtgtgtacgtctattaccagatgcatgtaggtcgaattgcaacatagagtagcacatttttttcttgcattgttccttaaataaaataagcaaaatacctttgaaataaaatcattttgcaggcttaataggtggctacatgattagcagtatatgaactcgttggatgatacaatgtttatgtttttgaaataaaagcattcaaaccaatctcatacaataatagatagttccatatccagcataccatctccctgaggtgttcgtggtgctccctcccaagacacttgtttttagagtttttttttttttctctttcagaaaaccaagacatattctttatgagaatttccctagctcatacactccatcaaagtcattcttctctttcaaacatacttaagatccctctaggcacaactcttgtgtatcctttttcgtaggataaacttcacataattaacaaaacccaacattttcttgtgtaaaaaaaaatacgaagaatgttacatatgttgtaatagtaacgcctcccaaaagaaacaccttatgggaaacccacatgatacatatgttatacatgctcagtctcattcatatatgttaagatg

SEQ ID NO: 20377 - DNA, 3000 bp, Unknown; identical to SEQ ID NO: 20376
  misc_feature (1)..( 3000): 2750-1469P.txt file - cDNA_ID_1825641; gDNA_ID_2926169; Annot_ID_140031

SEQ ID NO: 20378 - DNA, 3000 bp, Unknown; identical to SEQ ID NO: 3323
  misc_feature (1)..( 3000): 2750-1469P.txt file - cDNA_ID_1825652; gDNA_ID_1620732; Annot_ID_49417

SEQ ID NO: 20379 - DNA, 3000 bp, Unknown; identical to SEQ ID NO: 3323
  misc_feature (1)..( 3000): 2750-1469P.txt file - cDNA_ID_1825652; gDNA_ID_1620640; Annot_ID_47457

SEQ ID NO: 20380 - DNA, 3000 bp, Unknown; identical to SEQ ID NO: 3323
  misc_feature (1)..( 3000): 2750-1469P.txt file - cDNA_ID_1825652; gDNA_ID_1620732; Annot_ID_166127

SEQ ID NO: 20381 - DNA, 3000 bp, Unknown; identical to SEQ ID NO: 3338
  misc_feature (1)..( 3000): 2750-1469P.txt file - cDNA_ID_1825652; gDNA_ID_1620640; Annot_ID_163008

SEQ ID NO: 20382 - DNA, 3000 bp, Unknown; identical to SEQ ID NO: 3323
  misc_feature (1)..( 3000): 2750-1469P.txt file - cDNA_ID_1825652; gDNA_ID_2926178; Annot_ID_140413

SEQ ID NO: 20383 - DNA, 3000 bp, Unknown; identical to SEQ ID NO: 3323
  misc_feature (1)..( 3000): 2750-1469P.txt file - cDNA_ID_1825652; gDNA_ID_2926178; Annot_ID_199982

SEQ ID NO: 20384 - DNA, 3000 bp, Unknown; identical to SEQ ID NO: 4786
  misc_feature (1)..( 3000): 2750-1469P.txt file - cDNA_ID_1825656; gDNA_ID_1620732; Annot_ID_49416

SEQ ID NO: 20385 - DNA, 3000 bp, Unknown; identical to SEQ ID NO: 4786
  misc_feature (1)..( 3000): 2750-1469P.txt file - cDNA_ID_1825656; gDNA_ID_1620732; Annot_ID_166125

SEQ ID NO: 20386 - DNA, 3000 bp, Unknown; identical to SEQ ID NO: 4786
  misc_feature (1)..( 3000): 2750-1469P.txt file - cDNA_ID_1825656; gDNA_ID_2926178; Annot_ID_140412

SEQ ID NO: 20387 - DNA, 3000 bp, Unknown; identical to SEQ ID NO: 4786
  misc_feature (1)..( 3000): 2750-1469P.txt file - cDNA_ID_1825656; gDNA_ID_2926178; Annot_ID_199981

SEQ ID NO: 20388 - DNA, 3003 bp, Unknown
  misc_feature (1)..( 3003): 2750-1469P.txt file - cDNA_ID_1825678; gDNA_ID_1620732; Annot_ID_49410
tgatgctatcacattttctagtttgcttccatcagtttctaagtttgaaaaccttgagtattgtaagcaaattcattgctatattatgagacatagcatatcgttggatatcttcttaactagtgctcttattgatgcctattttaagtgtaggggtgtttctatggcacaaaatattttcagtcagtgtaactcagttgatgttgtagtgttcacggcgatgatctctggttatttgcataatggcttatacattgattctctggagatgtttaggtggcttgttaaggtaaaaatcagtccaaatgagataactctggtgtctattttacctgtaattggtattttgttggcattgaaactcgggagggaacttcatggtttcatcatcaagaaaggtttcgataataggtgcaatattggatgtgctgttatcgacatgtatgctaagtgtgggagaatgaatcttgcttatgagatttttgagagactctccaagagggatattgtttcgtggaattcaatgatcacacgttgtgcccagagcgataatcctagtgcggctattgatattttccgtcaaatgggagtttcaggaatctgttatgattgtgttagtatttcagctgctctctctgcttgtgcaaacttaccttcagaaagttttggcaaagctattcacggtttcatgataaagcattcacttgcttcggatgtatatagtgaaagcacattgatagacatgtatgctaagtgtggaaacctgaaagctgccatgaatgtgtttaagacgatgaaagaaaagaacattgtttcatggaatagcatcattgctgcatgtggaaaccacgggaagctaaaagattccctctgtttatttcatgaaatggttgaaaaaagcggaatccggcctgatcaaatcacatttcttgagataatatcttcttgttgtcatgttggagatgttgatgaaggagtccgcttcttcagatccatgactgaggattatggaatccaaccgcagcaggagcattacgcttgcgttgtggatctgtttggacgagctggtcggttaacggaagcttatgaaactgttaagagcatgccgtttcctccagatgcaggagtttggggaacattacttggagcctgtcggcttcacaagaatgtcgaacttgctgaagttgcttcaagcaagttaatggatttggatccctcgaattctggttactatgtgttgatttcgaatgcgcatgctaatgccagggaatgggaaagtgtgacgaaagtacggagtttaatgaaagagagagaagttcagaaaattcctggttatagttggatagaaatcaacaaaagaactcatttgtttgtttctggcgatgtaaatcatcccgagtcttcacatatctattctttgctaaattcgcttctcggagagctgaggctagaaggatatattccacagccttaccttccattgcacccagagtcatcgagaaaagtatatccggtttcaagattcattgagaaagaaatgagagatccagacaaagtatagaaaaccaagtatatatctcttttagacaagtttaaacattgggttaaatttatagaaaggaaaaaacgggtagaaaatttttcaagcgtggcctgcgcttgtctgttctcgtgttgaagcagttgcagagatgtaataagcaacagcaaagaggccgtgaacgaaacagaggatccctcctatggacagaacccgatggtgtgatatcccacagttttttctcgatcttgagtttgccatcgtccctactatcaacatcgaaaatgcaatcgccaatatgatcctgagacaaacaaaaagggatcttaatcaaatctctcggtagatttacagttgttctgtttatgtcgtgttttgacttaccacgtgaatatcagagaagccacagcgagctgtttattggcagaggatttttcaaggtcttgtcttgaggcaacacagagacacccaccaagaaaattagccgttacatgggctaacaccaaaaggatgcacgcagctaaaccgtacttgaaggctgtgtaactcgggtctctacactcgaatatccacatcttcaaatgcttcacctgcacccgaaaataaacaaattagtgaaatctgcatctcctatcgacttgtggctgtgtaatgtaccttgttctgagctatttcggcttcaatgccgagaattccagccgaaacatccatggctaggatcaagatgcagatgaagaaccctacattcctcgccattgtcgatgaaacaagttcttactagcaaacaaagaagcaggaagtattgttgttgaagtaataacttgttcttgtaatttataggcaattagagttttaagctttgagagactctcttcgttggatggaataagaataaagttcaacataagtttccttttcttgcatttgtactaaagatcatgttaagagaataaaatttagctgggatcctctctttttcaggagaaaattttaacttttataaaatcatatttgatgtttctgaggaattgaagaagtttattagtaatgtgcaatgtcctcgaaaagatttgttttctttattcctctcttccattccatgtttaataataaaaccttttcaatattcgattcttgacagagcagccaagcaaagaagaggacgtttgcgttttgaatcgctgttgaagacaaaaatttcgttttccagtcgctctggcccaataaatttaagtgggcctttacagagacttatcctaaatcccgtctcgttgatgataatgacgtggctacgtacaaaagagtaacaaattcgagaacatgacgtggcatatttctctagaagcagctccattcttcgacttggacatttgtcttcttaaaagttttcgagaaatgttcgattcttcgagagttcgaattctcaggagaagaagaagaagaagaagtgaacagagaaaatg

SEQ ID NO: 20389 - DNA, 3003 bp, Unknown; identical to SEQ ID NO: 20388
  misc_feature (1)..( 3003): 2750-1469P.txt file - cDNA_ID_1825678; gDNA_ID_2926177; Annot_ID_140406

SEQ ID NO: 20390 - DNA, 3003 bp, Unknown
  misc_feature (1)..( 3003): 2750-1469P.txt file - cDNA_ID_1825696; gDNA_ID_1620733; Annot_ID_49436
tgatgattgagtttgttgagataagtatttatagcttaaatgtttgattgttaatattaaaaaatggatataaggctcgagggaaaaagattagatttgtacggccatgttgggagagaatacaaaggttgattagtctttacgtagaaggtcttgtttttcaaagttacgttgtaattagttgaccaaagctgtttcatcctcatccacttcttgtaactgatttacttccaaaacagaacacaaaaaaaaaaaattgtcgacatgaattacttcaagtaaattgcatcttacgtacaacttctatattaagatattggataacattttatttttcgtttgataatcttatccgaactcatttttgagattacgtgaaaaagtgataagatacgaaaattgaactctaaagttagataatacagtataaattcgtcttgaaaaaatgatgtaaaaagtaaaaacaaattagatttttttttgttgtcaacgagcaacctatcctatgaccaaaaaaaaaaaccttcaaactttatccctaatatttgacttagtgaattaatgaggaccgtataagagtatattcagagatgtaccacaaaaatttagtgtccactagctttttggtaatatataatttaataattaattataactttggaaagaaaaaaaatataaggggaaaatatcagttaactgatggaagttgatgggagtggacttaaaagttgcttagttcaaataattgtctattatgtcggccgtgcccttccaaagacttgcaacttacaacaatgattttagttgttttatattctaattaacaaaatattagttgttggaaatattagtattttttttgataaccattttggtaatttagtaactttattcactaacgttatattacgaggttgggacatgatggcatcgtcaaaagatagtgacttcgaatctcttacaagatagttaaataatatatttctgcgtggttcaacaccatggtaacaaaattgtgtatcaatacctgaatcaattttttcatggagggttacgccaaaaatagtctaattattttgtatggaaaatatgtagtactttttcacgtgataaaagaaataaaagtatgaaatggcgtctaatctatgggtaaaaattttggttaaaaaaggaataattatttttgtttctttttttgactcgaaatatatttttgattataaaagaaggaacgtgtgaagtgtcacactgtcagcttatctatttgcatgggaagggcatcgctttttgactttttcttgtcttactgattcctttttcacttatataatctctttctcttcttcctccaaattcacgtgtacaatattgtacagtatattgaaattttggtcatcgtacttagttgctctgcgtatgaacagaaccaggtcaaaactacgtattgcaaatttccaccaagaaaaaaatagaatacggtcaagtattttcatttttctcgtccattattttcatccattagatatacattcaaataccaatagcaagaattacgtacagtataactaattctatatggcattatgtcatttcttttataggcattatgtcatttcttttataggcccatattgagtaactgaaataggcctgattcacagttaaagtagtgtatcgttggggagcccgtttcccccaaagagaaaaaatcgttatataccaaacattgaactaaacaaatacgaatcgaccaggaaaaaaatgaactaaacaaataagaataagtcaataaactgttcaggacttcatgcttacaaaaggaattgagtatttttaaattctaatactagataaactatccgtgtatacatgcagattttgctcataatattttctatctcactaatagacaatcaaaatttgactaatttttatactttctttacatcttataggattagaactagatttaccgaaatttatttatcttctcatgacaagttagttgacacatggttttcttaaaatttgaaatattttttttgagaaagttcgtcttaatatatgagagatttgacacacatgaactgataaaatccaatcaatcatatttcatttgttaatggcttaataaattattacatatcaatcacttggacaatggagtatgggacatgcatgtcacgtgtttatggtataagattatgtaatgaattcgaatatgaatagtggaaaaacgataagagtttgagtaatcaattgattaataaaaacactaataattgaggcaaagttaaaaagaaggaaaggacagaacaatcatggaccacatgtagactttgctagtttagttcgtcggtctccatcgttagccattcactctccaatccaacaacaccctcgtcgagtccggtctcaatctgcctattgatgggttcagattagaccacgtgtcaacgttaatagacaaaattagttggacctgcttgcaatgagtgaacacgtgtcgaacagctgaactgcgacatatcttgtgtgctttcccatgcggagatatatatagaccccaccttcagctacagagaatgaaataagccaattatatgtttatgtaattttgtcgaatctgcaccatctctttcggatacatacaaaaataccaaaaactaaattcgggggaataaactatagtttctcatttcaaatctttttttcatgtaaactcaaagcatttgccattcatatatttcacgtatgcttggctaagcttaacgactattgtacatactaggacgtgcacaaatctctaaatggtaccatgattttagttatacttcaatactgtgaatgagggttttaaatgacaagaatatcagaagtttcacggactatatggattaatatagatttgatataaaattccttacttatcaaaattaatcatcgtgtgtctcacaaatctatattgaagctactgtagaaatgttgttagaatgcatgatg

SEQ ID NO: 20391 - DNA, 3003 bp, Unknown; identical to SEQ ID NO: 20390
  misc_feature (1)..( 3003): 2750-1469P.txt file - cDNA_ID_1825696; gDNA_ID_1620646; Annot_ID_47593

SEQ ID NO: 20392 - DNA, 3003 bp, Unknown; identical to SEQ ID NO: 20390
  misc_feature (1)..( 3003): 2750-1469P.txt file - cDNA_ID_1825696; gDNA_ID_2926179; Annot_ID_140464

SEQ ID NO: 20393 - DNA, 3000 bp, Unknown; identical to SEQ ID NO: 3426
  misc_feature (1)..( 3000): 2750-1469P.txt file - cDNA_ID_1825700; gDNA_ID_1620733; Annot_ID_49434

SEQ ID NO: 20394 - DNA, 3000 bp, Unknown; identical to SEQ ID NO: 3426
  misc_feature (1)..( 3000): 2750-1469P.txt file - cDNA_ID_1825700; gDNA_ID_1620646; Annot_ID_47591

SEQ ID NO: 20395 - DNA, 3000 bp, Unknown; identical to SEQ ID NO: 3426
  misc_feature (1)..( 3000): 2750-1469P.txt file - cDNA_ID_1825700; gDNA_ID_2926179; Annot_ID_140462

SEQ ID NO: 20396 - DNA, 3000 bp, Unknown; identical to SEQ ID NO: 4802
  misc_feature (1)..( 3000): 2750-1469P.txt file - cDNA_ID_1825704; gDNA_ID_1620733; Annot_ID_49433

SEQ ID NO: 20397 - DNA, 3000 bp, Unknown; identical to SEQ ID NO: 4802
  misc_feature (1)..( 3000): 2750-1469P.txt file - cDNA_ID_1825704; gDNA_ID_2926179; Annot_ID_140461

SEQ ID NO: 20398 - DNA, 3003 bp, Unknown
  misc_feature (1)..( 3003): 2750-1469P.txt file - cDNA_ID_1825716; gDNA_ID_1620733; Annot_ID_49429
aacaaaattaaaaaagtgactaaaatattggtcaaaattggtaaaatatcaaaatatgatcaaaaattttgcatttttttaaagatatttcatattattttatttttgtaccaatatattttttttaaacgttggttattacttatagatgatatgctacgctaattttgttttatttctgctatttgttaatattacatggaaaacaaaaaaatcttttatttacagtttgccgattctgctgactatctatctaattaaattaacttttatgtttaattaaagaaataataatgattctcttttcaaaatacaatcatttggattggatgacacacatgaaccagaaaagtaacatgctattatctcagacgaaatattattttatctgtaatgaacttaaaaaataacatgttatgtagataatatatgcaaagcaattggtcgtattatattatatgataatgcactaagtaataaaataacatgattatgggaaacgtaacaaaacataataaaagaaactttgccacttgatccttttattttagtactgcagcgttagtagcgtctttatttactaatactacaacgttagttgtcctaagtgttccaccattgtgtgaacctttttgtcgctatcttaatttctcacttttaaaaaaagaagaagatgacggtttatatataaagttttatgtttatcatataaaacaagtgtgtatagtatacatgtacatatcatataaaacaatataaattcattgacagtgtgtcttatgagagaattcggacaatgtgaactgtgaagtgtttctgtaagtcgttgcccattgccagtgtgtaataagtttttaatagttgtaatattaattgtctgccgagagcatgtgagttttcaaattttgaatgtttatttatatcatattcatcagtggttagaattcaccaccaaactaaatatttttgtagacgttaaataaaagaatcaaatcgaataagcgatcttagttgaccgtcatcaattgtcatagaataaatataaagattttaaattagtaatcagaccaggtaggcaaatttcacctcacaaaaaacgtgtgagaatcgacaaaagaaaaaaaaaaatccactacacttctacctactgttgtactcttgtttgtttccaaaacgttttaccaatttttaccaacagtaatggttaactacctaaatataattctgcagaaatgtaccctaaatattattgaaactgcactgcagtactgcaccaaacattattgttaacttaaggggcatggctttgtttcatcatccgtgttatgttttggcaatggttttcctagatggtacgaggcccgacaaaaacatcatcggcatgtgaatgaatcatcatttggtgttacaactttaattttggatcttcaatagataactttttttttctttgtaatgacattaggggtcaactttactaattgaaccatcaatacattttagtttaaaattgagtaaaactaaaaattctgatcgaggaactagaatttcaaaccgtatcataattatgctcgaagttacgaggctcccattagtaacgattttctaaagcttggtgagtggtgacgagtgatattttaaacccaaaagaaaagaaaaagccttcagttttttaatttcaagggtaaagtgatgaatgtgaggattttggttagttgagacgagtttgataaagtgctcatgcgtaagcagaatttaacttcagatccagcagccatcataggatcggatgaactagcgaaagaaaagcttcttagtgggccaagcaaaccaccagggacatgaattttttcctttcttttgcttgattataaattcgtttttaacataagagtgatagaggcattacaagttttaaaaggcttatctctttaaaagtttttcttctttaacttaacgtcttatatttaatgtccatttggatcctccctttttttttttttcttcttataacccacttgggaatattaactatttttaatggttttgtttttgtctcacatgtaaggtgagattacacgtccctcaacaatgtgtgtaaattggtgctacgaacactactgtgaacccccaaccggatgtttaactaacccaccctggaggacattgacctcaatctctataatgaagctagagctaaggttaagattgtatcacatttacgttacctgtcttcaacaaagaacctctagaaaacaatgtaaacaagtgtataaggttactggacctagcgctaaaaactgcttcgtcgattgttggtatgtatggcgaaatttgcatagtttatcggaacaagtagaatagcagcaggttatcttccacgacctaagggctctataaatgaagctttccatgtgacttcaaatgctatcttaagcacaagacgcattcgatgaccatggagaatatgttccacaacatgagagtttaagagaacatccaactggctttacaatagtatgatgcatccaaagccaaaagaatagagagatataaaaagcaagacaacccataattcgaatatttcggggtggtcttggacctcttggtgcatacccatgccaaaactctggttgacaccaggtgctttgagtcatttcttaaatcattttatttttctctgcaaactagtaacactattaactttaccagcctgagaaaaatctgccatgacgatacaaaaagtctggagactttattcaacgaccttattattaaccatcaaaagtaaacattagtctcacagaaaaaagacaaaaacacagtacgagagagagacagaagcatcacacaacacacctatattatcacgtctttttttctgtgatcatattattacagggtcggattctctggtgtgaacttgagagagatactgtttacacagtgtcgctcatcggtaggagtagggaaaccttctcctttaaaaacgtgaccaagatg

SEQ ID NO: 20399 - DNA, 3003 bp, Unknown; identical to SEQ ID NO: 20398
  misc_feature (1)..( 3003): 2750-1469P.txt file - cDNA_ID_1825716; gDNA_ID_2926179; Annot_ID_140457

SEQ ID NO: 20400 - DNA, 3003 bp, Unknown
  misc_feature (1)..( 3003): 2750-1469P.txt file - cDNA_ID_1825754; gDNA_ID_1620734; Annot_ID_49447
tcaactctctgttttgtgactgttttggccactccctttgagtgacgcccctcaaattgacgtgcaagcagattccctaaccatcgttctagaagaggaactattccgcgaaggaaaaacaaccataccctccacattggagcccaaaatccacaccctggtcctttacccacaggaccagtattgaaacggtaatagatcaagtgtttcaaatccttgcacatcctgatttgtctcataagcctgtacttataacgatacatacctgtcaattgcccaacatgggagaaaatatattgcaggccatcagccaattgaaaggcatcaacattaccaagtcggaactggacatttgcatcaactacaagttttgtcagccggaggatctcacggcagagatggaaagcatttccaaaacgcgacttctttcgttccttggttgtcagagttttcacaggcttgaggttgaagttataatcaaggtgcaggtagttcaaattcttcctgtgaatcaacaggttcagcatattatacccctgccggcagacttgcagacccacttcaacccaatccagttcggtgctctgaaaaaactttgtagctgcaagagatcgaaacaaatgcttcttcttctgagccttagggggtctatggtgcagctcattcagtagataacatttcaaaagcttctggtaactaacccgaactttgacaggatatgctggaggactgcagaaaatgagataactaagaagttaatacaatgtctagtaaatttcaaaaggggaaagagaaccacagtagcatcagaaaaattagcttaccagtgctccttaaaccactctgcaacaaggggtatatcttcagcccgccgagtcctcccagacctcatattgaaaggccgaggggcaaacaacaatgaaatgccaggagctgtagtgtcagtgtagagtggcgagttatttagcaaaggttccagtccttctggtaacacaaagtcatccccatcatcatcataaccattacttttgcgctgttctttattagtgttattagagttacttatggggtgaattaatggatcataataaaaggcaggaaggtcaggatcctcagtctttatgtacataaccataggagtgtgatagacacagagttttactttcctgggcctattattgtacagatgtgggaaagctactttgtactcagttcgcagaggggatcgaattataagcttgttgatgtcattaaattcattccagtcttcatctcctttctccatatcacgatgcaaaggctcaaacttaggaccgcctgaaaaagagtaccaaattgaatcagggaaagagaacagaaggacaacaactgtgaaaacgaagatatcagaacaggagaacatagagtatagcgttacctggtatgcacatgttcagtgcctttgcagtaaagaatgatggcatgtcaaacaagtagaagtagttgcgatcaaccaaatcagacaacaactgggctgcaagcctgtgaagggttgacataattggaagtgagagattccacgtctggtaacttggaccattgatcatttttgtttttacaagtggcttgtggtcgtaaaaccaagagtacacagcagaatcttcttcttcatctagctccaactgaattgcctctagaggatcaacgtccaacaggttatcagcatagtctagagggggctcctcatcatcaaatggtggaaaccgcattctcttgaaatgacgacgatccctcttctcccttctcatcattatccacatagaaccccactgcaaacgaaagaatcatcactagaaaacatgtctcacaaattcacaaatgcacagacacaaaagaagagagagggagattattcacccacctgagccatgtaaataggttccacaacccatcgtacttcgttcacaaatgtaatagctccagtgatgtggtacaagaccttcacgtcccggacctggaaaatatctgagttcaaaattttgagcagagcaggagaacaactaaagcgagatatagatcactaagtgaataattacctgttcccagggcataggcatattctccaggagcttgaaaactgcgtgaggaacgaacttaagtgctccaagatatacacgtttatcaagtcgatgtttctttgatgacatatcaccatgatccctgaatcaaaacgcagagtcagtttcaatctaacttaacccaaacctaataatacaaagaaattggaccagattcgtttcccagtcaactggatttcgaaatcgaaattgaaaaattagaaactcgcctgatgattttcctaacgtgctcaggtggcatgtcctccttctgagtttccacgaacccaaacttcctcttgtcgccgtaccgtttggaatttagctgcatccatgttctcgccttcttctcaagcttcgcctctgcatcctcgggagtaggaaccgtcggagtattccgattagaaggcgccgtgtaagaaggatgatcagcgggatgtgaaggtgtctgcatcctcgaaccgtcggtaccaggaggagctaaggacgtaccatcaatgttccacatagcttcagatttcaaatccaaaggcccagcaaaatcgccgaggagcaaaaccctaaaacctcagtgcgagccttgacgaacacgaaaatccctaaaatcaccgtcgtcgggtgaggttggtaagaaagacgattaaccgaacgaacatatatatacgaaggcattcatgggccttttagaaaaacaatagatacgattatgggcctaatttatggattcagtcacggctcatttagtatttaagagtaagagatgtgtggaaggggtgatttggtaatttacattcaagtcaaccaaaaccagactttttaatctctctcgatcagaagttacctttttcacttttgccgagaaaatcagagacagaagaagaagaaaagcgaaaaaaagcaaaacatg

SEQ ID NO: 20401 - DNA, 3003 bp, Unknown; identical to SEQ ID NO: 20400
  misc_feature (1)..( 3003): 2750-1469P.txt file - cDNA_ID_1825754; gDNA_ID_2926217; Annot_ID_142249

SEQ ID NO: 20402 - DNA, 3000 bp, Unknown
  misc_feature (1)..( 3000): 2750-1469P.txt file - cDNA_ID_1825758; gDNA_ID_1620734; Annot_ID_49446
atctgatgttgtgtttcatgatagaagaataccaattccggtaggttcatcttcctttctttcttttttccatctttagtgatgattccctttttgccagttcatcttgcaagttcctgagcaatgtttgtttatctctctagatgtttgatctgtatggagttggtctccgtcaggcattctcgacacccaatctcctcaaggaactcaatttgaaggtatttaatagactcaagatgctacttactcttttaactatttcaattttgacaaaattggggtggttcagattggcaggttatctactggtgactcgttggatatgtccacgcaagatgaaacattgatcattgccaatgatgctacgctaaaggacatggaggtagtgtaatgttaacaattcttattactgaatctaaccagaaaatcaatgaaactgttgttttgaaactcttttggctctggattcttcagggtgctgccgtggcgtatgtggctgatcttctgaaaataccagtcgtgttcctcaaagccgtgaccgatctagtggacggagataaacctacagcagaagagttcttgcagaacttgacagttgtgaccgctgcattagagggaactgctactaaagtgatcaacttcatcaatgggagaaacctttcggacctttaacttctgttctcttccttttttatggagagtgattttttaaaatgcgttcaacgtgcttgttgcagtttcactgatttccagtgatcatatttctcgttaataaatttcaagttataagacgttctctccctagtgttgcttaaattttggtaaagaaacaatttcaaagataacttatcgacctgaaagacgttaaatcccttgataggcaaaatatacaacactgtaaaattaattcgtaaccgagacacttggtgaaacctcaagacacataaacgatgaaatcagaggtaaagaaaaattgagctatctttcccaattagaatttccgtcaagctcatcgcaggacatcgttggggtatttctatcttttgaacttatactactccagacggtagccggagaacaagctggcctccgaaaacgctgtaaagaaaaatgttgaaacttttgagatatatacaaagagctaaatagctaaactgttgaagtgaaggactaatgcgtaccttttgacgtagtagtaacagaaatctgccaagatgaaagtttgaacaatttctgagatcagaaccattgatggccacaatccataacccaatgctacaagcaaccgtccccgcgtgtccacaacctattttcagcacattagacaatgtattcagctattcaaaatcgacttttaaggtactaatccaatcgagtataggaatcaccactattggtataacctctatccactcttgaagatcaaaactaacctgtaaaacccagtgggcacagctgaggaaccttgctactccaagtgcaaaaacataatgagccgtgaacggttcaacaatctgaaaaccaaatagacgcggattagagagtaaaacaaatgtagttctctacttgacattgtgaaataaagtagtgacctttgtgttctgcatcactcgtagctgaggtagtactgaaacagcttcaaggtatacacataaagcccatgaaattctgtttattatgttatgagaggtcgatggatggatgaacacagctaatgcaacacagggcgcaagctgcaaaaattgaaatcagatcattgtcactgtaaatgataacaaacaactcgaggatcaaaaccagattgacttaccacataatagagaggaaagttgtctttgtcctccatgtaactagctcttaacttgaaacgaatcataaatataacccagagagttgttcccaaagtagccaagtcaagaatggtatgtatatcatattccattacaatgctacaatacagcctaacagctaaaaatatcgccgtaagctcctgagatttcagtgacaatcctgcaaaatcattcacaaagttatataaacacatcgaaggtaaacactttcgatttaaaaaaagaaccatagaatgcatcttaaaccctaaattgccaattgaatccttgattataaagatgatgattctacgaattacggctaaaggctgcttccgggagcagataatagtggtaaaccaatgaaatcctgatcaaagctcgaaaatttggacgcgattatgaggaaaaacaaaaaagttgtgacgttgaaaagtaattttgctaagaacagaggaatacatacgatcagaagctgataaggcaggactgagttgaaaaaccctaaaaatggatgtgataaagacaagacacatagaatagtaccggcacaggtcttctccttcatgagtttgtagatgagcacacagatcccgatggaatgaacagcctcagcggcaacgaagagattgtcgtgatcgtgaacaatgaatctgagaagaaccaaagccgccatgccagtgaccacggcgagaaaagccttcaccttcggaggttgtctcctaacccatgaccacaccacgtggatcggagtcttcgtcgtcgccttcatgttttgctttttttcgcttttcttcttcttctgtctctgattttctcggcaaaagtgaaaaaggtaacttctgatcgagagagattaaaaagtctggttttggttgacttgaatgtaaattaccaaatcaccccttccacacatctcttactcttaaatactaaatgagccgtgactgaatccataaattaggcccataatcgtatctattgtttttctaaaaggcccatgaatgccttcgtatatatatgttcgttcggttaatcgtctttcttaccaacctcacccgacgacggtgattttagggattttcgtgttcgtcaaggctcgcactgaggttttagggttttgctcctcggcgattttgctgggcctttggatttgaaatctgaagctatg

SEQ ID NO: 20403 - DNA, 3000 bp, Unknown; identical to SEQ ID NO: 20402
  misc_feature (1)..( 3000): 2750-1469P.txt file - cDNA_ID_1825758; gDNA_ID_2926217; Annot_ID_142248

SEQ ID NO: 20404 - DNA, 3000 bp, Unknown; identical to SEQ ID NO: 4814
  misc_feature (1)..( 3000): 2750-1469P.txt file - cDNA_ID_1825762; gDNA_ID_1620734; Annot_ID_49444

SEQ ID NO: 20405 - DNA, 3000 bp, Unknown; identical to SEQ ID NO: 4814
  misc_feature (1)..( 3000): 2750-1469P.txt file - cDNA_ID_1825762; gDNA_ID_2926217; Annot_ID_142246

SEQ ID NO: 20406 - DNA, 3000 bp, Unknown; identical to SEQ ID NO: 4813
  misc_feature (1)..( 3000): 2750-1469P.txt file - cDNA_ID_1825766; gDNA_ID_1620734; Annot_ID_49443

SEQ ID NO: 20407 - skipped

SEQ ID NO: 20408 - DNA, 3000 bp, Unknown; identical to SEQ ID NO: 4835
  misc_feature (1)..( 3000): 2750-1469P.txt file - cDNA_ID_1825774; gDNA_ID_1620735; Annot_ID_49476

SEQ ID NO: 20409 - DNA, 3000 bp, Unknown; identical to SEQ ID NO: 4835
  misc_feature (1)..( 3000): 2750-1469P.txt file - cDNA_ID_1825774; gDNA_ID_1620735; Annot_ID_166244

SEQ ID NO: 20410 - DNA, 3000 bp, Unknown; identical to SEQ ID NO: 4835
  misc_feature (1)..( 3000): 2750-1469P.txt file - cDNA_ID_1825774; gDNA_ID_2926170; Annot_ID_140081

SEQ ID NO: 20411 - DNA, 3000 bp, Unknown; identical to SEQ ID NO: 4835
  misc_feature (1)..( 3000): 2750-1469P.txt file - cDNA_ID_1825774; gDNA_ID_2926170; Annot_ID_199435

SEQ ID NO: 20412 - DNA, 3003 bp, Unknown
  misc_feature (1)..( 3003): 2750-1469P.txt file - cDNA_ID_1825808; gDNA_ID_1620735; Annot_ID_49466
cttgtcagtcaaaacacatacaacaactcagagagatggcaaattaacctcacttaggaaccgtgcattagtttacatagtgcttggacttcttgtaggagcagcttgctacctatattccattggactgctttacctacctgtttctaccctttccctgatctgtgcatcacagttagccttcaccgctttcttctcttatttactcaactcacaaaaacttactcctatcattttgaattctcttttcctcctcactatatcttccaccctccttgcatttaataacgaggaatcagattccaaaaaagttacaaaaggagagtatgtcaaaggtttcgtatgcaccgttggtgcatctgctgggtttggtctactcttatccctacaacagctagcctttcgtaaagttttaaagaagcaaactttctcagaagttataaatatgataatctacatgagtctagtggccagttgtgttagcgtggtggggctttttgctagtagcgagtggaaaactttgagcagtgaaatggaaaactacaaacttgggaaggtatcctatgtcatgaacctagtgtggacagctgttacctggcaggtattctccatcggttgcacaggactgatcttcgagctttcctccctattctcaaatgcaataagcgctttgggactccccgtggttcctatcctggctgtcatcattttccatgacaaaatgaacggcttaaaggtgatttctatgattctagctatttggggtttcgtatcctatgtctaccaacaatatcttgatgaaacaaacttgaagaaaagtaatgaaataccaacaacagaatcccctgaccgaccagaagcagaagggtcaagtgagcaatcaaaataagctgttacttcaaagattgtggcacacacagtttacagactaaagcgagctgatcaagtaaacttacttttctttattggtatgaaggcagcctacaatgaaaaataaacataatagatttgtgatgcgactcaagtgaagtcacagcctgaaaatgtgtgcatcattgtaacatgaagtatattttatttaaatatatgttgtgcacgattctggtttagtttggaataagatgaccaaaatcacattataagctcactgaaatagcattaagtcattaacaaagtcaaaacagctgattacaaaaattcattgtttaaaactcaatcctgcatataaagagaaggtgtacactatgtagctttctaagtttttgtaatatatctaggtgtaagtagagttccaatcagcttacatcaggcacccaacatagtgagcccgaggatacttcttatgcagttgtggccattgaacaaagaattgatcagctattctcaacttgtaaagcaacaatccacttaatgagagctttttcactcttgctacactctcaacataaaagattgatgaccatctaattcccagcacctgtaacccaagatgaaacaagcacttatgggaattctagatgtaatggagaaaccatgactaagaataaacaaaacacatcctctgtttttggtcacaagtccattcaaggtcatccaaaatgtagaggaaagaactgcaaagaatcttgataaaatatttccgaagtgtgtataccttgaataaaaaggcgatcacacacagaggaatacaggtcccaggaccattgcaaagaatctgaaaaacttcaaccaaatctaatcaataacctgattcaaatggtttaataaagaacccttgaagaaagtctaaaaagcattcagataaaaatcataccacttgtggtctgatccggatcattagccacagagcgtgaagaatagcaacaatggtagtccaaacagaagtcacataagactgaccaacttcacgactccggtaaatttgcatgaactgtgatgatgcttccttaacagcaggctatgccacagtcataccaagcaaaaaacacacaagaaataagtaataagcaatagcaaaattcaaagaggagggacaaaactcaaacgaaattgaatttaaggatttttaactaaaccttctcagctagagaatcttcaaaactacgagctttctggagactcatgttatctgtagcagcagcaatgtaaaaccttggtgtaaatctatccttccgcaaaacagagaggagactcaacatctctgctgtgtgtccccctggtgattaacaaaaaccccacaataacatatcataatatgcagcacattacttagatccaattgaagaagacactgcattaactcttcttaccagaaccaagaacaataagagtagtaaaagactgtgaagctccttttggaagtggtttgccacatcggtatataacatacagtacacgaaccattagaagaacgatcgccaaaataatcaataaaccaatgctgaattttgaggccatccttgagtaaacacagttgcaaccttcctccatgatcgtacttccttttgagatctaaaacgtcaaaatccaagcgtaatggagaaacaactcaaaatcagatcacaaacaaaacgaatcgtcaaaatcgagctcgaaattagacaaaaaaacgaaattgaagattcaacacggcgattataaggtgggaagaaacaaaataaaaaactcaccggcgacggagaatcccggcggtgacgggaacgtaaaggattagagaattgaattttattggttacggtgtgtcttctttttaccaccgttcgatttggatattgcttagaatacacgtggcgtaaccacgtgacttttatctttgggtggacctgcaaacatgtaattccttcccaattttttattttaaaatcttaaaaagatactaagaactgatgaagaagatattgtacaccagtcggtacttagaaaaaaaaaaatgagattttttcacaaaacctccattgaagcaacttttgtagctttcttcgtttaggtatctaattaaacatg

SEQ ID NO: 20413 - DNA, 3003 bp, Unknown; identical to SEQ ID NO: 20412
  misc_feature (1)..( 3003): 2750-1469P.txt file - cDNA_ID_1825808; gDNA_ID_1620735; Annot_ID_166232

SEQ ID NO: 20414 - DNA, 3003 bp, Unknown; identical to SEQ ID NO: 20412
  misc_feature (1)..( 3003): 2750-1469P.txt file - cDNA_ID_1825808; gDNA_ID_2926170; Annot_ID_140071

SEQ ID NO: 20415 - DNA, 3003 bp, Unknown; identical to SEQ ID NO: 20412
  misc_feature (1)..( 3003): 2750-1469P.txt file - cDNA_ID_1825808; gDNA_ID_2926170; Annot_ID_199422

SEQ ID NO: 20416 - DNA, 3003 bp, Unknown
  misc_feature (1)..( 3003): 2750-1469P.txt file - cDNA_ID_1825816; gDNA_ID_1620735; Annot_ID_49464
tcatacatatgcgtatgcgtgttaagtttctatttgtctatgcgtatggggttcatgtcctccacatagttgcagaagaaagtctgaatgaatattgcctacacataatttcctcctagacttaactcatctcttggtcaacaatagaggcatctttgcatgtagaaagactacagatactaaattcatggaaagagaagagatatggttggcatttactgaatgtggggccaagaacaaagaaaacttagacggtgaccgattcctaatcccagaatatataacttagcatatctcacccatatcaaaggagcaatcacttggtagcattatcaaccaagagaattgataataagatacgttagttcctccttgtccatctccaaggtggtgattccacatccaccatgacggcggatcaagaactacaaatcattggtgagtaagcataaaccagtttgtggtgaacgtcctattctttcatcttcaaaaaaaaaaaagatggttatgatattttataattcaatatatgaaacgatcgacaacaaataaactaatttttgcgttattttcactcacttaccagttcggcagggaaaagaaccaaatccaacagttcaagatgaaagaaattcagtcagtagcagccaagcagaagtatctcactctaacacatacaaacggtggctcagggtgactttatatacattctttgtcatttcaggccaaacagttgctacaattttgggcagagtatactatgacaacggaggaaacagtaaatggctagcaacggtagttcaacttgttggctttcctgtgctacttccatattatatcttgtcatttaaaacacatgcaacaactgatagagatggaaaaagaacctcacctaggaaccgtgtattggtttacgtagtgcttggacttcttgtaggagcagattgctatctgtactccattggacttctttacttacccgtttctacctattccctgatctgtgcatctcagttagccttcaatgctttcttctcttattttcttaactcacaaaaacttacccctatcattttaaattctcttttcctcctaactatatcttccaccctacttgcattcaataatgaggagacagactccacaaaagttacaaaaggagagtatgtcaaaggtttcatatgcaccgttgctgcgtctgctggttatggtctagtcttatccctacaacagctagcctttctaaaagtcctaaagaagcaaaatttctcagaagttatggatatgataatctacgtgagtctagtggccagttgtgttagcgtggtggggctttttgctagcagtgagtggaaaactttgagcagtgaaatggataactacaaacatgggaaggtatcctacattatgaacctagtgtggacagctgttacctggcaggtattctccatcggtggcacaggactgatcttcgagctctcctctctattctcaaatgcaataagcgttttgggactcccagtggttcctatcttggctgtaatcattttccatgacaaaatgaatgggttaaaggtgatttctatgatcctagctatttggggtttcacttcctatgtctaccaacaatatcttgatgacaaaaacttgaagaaaaatcatgaaatcacaacaacagaatcccctgacccaccagaagcagaagagtcaacttggcaatcaaaataagctgatattttgaaagatgctgtcccgcagtttacagactcaatcaatctagttaagtaaacttactttacttatcggcctggaggcatcctacattgaagaatacacaatacatttttgatgcaactaatgtaaagtctcagcttgaaattttttgcatcattgtaacaggaagtagatttcatttaaataagtagtgaatgactttggtttagtttcaattacgattacccaaattacattgtaatctcagtgaaccaacaatcttaagtttagaacagctgattacaaaagttcatcgtttaaacttgggttcatagcagctaaagattaaatgtaactcaaccctgtatgtaacaagaacctgtaggcagattgataaaagtagatatttatttaataaaaaaccatgtcaattttgtgagtgtgacacctgataaaaattaacccttagccataacttaaaaagatttcaatgcactattccactttctagttttacctgaaacattgtgaaacaaggacacacagaaaatcatttctaatgaagaaagaagaaatattaatcagacaggtccaaacatccttggtgaaacagagctttgtacaaaaagtaaatgaccagaaataataccatttggcagtctccatcttagcagttaataaagtgacttcctctgccatccaatattgtggtgcaaatgtcttcttttgaaaagagaagcgagacatcatctccataaatgtgtttctaatccacatgcctgatctcataagagaaagatagtcagacggaacaagccaaagaaattaaagaagacgaataactttcaaaatagacatcctgacggtcatacaatcttacaacttgtgtgcatgcgtgttaagtttgtgtctatgcatatggctgatgtgtcacacaggtataaaatactgagtgactaatggctacacatcatttccttcttgatttgactcgactcatctctagatcaacaatagtgacaaaagaaattaaattcacagcaagagaagatatacagttggcatttactgaatgtggggacaagtacaatcaaaacatagacgatgaccgattcctaatctctaaatatatagctacagcgtgtctcacccatatcacagaagcaatcacttggtagcactagtaaccaagcaatttgataataagatacctaatacttagaatctattcagaacattgttagtacctccttgtccatctcgaaggagggggattccacatctactatg

SEQ ID NO: 20417 - DNA, 3003 bp, Unknown; identical to SEQ ID NO: 20416
  misc_feature (1)..( 3003): 2750-1469P.txt file - cDNA_ID_1825816; gDNA_ID_2926170; Annot_ID_140069

SEQ ID NO: 20418 - DNA, 3003 bp, Unknown
  misc_feature (1)..( 3003): 2750-1469P.txt file - cDNA_ID_1825818; gDNA_ID_1620735; Annot_ID_49463
tggaagccactgacataacagataaacaatgtagtgacttgcaacaaaactccttaaaataccaaaaacgtatactctaggagcttggcttcttgtatctttgttgacttctgatttaacgtcaatagacactgaggaaaaagagttctcttagagccgccattcaaaagttttaagaattttaagtcaagtgtaagcaaataagaaaggtcaatggtcagcatgagactactaaattatgatactgctgtcatctatcacctgacccatctttattattatacacaaattagtaaaagtctgccaagtttgattagtgcaacttgtatctggggtatttagttactataataaatatcattttgtgtataaagaaaggtctcttctgtatctaaaagacatatcaaacgaaagaaatcaataaacacaatattctttcttccaaattttctcatttctcatgggcatatctcaagtacactattgcaatggtaagcaaaaggtacctgatgacgttagatcatttgatcctctttcgatgaaatataataaccacgagtgttaatttttcaggtgaccagaacttagaagcaaaccttctagatcatgaggaaactgaatcattttcagtacctcaaacgaagaactgtaagaggtggctccgtgtctccatatacgcaatctttgtcatcttctgccaaccacttgctacagttctgggtagactgtactatgaaaatggagggaaaagcacatatgtggtaacacttcttcaactcattggcttccctgtactgattctcttccgcttcttttctcgaatcaggcaacccaaatcaacagatacaaatttcagtcagtccccttccttcaccacccttgcatcggtttacttgtgcactggactgctagtgtctgcttatgcttatttgtctgcagttgggttgctttacttaccagtctctactttctccctcatcttggcctcacagttggccttcactgcctttttctcatatttccttaactcgcaaaagttcactcctttgatagtcaattctttgtttctccttacggtttcctctgccctcctcgtggtcaacactgattcagaaaacacaacaaatgtatctagagtacaatatgtgattgggttcatctgtaccattggtgcttccgctgggattggattggtactatctctgatacaactgctcttcaggaaagttttcacgaagcatacatcctcagcagtcctggacttggccaattaccagtctctagttgcaacttgtgtggtactcataggactgtttgcaagtggagagtggagaactctgccaagtgagatgagaaactacaaactggggaaagtgtcatatatcttgactttggcctcagcagctattttctggcaagtatacactgttggttgtgtgggattaatcttcgagtcttcttctgtgttctccaattccataactgctgtgggactgcctatagttccagttgtagcagtgatagttttccatgataagatggatgcatcaaagattttctccatcattttagctatctggggcttcctttcatttgtctatcagcactacctcgacgaaaagaagttgaagacttgccagacaaaacctgttgaggaagaaacacaaactttatgaaacaagttgtatcgaaggtctcagaaacaaacatacatagttgtacacagtcatgtaaataacctatataaagcttgtatgtgtaatatccgtaatggtccatgcaaatgggatatgtatgtcgctcatatttcaggtatttagaacttttattcaaaagagtattgtgtaatacgagcagagtgataaaagcagtcatttatttaacagaaaaaccatgtcaattttgtgatactttcattgtgtgagtgtgaaacccgataaaaattgaccagttagcataacttacagatatgtcaatgcaatattctcctttctagttttgaaatgcacctaaatcttgggaaacaagaacaaacagcaaatcatgtataatgagagatagaagataatttgtcagattggtccaacatccttggggaaacagagctttgaacaaaaagtaaatgaccagaaataataccattttatatagcgacttcctctgccgtccagtattaagttgttgcgaatgtcttctcttgaaaagataggcgagacataatctttagctaacgtcagcatcatcttgatggcaaaaacttcatgactagccatggaaaccgaagtgtgtacccaatccaaataaatttaaaaagacaaataacttttagaaatgtcgtcctcatcaagatcacagaatactacaacttgtgtacacgttcatacatatgcgtatgcgtgttaagtttctatttgtctatgcgtatggggttcatgtcctccacatagttgcagaagaaagtctgaatgaatattgcctacacataatttcctcctagacttaactcatctcttggtcaacaatagaggcatctttgcatgtagaaagactacagatactaaattcatggaaagagaagagatatggttggcatttactgaatgtggggccaagaacaaagaaaacttagacggtgaccgattcctaatcccagaatatataacttagcatatctcacccatatcaaaggagcaatcacttggtagcattatcaaccaagagaattgataataagatacgttagttcctccttgtccatctccaaggtggtgattccacatccaccatgacggcggatcaagaactacaaatcattggtgagtaagcataaaccagtttgtggtgaacgtcctattctttcatcttcaaaaaaaaaaaagatggttatgatattttataattcaatatatgaaacgatcgacaacaaataaactaatttttgcgttattttcactcacttaccagttcggcagggaaaagaaccaaatccaacagttcaagatg

SEQ ID NO: 20419 - DNA, 3003 bp, Unknown; identical to SEQ ID NO: 20418
  misc_feature (1)..( 3003): 2750-1469P.txt file - cDNA_ID_1825818; gDNA_ID_2926170; Annot_ID_140068

SEQ ID NO: 20420 - DNA, 3003 bp, Unknown
  misc_feature (1)..( 3003): 2750-1469P.txt file - cDNA_ID_1825824; gDNA_ID_1620735; Annot_ID_49461
aagtttcgaatgaccaatcttctcttctcgatcaataattggattttgctggtaaatgaattatttactatatatcttctttgatacgtctcttcttatttaaatgacataaaacaaatacaataatccaaattttaggcacgtcaacattattaactcttaagtggacataaataatctcactcttgacggtctttcaaaggtattgtattagcatgaaattctatattaattcttaacatttacctttatcttgtttttgttcctaagaacgttttctaaaattctccaaaatgggcccaaaagtatgaaatccaaattgagcccaaagttgtgatccagtgaaacgataaagctctcacgaggttcaagctcccacaagctcagatcgtgggcggtaaaagaaacggttaactaattgtaaaaaatgatttttttttttctacttcactaaaatattacagttttttttagcaaaagtaaaagtttcgagaaactctgaaaaagcagttttcaatcttaggagcagtgtatgtgtcatgtacatcgagatggagaattttcgttacctgaaatttttcttcttcttcatctttgtaatattatctccttctgaagcaggaaatatagtagacaaaagctctgttttccttgttgatgtccgtagctttggtgctcgagctaatgaccacagagaccacaccaaggtttttttcaaacaacattagatctgtgttttttgtttttgtttttggtagattcatctgtttagttacaataaatcagctaataacttgatgttttaaaaggcctttgtagcagcatgggacaaagcatgcaaatcatcttcaagctctgtgaatcttataatcccaagaggtgaattctctgttggttctctcagattctctggtccttgcactaatgtatccaatctcactgtccgagttaaggtagttttatcaacactctccaaaatctgtctttgttgcgttgtgtgcttgatttaatgctttctttctgtccacgtaactgaaattagggtcatctcaaggcatcaactgatctgtcaaagtatagatcaggcggtggttggattcagtttggatggatcaatggcttaactcttaccggaggtggaacatttgacggtcaaggcgctttagcttggccgtttaataactgtacttctgattctaactgcaaactccttccaactgtgagattaactctacaaacattgaatttgatcttaaggttttctccttttttaaagtatattaattgatttcagagcttgaagtttgtggggatgaacagaacagttgtgagaaggataagctcagtgaatagcaagttctttcatatagcattagtagaatgcagagacttcaaagggacaagactcaacatcactgctccttctgatagtccaaatacagatggtatacatatcgaacgcagttcgaatgtgtatttctcgcgttcacatatcgcaactggagatgattgtgtctcgataggacaaggaaattctcagattacaatcacaagtatcaaatgtggaccaggacatggtatcaggtaaaaatataacagaaccgcttcttttttttggtctgtttctgctgttgagtttattaaacggtttgatttcttgcgtttcaagcgttgggagtttagggagatatccaaatgagaaagatgttaatggactggtggtgaaggattgcaagataagcggtacgacgaatgggataaggatcaaaacttgggctaattctcctggtctaagtgctgctaccaacatgacttttgagaatattattatgaacaatgtgactaatccaatcatcattgatcagtcttattgtcctttctcttcttgcatttcaaatgtgagtcttctttaacactcaaataagatttttttactgaaatgggtatgagagatttgtttttgatatattttgttgttgtaggtaccttcaaaggttgagctgagtgagatatacttcaagaatataagagggacatcatcttcactggtcgcggtgcagctgcattgtagcagaggaatgccatgtaaaaaagtgtacttagagaatgttcatcttgatctttcttcgtctgatggaggaagaaaacagagtagtaacagaggaaatgaagctgtctcttcttcttgtagaaacgttagagctaattacattgggactcaaatcccacctccatgtcactaatcatcatcatcatcattactatcgtcaattcatcattttgaagtttatctagtacttaaacttttgtgctttctttttggacacgttatcttcatatggtcatattaagtttgctacttttgttgtctatagataaagtgctactacgctaaggaatatttttggctaaataataaaagaaatatgacaagaaaaaactggttggtaataaaaatttaaatttggttcgtgtttaacggttgataatactggttggtaagtttgatacttttgtctatagataacttgctagtaccctaaggatttgttttggctaaatataaaatatggcaagaaaattctggttggtaataaaatttggttcgtttaaagataggatcctacaaaaatggaggagatgattcattccaagagtgccatttaacaattcacgggaaatggttagtaggacaaattataacgatatatgtagtacttataattttaaaaactgaaatcttaatgtaaactaatactaactttatttattaaagaataatatatgcatacgcatttgcctgttatataagtaagcaacaccatctttatttgttccctgacatatttctccttcaggtttctatgatggaactagaatcagaaactcaagaactccatcttcacgtaaatggcggtaagtattgtaacagaaattccggcgtagagattcttgtgttcttcttcttttacttatgttcttgttctgtttcatgtgttgatg

SEQ ID NO: 20421 - DNA, 3003 bp, Unknown; identical to SEQ ID NO: 20420
  misc_feature (1)..( 3003): 2750-1469P.txt file - cDNA_ID_1825824; gDNA_ID_2926170; Annot_ID_140066

SEQ ID NO: 20422 - DNA, 404 bp, Unknown; identical to SEQ ID NO: 4843
  misc_feature (1)..( 404): 2750-1469P.txt file - cDNA_ID_1825829; gDNA_ID_1620735; Annot_ID_49459

SEQ ID NO: 20423 - DNA, 3003 bp, Unknown
  misc_feature (1)..( 3003): 2750-1469P.txt file - cDNA_ID_1825829; gDNA_ID_2926170; Annot_ID_140064
atgtgtttactagaaagtagaaataaatttcataataatatctttatatgttaggcacaaatccccaaaaataggtcagacatttcaactgcagacagatacagttatgtatacgtgtaattgtaagctaatgtttttttttcacttacaggttacaaattacatagaggtccacggtctaactttgggtaatttaaatgtggggcttatggataagacaacgcaaacgattaggcaccaattacggcgtttagtttctgcctaaattaaaactataaatgtgtattaatatatatcttagtatgcattaatgtggttaggtacgagaaacagattcatataccaccattatggcattattatagtatgcaatagaagattgaatatatatttgacttcgaagattgaattttttttggtttagagattattctattactcatatggaatctgataagagttgctgtttctctttcccaaattaaagtatgtatacgccttgatgttcttggtcaaatgtgaatggttaatgtctcttttggttcaaagagaattattcggtcttcttaattatttcgaccaaagattactagattggtattgattttctcgaaaacgtttttcatcgtagtttgttttgaccaaaaagcgttaaaaacatggaaattattatgcccttctttcattgatcaaatttttatataccaaagccatagtattttgattcattccaatattttatactgagtatcactgagacactgactatatatatgtatgtattctcgcgctatccgtaatatgctaggtaatatagcagtgattattaaacgcattaagatcatcatacgtaattcacgataatttgtaatccaaaaacttaggtgtgaccaaaaaaaaaaaaagagttgaatccttcacctaccaaaaaaatggattgtgaccaaaagaccatgacatatcaaatttttagtgattaaaccgatttcttccaagatgctagtatttgtttttatcttgccatattttagtgatttttcatagtagtaaatatatcactttgaccacatttaaagttgatgtatgtccccttcgcatttgtcatgtcggttaggcattatatgtctccttttttcctgatcatatgctcctatcaatttctacaaactcatgaaaacgattactagctatataaatcaagcatagggttcataacatgcaactttaattccccacaattatcgcaaataaaattgtatataaagggtttatcgtaattatcataatgttaacattttcataatatagatacttttggtttgaccatcttttccttaatataagttaataaattaagatgctcttttacttgcaaacagaaagttctaatgtgaaaaagaaattgttattgcgtaatcatgatctcacttatccgtcagcataagtaacgatccactccacatagctacgtcacttaaagtcccatagtaactaattttctttgaatgttatagcaaattattagcaatgtatgattctttgggtcaaatcttacactaaaaacatgaaaataatttgaatatcaagagattcatatattcatattttataaccaaaatatgtagggtctaaattattgcttcttgactaggaattacctatgaataattattaaggttcgtgaaacagtgagggaaaaagaagaagaagaagagaagacagtctctagcacgtgccaggtcatgtgtcggcgacggtcaaatgccggtgcaagtgtttccacgtggcagcctaatactcccaaaatataatcttttgttttcgtaaacttttttccctttgaatctttgactgcctcttactgcattcttcacaccaaacgaccggccggtgactgagtgtttccggtttccggtaacacatagttttcgctgactaagactccttcaataacgtcgtcttcttccacgcgccgtttagtcgtagcgcgtgttatcaagcccgtccactatatatgccacgtatagagtggggaagaaaatgaaggtgagaacttttcatgtcctactttttggccccataaaaaaggcagcacacaaaaataacccaaaatttatgcatgtttatcaaatgtggaaaaataaaagtagaattttaggaaatttatacgaagatacaatgcaaagactcgaagaaatgtatttagtggtatagaaatacttgcaagtaagcatattctgaattaaaaatatagaagcttaagtatgtttcctcactagaagccagttttgcagctctatttttgtcaacttagctttacgtaaagttcttattgcccgaaaccaaaaagtcattcaaaaggcataacatgatatcacaaataaaattatcatctacttctatatcttatttcttgaatatatatatatatatatatacctatctattaagttgcttatcgttcacattattaatttataattaactttatgtacatttgactgataaacattaaaaagacttatttgaacctttttgtatatgaattcaaaattatactgataaaataacgtgaggaagaaatattatgaaagcttttaacatataaattaatttgcataggaaaaaattacacaacttaaattgagattagttaagaaacaagaaaaaacaaagttgatagaaaaataaaagtattaacacgactttggattcacacacgtaccattgaattatatctcaatacacttttacttaattaacttatttccaaaccaagtagccaaaatcatattattcttctctctcttccttttttgagtttcaaaatgcataaatacgagaacgagagacgaagaccaaattaaagtccaagcaccaatctagacctcttaggaaaaaaacctaaaaacctaatccccaaacctaaaaggcttatctcatctcttcttctttgtcttctttactctttttttacctctctcttcattgttcttcaccatg

SEQ ID NO: 20424 - DNA, 3000 bp, Unknown; identical to SEQ ID NO: 4852
  misc_feature (1)..( 3000): 2750-1469P.txt file - cDNA_ID_1825841; gDNA_ID_1620736; Annot_ID_49493

SEQ ID NO: 20425 - DNA, 3000 bp, Unknown; identical to SEQ ID NO: 4852
  misc_feature (1)..( 3000): 2750-1469P.txt file - cDNA_ID_1825841; gDNA_ID_2926157; Annot_ID_139567

SEQ ID NO: 20426 - DNA, 3000 bp, Unknown; identical to SEQ ID NO: 4850
  misc_feature (1)..( 3000): 2750-1469P.txt file - cDNA_ID_1825845; gDNA_ID_1620736; Annot_ID_49492

SEQ ID NO: 20427 - DNA, 3000 bp, Unknown; identical to SEQ ID NO: 4850
  misc_feature (1)..( 3000): 2750-1469P.txt file - cDNA_ID_1825845; gDNA_ID_2926157; Annot_ID_139566

SEQ ID NO: 20428 - DNA, 3000 bp, Unknown; identical to SEQ ID NO: 4849
  misc_feature (1)..( 3000): 2750-1469P.txt file - cDNA_ID_1825858; gDNA_ID_1620736; Annot_ID_49488

SEQ ID NO: 20429 - DNA, 3000 bp, Unknown; identical to SEQ ID NO: 4849
  misc_feature (1)..( 3000): 2750-1469P.txt file - cDNA_ID_1825858; gDNA_ID_1620736; Annot_ID_166266

SEQ ID NO: 20430 - DNA, 3000 bp, Unknown; identical to SEQ ID NO: 4849
  misc_feature (1)..( 3000): 2750-1469P.txt file - cDNA_ID_1825858; gDNA_ID_2926157; Annot_ID_139562

SEQ ID NO: 20431 - DNA, 3000 bp, Unknown; identical to SEQ ID NO: 4849
  misc_feature (1)..( 3000): 2750-1469P.txt file - cDNA_ID_1825858; gDNA_ID_2926157; Annot_ID_198498

SEQ ID NO: 20432 - DNA, 3003 bp, Unknown
  misc_feature (1)..( 3003): 2750-1469P.txt file - cDNA_ID_1825882; gDNA_ID_1620736; Annot_ID_49480
gctcaaggttgattagtcagatcactttttattttagtaatgactaatatatatcgttggcatgcaataagtctctccttacaaaatttcactaccttgataactcttttcttttggcctttttttttttgtgaatgactaataggttgtagatctatgcccacattaggtcaggactataacattttatatcgaccttctcaagtatcactcgaactggtgagagtcttaccaattgagttatcgatatttgtgtattatagtacactttaaaatgattccctacaatagctctgcttgatctttcttccgttttcttttagttctcgtaccaacggttcggtcattcattagttgttcttcacaaagtttctgatttttgatagatgatcctcactaatctaaatctttatctttagtacctactctaactaacggtatgctgtattgacatccttcgctttgatatttagatcagagtcaggattattacaagattagtgaaaacgatattattaatgatccaatccataaagcgaaaatttgtatgttcgaccacaattaaataaatgaaatgtatgtatatgtgaacaaaataaagatgaaagataataataaataaattaaaaagtaaaaataataaaaaaaaatataaaagtaagaataagaaagaagaacaaggaacataatatatatctcgataaaccaatacgttaccaaatggcgttaactaagaaaaaaaaaaagacaaaggttcactgaccgactcacgatatgaagacatcaaagagaatagatgtcacaaaacagaagattattaaacaaaaaaagacagattctaccacttcaaaatgatgaaaataataaagagatcactcaacatgtcctgtttgatatgatcaacactgaagagataaaatctgcgcaaaaagacaagaccttcattacaatctcaagaaaaatatatcatcatggattaagcacgagtacatgttcttaataactttgtttatacgcccgaaaattagcattctattgctgtaattttatatgtatatgattataaatatttacgttcgcaatgtgtctatgatgtggcacatggttggtctcttagccaaaacgtgtatcatcttacgagaatagtatgtagtgttaatcaagtgaaagaagtttccataaaaatgccatctttttttttttgtaggagttaaaaatataaaataaaaaacttttgcagttttgtgagaaaactttccatgctacaaatcttgtatactctctttgatatttttgattaatgcaaagaagcaaaaggagtaaagcaaattttgatcatatcaactttctttatacgtttaatacatttgtgattttgaaaattttaattgttttatttataacctagttttataacctaggatttgtttaaaccatagatattatttctgtgataaaaaaaaaggcatattttgtcacttcgaatttcctcaaaatacatttaagatgataacgtacaaaactatcatattcttgtaaacttatcacttctttttcatgaatcatacacgaaatatcgatatcccgaataaattgagtcatgtgtaatatctcaaactctaattcgagtttctaaatctaaaaatcatatgatttctaatataaaattcgacttagctaactgctacatttgtgcgttatttgccgctaagcacagtacttctagtgggtctatatccacgttttcgtagatcctgttatttcttgctttgcaaatcactttaaaatgaaaatagtttttccacatacaaatctctttgacagatagttaactataccaaatggtgtcgaatcatacactttaatacttccaccaaaaacttattattaccctttttgtcataaaatattaatactatataattcaatcattgaatttcaatctaataatacaaacctgcaacatctcagctaaattatagcatggtttacgtggtaaaggtcacaatacatcaagcacatagtggttttctatctctttaacaaacacgtgcattacgattaatggatatatatctgagttattggttgattgtacctgcctccacttccatttctacctgataattgaatattagtggattcttttgaaaattcagtgatacgcatagggtagaaaccaatcaaagtcatcttttgctagagtgttccgtgttagctagagacttaacacgagatatacttatcatcaactatttttaagaatcaaataaacatgttatttcatagttgaatattgtgaagatatccaacccggattttggttgggtttggattcacattttcgagttttaggacttgtcggtttatgtataaaagtatccaatacaaaacgtacttaaatatgcatgttttggtataatgtcggttttatttcatagttgagagttcttcgtcaaatttatcgttagttcatatttggcatgtatctttagattgttattctcctcacacttggaacaaataaataattaccgttgcaagacttttaacacattttgaatcatgtttatcaaaatcttaattcaaaacatatgacactgtgaaaactggatcaaaaagacttctcatcagggaggttattggcgacggcgacgtcaacaatcgacctaatggcttgctcgccgactttggataatatgtaatcatcagtgaacgattcttgatctagtaatagtaaacccttttggtgatttatttatctatgctatcaatttttatgcaagtctttctatagaatatttctctctcgtcatgattaatgctaattttcagtttttcacctccacaaacaaaagacggttctactcgcacgtgttaaaagacggttctgctcataagcatacaaaaatagaaggctaggatcataaatcttataagttacaaatcaaaataacatatatattcactaaatactttacatgagagattgaattagaaatg

SEQ ID NO: 20433 - DNA, 3003 bp, Unknown; identical to SEQ ID NO: 20432
  misc_feature (1)..( 3003): 2750-1469P.txt file - cDNA_ID_1825882; gDNA_ID_2926157; Annot_ID_139554

SEQ ID NO: 20434 - DNA, 3000 bp, Unknown; identical to SEQ ID NO: 4844
  misc_feature (1)..( 3000): 2750-1469P.txt file - cDNA_ID_1825886; gDNA_ID_1620736; Annot_ID_49479

SEQ ID NO: 20435 - DNA, 3000 bp, Unknown; identical to SEQ ID NO: 4844
  misc_feature (1)..( 3000): 2750-1469P.txt file - cDNA_ID_1825886; gDNA_ID_2926157; Annot_ID_139553

SEQ ID NO: 20436 - DNA, 3003 bp, Unknown
  misc_feature (1)..( 3003): 2750-1469P.txt file - cDNA_ID_1825890; gDNA_ID_1620737; Annot_ID_49502
attttaaaaagtcaacatcagtgctaatttcaaattgaccatacattagcacacaagaagactaacaaaaaaaatgagtgaataaagaagagagtgagtggggttgatacatgtcaccgtccaaaatgtgtctgacccttctcattggagctacaagagccgaccctttgcctcatcatttgttgacttcactctccttttacatatttaaattataacttgctcatatttccattcattgtgttcggttctagattgttccatccactttcttttttctcttactttgaaatttagaaatatatgaatacttgacaaatatttgaatattgtaactgatttgtttgttcgtaatacttgacaaacttttttgaatatacacctttacatatattttgagttgagataaaaagggaattatgttagtttatggattatattatgtaaataccacatctaactatgatcggatgaaaactaaaccagcatatctctaatcagtaatatttactaaatttatatatcattaaagattttttgaatttagcaaaaaaagaagaagatatcattaaagatttttaaatttaaagtataacataatgaataaatcaagtgttgagcttagtttcgcgttgcaaagatgttcatttgatttttttttttttttttccatttgatttttcttatactaaattgattgatgtcacggtccttctgtgaaaaaagtatattgtactgtataaatttataatagtcatacttgaagataactaatatcattttctaaaggttttgttgacatgaaatgggtgaatgatgaacatctcgtttgctaaaccacaaaagaaataattcgttggactataacttaaacttataatatatcaactgaaatgcctacaatttgagaatacgccttttcaaaaagttttagaattttataaaaatttctccaccataatattactttaataaaagcttgttattaaaatgatatattaacaaaaaaaaaagaggtaggcaaagtagcttttattaaaattaatgttttccctaattggtaaatcataaaccaaaaaattgaggtaattcttaatatatttactatgattagaatgatacattaatgtaacattttatcatcttcattaataatagtaagttctcctcaaaattacaatttgatatcaaaaaatatatttgtattacaagcaattactgaaaaattaaaattacaatttagcccagttacataactccacgtaaggtttgagcccatcacatcacatggtacatgaccaaagcccagttatgttaccatggagtattcttcagacaagagccatccagacagaagtggaccacacaatcacgaatcgtatggagatcattacaatatattgctcacatcttattgcgccacgtctcttatttggcgagtgatcaacgtccacagatctcttgctccactctgattggtacacgtcatcattttattgtgctacttgtttatgtggtacagtagagacaagtggtaagattttaaaatatcttaaaagatgtgtgaggcccatttagatattttctcaacgggctgttcctcaaaagctgcccgtttatctacaaccatcgaacggctcgaaactattctgggctagctgcccgaaatctcttaaaggaatttgttgagtgggcttgaatcaacggtggataattcgaaggtgtacgtaacatctcgtagcatctgaacttagctcccctcaaaatatctgtggacatatgtcactagctttttttttgtgtaatgaaactattaattaattaggcaatcacatgagagatgttatatacttaaattaataactcaataatacaatcatgaccaccaaaccttgaaataaaataatctctctgattacttgtacaaattctttaccaatatatgccatactgtgaatgtaatggtttattttaaaacagccaaatattattgatataattatatgtttaagtagattttaaacttagctcatggttaaaaatagacagaattttggagtaaatctgagtttacaaaatttatttattaggattaaaattaattacttaaattggcaaacatttttcttggtgattgtaacatacaatatacgaatttgaattcgcattgtgattccaaaacaacactaacataaactaccagtaaaattttttaaaataaaatttcatatatatatgcttaaaaaatgtaacaaaaatatggtaaattttttaaccatggtatgggtggagatgtatgtgggatgatgatggttatatggtaatggcgcataaaggtggtggcaaaggcaaggaaatatcgatgacacgtaagcagacgggaaatcttaaaccgagtggagaagcctccaaatctcttttttctctctctctctcctaaggccaccacaatctcttcttctgtgtatgtattctttttttctccgatattcgtcgatctctcaaaaatatcctcaaagccaaaaaaaagcaagagtagagataaccaaccaacaaactcataggaagacatatttactttcaggtctttcttctactacctttttcgtggtttttggttgattgattctcagatgagattttttcccgaatcatttgatgtcttttttttttaaataagttcttggtaaatcactgtttctactagcattttttgttttctcagcttagatttgttgtttgatttgacatcttatctgattgagattttgttcttctgaattgttgttacagggtttagctgtttgattcagcttcgatttagtgtacagtgtgttgattagtataaaaaggatttaaaagaatctgggagatgtgtatagtgattgttcttgctggcgaatgttaacactacgtcgtattgattctcgattgatagtagaagaaaggtgttagttagattgttcgttcatctagttggggtttagtttcggttcctggatg

SEQ ID NO: 20437 - DNA, 3003 bp, Unknown
  misc_feature (1)..( 3003): 2750-1469P.txt file - cDNA_ID_1825894; gDNA_ID_1620737; Annot_ID_49501
gttggaggaagcaaagttaaaagtaaaggctaagttagtgaactctctcatgggtcaatggcagggctggagatatgtacgagcgcactcattctgcggctttgcgcataatgtgaagctttgtcatttcatttttaacattttaccacaaaagttcaaaacatatttttatctacattttaagtttgtatgtttcatagttttcttctgtatatactttctcttatgtgacgacaattacttatgtacttaacttttttgggtcacgacttgaaaaaccacatatggattgagactttttgggctattggatgacatatctaagtttgatcaaatactagaattgatctacctacattggatgcatgttaagttgttgctactcttagctcagattcacacagaaaagtataaacccaaagaattacgttcgaaagaaagatttaaattgattatcaaagcaataactaaatcaaatccgaatatcagagatcgctcgctaaatgtttgctcacgatctacaagtaatcaacattgactactcacttgaacatcttcaggattattggctctctctcaacaactcagataaaaagcctgaatgaaagagaaggcaacaacggctatatatgtttcctcagtcgtaacagcaaagcctccctctggaacaaagtctttctcttccttctcttcttcagcaaagactctaattccttcagtgtctttcgcttccgttgactgaagctgatgtggcattgaccgcttcctataataagcttgatgaaccgtatcaatgccacaattataatcttcataaataaacggatgtgttttacacactactgtaatattttgttactccatcattcaacataccaatcatcatcatttttatattttaattaaaaagattacatttcacaacttatatacaattgaaaatagagaacatcttaacaatatccctatagtaaattttcttttagtcaactatttaaagatttcaaaatggtttattgtaatccatgtgatccggtcaaagaatccaaaatagtttaatatctctatttatagtagaagaaaaataactagctacacaaaatatcggagaatgcatgatcacacatgtcaagcatattagtgtatccctagctatacgaagtagatgtattgtatgaccacatatctgaactatacgacgtcatgtagttaacaccacagacatgcaattccggtacactaataaatttactccgttgaagaccagtgttgaccggcatagttgaggatactatagtataattggcatgggtaaattaactaaaaatcatcaatccatttatcataatccaaattctggtcaaaagaatctaaaaatagtttcataaaaatagtttcatgtttctgtttacagtaataaaattgatatcttagtcatgaccaaatcaatagccgcaagttatgctcccaaaaattagctgttcatcttttactccaatcaaaaacataaaaaaaaaaaaacaattacaatttctattctaagtaaatgttaaataaatttattaaattttacctcctaagacttcagtggttacactattagaaaataattagatttgtgtgcctaaaagccttagaagcatgcattttttatgaataaataaatttagtattgatttcggtatagaaaatgaaattagcaaattcttgatatgtgtaactaaaataaaatcttatgtaaaaaacagaagcgataaaggcaaacataattcaaaactgcgaccaattcttattatcaaagatttatgaaacaccaattagctattaatagtaaaaatcaagtgacactttccctatactaaattgttaattgttcggatttataggcttagctagttaagtataaatattaatccacactcttcacactaattcaattttatccctaataaaaaacttgaatctatatatgtgtatcaatatatgtgtatgatatttaaaggggtttgtagtctattgaaataaataaaagattccattatccatgatttttaataagttacttcgtagcattactaaacctatttacatcatcaacaatacaactgatttaatttcaactaactaaaaaattaccaatttatttatcataaattcataatctaatatctggtcaaaagaatctaaaaatagtttcatgtgtctatttatagtaataagattgatatcttagtaatgaccaaatcaatagccgcaaattttgctctgaaaaattagttgttcgtctttactctaatcaaaaacataaataaaaaatcacaatttttatccaaagtaaatgttaaatcaatttattaaattttagctcttaagacctcattagttatattattagaaattaattagatttgtgtgcttataagccttagaagcatgcatttttttatgaataaataaatttaatgttgctttcgatatagaaaacaaaattagcacatgctcgataagtgtaactaaaataaaacctcatgtaataaaaaaagaaataaaggcaaacataatttaaaactgcgaccaattcttattatcaaagattcatgaaatattcaattagctattaatagtaaaatcaagtgacattttatttatactaaattgttaattgctcggttttataggcttagctagttatgtataaatatgcatccacactcatcacactaattcaattttatccctctttactcttcttgataatcggaggaaactaaaaaaggaaaaaaaaaaatctaaataagaataaaattcctaaaaaataaataaatcaaaaattgtgaagaaacaaatcctcgagtcatgttgtttacagaaaatctctttctcacttaaaacccttacagaaacaaatcatcgaatctttgtttttttagaatcagtgattttgtttcctttcacgagacgaaaataacaaatcgtcttgtaaaaagtaaactcataatcatg

SEQ ID NO: 20438 - DNA, 3000 bp, Unknown; identical to SEQ ID NO: 7937
  misc_feature (1)..( 3000): 2750-1469P.txt file - cDNA_ID_1825894; gDNA_ID_1621175; Annot_ID_174123

SEQ ID NO: 20439 - DNA, 3003 bp, Unknown; identical to SEQ ID NO: 20437
  misc_feature (1)..( 3003): 2750-1469P.txt file - cDNA_ID_1825894; gDNA_ID_1620737; Annot_ID_166291

SEQ ID NO: 20440 - DNA, 3003 bp, Unknown
  misc_feature (1)..( 3003): 2750-1469P.txt file - cDNA_ID_1825898; gDNA_ID_1620737; Annot_ID_49500
cagaggtcgtacattgtctagacaccgaattgaatgcatcttcgagtcagctacgcgcaatctttgtcaaatatctgataactctagcaatggacaggaagaaaagagagaaggagatggcttgtgtgctcgtctctactcttggtttccctcccaaagatgtcagaagcgcattctcgatgctcatagaatctgcagacgacactgctttggacaacccagtggttgttgaagaccttgccatgttcttagcaagagctgtggttgacgaggtgttagctccacgggatttggaagaagtgttaaatcagactcccgaggcaggctcaagtgtgggcgagaaagtgattcaaatggcgaaaacattgctgaaagcacgtctttccggtgaaaggatcttacgttgctggggaggaggaggaattgagacaaactcgccgggatccacagtgaaggaagtgaaagagaagatccagattcttctagaagagtatgtctctggtggagacctcagagaagctagtaggtgcgtaaaggaactaggaatgccgttttttcaccacgaagtagtgaagaagtcagtagtgaggatcatagaagagaaggagaacgaggaacggttatggaagctactaaaagtgtgttttgattcaggactagtgacgatatatcagatgactaaagggtttaaaagagttgatgaatcacttgaagatctgtctttggatgtccctgatgctgccaaaaagttttcaattgcgttgaaagaggcaagcttgaagggttcttggacgaatcattcgcttctgaggattcgcaaagtaagaaacagaacggctcgtcttcttcctctggatgataacatttgagcaccatacctcaaacctcgagacgttggtttcacgcaaaatcaccttttggagttttttttttttttttcttataaacaaactaaaaaagttttggatactttttgatgacgtttcttacagaaaacaaatttatctttatcttagtgacgttttgttatagcacattattactttatgacctgttttttttgttcctttgtcaatgattacattgtcttgctaatattttcatacagaaattttattttatattctatgatattatcctctcttaaaagctggacaaaccccacggaccacgagtcttccagctaagactttttttagttcccaaaagatcgaacttggcgctactttcattttctcatctctgtttttccaacatcctaagaacagagttcgttgctccttttgttttctttaaagaaaaagtcagattcagatacatacatactctgaagaacatgtcgacgcgaagacgaactttactcaaagttataattcttggagacagcgggttagcttatttttctacctaactgtgttttttttttaatgtttgatccgttaatcattctcttgttgttgtttttgtgtacaaatatcacagggttggcaaaacatcgttgatgaatcagtatcctaactaaactttttgatttttctttctttggattttcttcttttcgtaattttgatttttgtagctgacggtgagaaaaaaaaaacttagctttttttttttttcaatttgtagatatgtgaataacaagtttagtcaacagtacaaagctacgatcggagctgattttgtcactaaggagcttcaaattgatgacaggcttgtcacattgcaagtgagtttttttgtttgtttttttttggtttaaattgttgtcgatcttttaagagaagagtgtatatgaattattattattattgtaattgtgttaagatatgggacactgctgggcaagagaggtttcaaagtcttggtgttgctttctatagaggtgcagattgttgtgttcttgtctatgatgtgaatcacttgaagtcatttgaatctctcgacaattggcacaacgagtttcttacacgggttttttttttttgctttctccatcacattttctcttcatccaaagattctttcttttagtgactgatagttgttttttgtggatttttgggccaggctagtccacgtgacccaatggcattcccttttatacttcttggtaataaggttgatattgatggaggaaatagccgagtggtaagttactattagtcttaagcttttaaatctgaatagtccatttcctttgtttgctatatatttcctttctttgtgttcaggtatctgagaagaaggctagagaatggtgtgctgaaaagggaaacatagtctatttcgagacatcggctaaagaagattacaatgtcgatgactccttcttgtgcatcacaaaacttgcccttgcaaatgaacgcgaccaagatatgtaagtgttattagtctttctttatgtgatcctctcactttgtgaatctcctccatatgatggatccttattaaactcaagatgaaaaaccagaatctctcaattcaaattttcatataatctttttttgcaactcggtgctacagatatttccagccagatactggttcggtgcctgagcaaagaggaggttgtgcttgctgaatgctgaagaaacatttcttactctcttgatttatgcattacttgttgtgtgtgtctataatcttaatgctgagaaggaccaataaaacttgtattgttccctaagtaaggttttgttacctttctggttcttcatctttgacatttggtggttcacgatttgtatgtaacaacagttcaagtgtacatgtaatgggttggttctgtcttctttatgtaatgggaaactaatgatgagtccggttcagccgcgctaaaccgaatccggttcggtttgaaatatcagttagcaatttggcggtgacgtggcgcttccttccccacttgtttcgctccttagaattcagttgaatctctcgaatcgtcgtcgtcaatcttttcgatttctcttcctctcgtctctctctctgttaacaatg

SEQ ID NO: 20441 - DNA, 3003 bp, Unknown; identical to SEQ ID NO: 20440
  misc_feature (1)..( 3003): 2750-1469P.txt file - cDNA_ID_1825902; gDNA_ID_1620737; Annot_ID_49499

SEQ ID NO: 20442 - DNA, 3000 bp, Unknown; identical to SEQ ID NO: 7938
  misc_feature (1)..( 3000): 2750-1469P.txt file - cDNA_ID_1825902; gDNA_ID_1621175; Annot_ID_174125

SEQ ID NO: 20443 - DNA, 3003 bp, Unknown; identical to SEQ ID NO: 20440
  misc_feature (1)..( 3003): 2750-1469P.txt file - cDNA_ID_1825902; gDNA_ID_1620737; Annot_ID_166289

SEQ ID NO: 20444 - DNA, 3000 bp, Unknown; identical to SEQ ID NO: 7939
  misc_feature (1)..( 3000): 2750-1469P.txt file - cDNA_ID_1825906; gDNA_ID_1621175; Annot_ID_57317

SEQ ID NO: 20445 - DNA, 2327 bp, Unknown; identical to SEQ ID NO: 4863
  misc_feature (1)..( 2327): 2750-1469P.txt file - cDNA_ID_1825906; gDNA_ID_1620737; Annot_ID_49498

SEQ ID NO: 20446 - DNA, 3000 bp, Unknown; identical to SEQ ID NO: 7939
  misc_feature (1)..( 3000): 2750-1469P.txt file - cDNA_ID_1825906; gDNA_ID_1621175; Annot_ID_174126

SEQ ID NO: 20447 - DNA, 2327 bp, Unknown; identical to SEQ ID NO: 4863
  misc_feature (1)..( 2327): 2750-1469P.txt file - cDNA_ID_1825906; gDNA_ID_1620737; Annot_ID_166288

SEQ ID NO: 20448 - DNA, 3000 bp, Unknown; identical to SEQ ID NO: 4874
  misc_feature (1)..( 3000): 2750-1469P.txt file - cDNA_ID_1825917; gDNA_ID_1620738; Annot_ID_49512

SEQ ID NO: 20449 - DNA, 3000 bp, Unknown; identical to SEQ ID NO: 4874
  misc_feature (1)..( 3000): 2750-1469P.txt file - cDNA_ID_1825917; gDNA_ID_1620738; Annot_ID_166307

SEQ ID NO: 20450 - DNA, 3000 bp, Unknown; identical to SEQ ID NO: 4871
  misc_feature (1)..( 3000): 2750-1469P.txt file - cDNA_ID_1825928; gDNA_ID_1620738; Annot_ID_49508

SEQ ID NO: 20451 - DNA, 3000 bp, Unknown; identical to SEQ ID NO: 4876
  misc_feature (1)..( 3000): 2750-1469P.txt file - cDNA_ID_1825928; gDNA_ID_1620738; Annot_ID_49509

SEQ ID NO: 20452 - DNA, 3000 bp, Unknown; identical to SEQ ID NO: 4870
  misc_feature (1)..( 3000): 2750-1469P.txt file - cDNA_ID_1825936; gDNA_ID_1620738; Annot_ID_49505

SEQ ID NO: 20453 - DNA, 3000 bp, Unknown; identical to SEQ ID NO: 4870
  misc_feature (1)..( 3000): 2750-1469P.txt file - cDNA_ID_1825936; gDNA_ID_1620738; Annot_ID_166299

SEQ ID NO: 20454 - DNA, 3003 bp, Unknown
  misc_feature (1)..( 3003): 2750-1469P.txt file - cDNA_ID_1825968; gDNA_ID_1620739; Annot_ID_49560
gtgatcttgctgtagggtcagagctgcaccgaagaacagttattatcgactcgatggctctgatccgcgtgaatcagacggtgagttactggttcttgaatgggaatcccgagcaccaaagagcagagtgatcctctgctcgagataggaccgggtaaagggaaaaagacagaaaagaccatagaatagcaataggaatcgctgctatccgacaactttctccgtggagcccgcagctaaaggttaacaaaagattgtagaacccatggacttactatctaaacgatacgagacgggtcagtcaagggccaccagaggcacaaagctggcgaatatccgtgagagcggaagatataaaaggtataggtaagtaagctcttttaagatcaagggcaataagacgtcgaaggaagaatccgcaatgctttgacattccttttcaaatgagttgtgcccagcccagttagtccactactacagatagtaactagcacagaaaaacaagatggaatcaaatacggtgttaattaatttactgaagtgaagcaaggaacgtagtaactcgactggttggagagaaactttgttattagggttgaatttccagtcttcgggcctcaacaccggagcttatcctgaggcctaggtaggtaggtagtgacgtctcttgctgggtctttcataaggaatggtcctgttagtcttaatccagcgactggccttgctccgagccgatatccgaagtatggttcgctcgctagttatatgcttaacacatgcatctgaggtcagaggtgccgctaaggtgaacgctcagcttcaactctgactatatattatatataagtgcactgaaggttaactatgtcaatctacaactcaatgtgattggcttcgcccgggctcagtctctttcggccggtatgtagaatcgtcggagcgagcaaagcagcggagcgaagtgggctgtgtaatcattttattttttgacttttttttaatatataagggtaagtaaggagctgaaaacgagtccttcggagggcgaagaaactcattaattcattttgatgagggcccctcattcaaatgttatgcttagtgcttccctcacattttgagttgattatttccaatttcgagagtgagattgatccgaccaagtagtagtgcggaagccagtacatacatggctagtttccaggcaagccatccatattggcataaccttcttctatgccatctagcttcatagccgatagtttccgttgatcattatcttcatccatcggatcagctccttcttttctgatttttttcaatgactgcttcttatgcttgccctcgttcttctctcttctcctagacccaccccccttactgtctgtttaggccccctgccaggtactccagtctcattgcgtaccgtcgtctgcatcttcttgccctgttttcatagttgtttgcttttcttatatggattaggcttggttaaaagcgtaccgtcaagcaagaaaaggaaccgtaaactagctttaccgagttggcttcttcgtatgagccctagcagcatctattccttactctgttttctgctttcaagcccctaagtaggatcgtctaacgaagtcaggtacgagggaatatgttaatgcaaaagaggcgaggaggctggtgaccagagaaggtctgtgatggaagcaattcctggctttctggtctgtgataaaagcaatctctctccggtcggttcgactgttaatggaaaaatgaatagatccttaggaagaaaaaggctcttttgctcttgtgtagaatcagttgttacagagaaggagcggttttcgtttcgcaatggaatcagaattagctacgatcaattaaaatatcgtagtatagtaagagccaacgaagtagctgtaacgtgaacagctaaagctccttaccttatatgggctgcaccgcgctgaatgatcaaatcccatttattcttatttttttacattacaactcccatgcctttccgttggtcaacaaccaaccgtcgatttaccttttccttcattttgagaacaagtctctcttggggggagcagagcatgcaaaatcgagcaatagatggatcttagaagaattccactttgaacggcacgactctttcgatttttgcgctggcatttgagttgtctcccctcctctttcaatcgacacactcgacgcagatagctccggtggccccggcttctgcctctatcaggcttaggctgcccccacccccacagagccacagcatggagtagctgctcccgcgctacaaccaatcaaaattttatacggatcgatatatgatgatgctaaaccgagatagagaaagagggcgaagaaactcattaattcatcgatgagggttgccgcgcctccctttgttggctcttcgagacaaaaacactcataggaatggtgctaattcccatgttccttctagtctcgtttggtttcgaaagcctccccctccctgtctcttactctttgaaagctgtcatcctggatttatttttgaatggtttctttgttctcttatttggattgaaagaaagacaaaacttcattttcttcgacgaatttcggctatgaccaatgcaccaatagctgaataggcgtaacaaagctacctgaaaaggcaaggtgcaccttgggattgaaatcgacgaattgcgttttgcccgagagatttatttagaaagattatccatcggataaagaatgcaaaaatagaaagaatataaataaaggcgtatacacgggaagggggcaccactacttccagggggagactagcctcattacttcttagtgggcgagaggtgcgcctaacccacctacccactcataaatcacggtgttcagctgacttgaactgatagacccttattgtattggaatttagcgcccatcttttgactgttgtcaacaaatctcttcaatgttcgattctactctatg

SEQ ID NO: 20455 - DNA, 3003 bp, Unknown
  misc_feature (1)..( 3003): 2750-1469P.txt file - cDNA_ID_1825990; gDNA_ID_1620739; Annot_ID_49553
aagagagccagaagctgggtccgcccgccggagcttctttcaatttccggggggcttagcttgaaccactcccaagtgccaagaaccggcgaatgaaggctccgtggcggcatcggagctgccaataagctaatccgttcccagtgagctattacgcgctctttcaagggtggctgcttctaggcaaacctccttggctgtctctgcacccctacctcctttataactgagcggccatttgggggccttagctggtgatccgggctgtttccctctcctagagaaagaagttctctagtcactaaagtgcgtttcactctcgttcctctcgtttcactcgggttgctaaagcacctctcctctgccaagctctctgtcttggttaatggttatccaaaaggatatttctcatgttaggcggtgtgagacagggggataaaggatcccccgttgttattttgtattgcggaagatgtcttatcacggggtcttaccgggcttaatcacctgggcattctttcttcaattaccgagacctgtacatacaaagatctaggcagctcatcttcttctaacgaagtcagatctttttccataccataacatatatagaatcgattttcttttctgatcgctagcctgccgggccgcccccgcgatcaaactatcaatctcataagagaagaaatctctatgccccctttttcttggttttctcccatgcttttgttggtcaacaaccaaccacaactttctatagttcttcactactcctagagacttgacggagtgaagctgtctggagggaatcattttgttgaaatcaattaatctaatcatgcctcaactggataaattcacttatttttcacaattcttctggttatgccttttcttctttactttctatattttcatatgcaatgatggagatggagtacttgggatcagcagaattctaaaactacggaaccaactgctttcacaccgggggaagaccatccggagcaaggaccccaacagtttggaagatctcttgagaaagggttttagcactggtgtatcctatatgtacgctagtttattcgaagtatcccaatggtgtaaggccgtcgacttattgggaaaaaggaggaaaatcactttgatctcttgtttcggagaaataagtggctcacgaggaatggaaagaaacatattatataatatatcgaagtcctctccttcaaatactggaaggtggatcacttgtaggaattgtaggaatgacataatgctaatccatgttgtacatggccaaggaagcataaaatgattctttcattctatagatacctctggtaggtaaagcactcgactgtgctttattgaaagttcccatcgcgggggcgaggatacttgccttcgcggttcgactttcttttcaggcttgactcattcgctagcttctcctcccctttagagctctttatgatgcccactgagtaagattcggggacttccggcgcagaagctcattctgaaccgcgggaaccttcgtctcaatcttcataatcaatttatgccatcttaaaaaaattggaatcttgttaggtacccgtacgacagctctaataatgagctaacgtactcatctttagagtggtttgtgcgcaggctcgagaagttgctgcccgcttcagaagaccttagggtgccttcgattcctggacgactttgttcgtcgtgtacaggggacgggaagagatggctgttcgctgtagcaaaattcaacgaaccgacgggcgtcccggacatagccttcaacccgcaaaggttagctttgttgctggacaaccactagggtactattcttcctggcccctcttcgccctatcacatcacatggtggtgtggtatgcggcagaacatgtctatccttcctccttcttctttcagtcgaaacttcctcctagtgaggtgttcgcctatccaggtatggaagtattcaatgaatacactctgtaccatgcatgggtggatgaagctttatctggagtatcaaagatggaattgtatgctaaggcttagtgccagtatagagcttgaagtctttatggatgtgccgatctttatccgtacatattaccgacctgcgaacatggatgattcgttcaggtacgggataatatttaggatgtacgatttggctgtccagttacagtggggcaatgtcatgaaattgctactagtaactaagactcaagtggagaaaaaaaaagcactcaatttgaatgtaagtaaaacacgggatggaagaggaggcctgaaccaacagggatgaaacagtatagattcccctgggcgaagcaagtcaccgattagtaacctaagaaagagttgtcaacgggcgagtgtcctgctataaggtaaactcctactatttcagcttcttttcccgtggtcgaaagctaaatatctcaagatgatattttccaaactctcgacaagcagcaaatagaaaattaaaagaagattttgaaggatctgatttcatctaaggagtggcggttaacagaaggccatttcaacttatgctctaaaaagatagaaagcattgttgataaagccctctctttatataaagagggctttgcgccttcggataaaggaagattccgatattcgcataggtattgaagcggggatatgaacagctagcttcccctcaaatgggagccgtttaagtaatcttaaaagagtcctcgactgtattggaaaaacaaaaagttcaatatggcgggagatccataattttattgagagctttcaatcaaattagattgtaaagtagtagtcctgtgtaaaaaaaaaagctggtggggcggggtccaagcaagcgtaataaggggagggggactaggggtggaagggtcgtcgaaggagatgcatttctggtacaagtggtattggacaagatctcagggaatcatctctttcagatttctgcctttctttcccatg

SEQ ID NO: 20456 - DNA, 3000 bp, Unknown
  misc_feature (1)..( 3000): 2750-1469P.txt file - cDNA_ID_1826087; gDNA_ID_1620739; Annot_ID_49523
tcagtagcaatagaggctgctgcggtgcggcttgtgatagcaagagactttatcggcctctttgggctttccggaagacggttgagtggagagatattttgaaggtggaactttatgcaatccgccatacgggggagatgcttcgcgaataggcattcgtaacctttgggtagagtctgactcattatatgcagtcaagatgattaactccaagccccataagcgcgaaatatgctgctgagcttcactgaaaatgccagagcagtttgttttttagagtcacacattgttggagggagagcaatagagccgccgacttgatttcgggatgtcgagttatgtcttaatgtacccaagaaacctcccttagcccttaattacattattagagaggatatgcaggaacttctttatgtacgtgtatgagatattatgtaccatctttctaatattattatgtattatataataatataagacaagaataatatttcttattctaatatatagctgcaagaccaatacaacacaggatgcaaaaaaacaaaagcccttctttctaattcctcctagatacatggcttacatacccggcccaacattctcggaaaactaaagaatcgagggtccagaagagaattggccatttaatcttgtaaactaatcgagaccgaaattggaaaaagagatacgaacagagaggaataaccaatcgatgaaagaacatgaaaccattctgtttcaatagaggtacgagaaacggttaggggcaataaagtaggtgaagtggttggattttgcgagctgttccaaccactgctggatgtgattccaagagccgaacgagaatgaataccacacagaagagtcaagaccaggctccctaatggaatgtttaaccgatccattccggatcgaccgaattggtacgaaagttgtaacatgggaaaaccacagaaaacacgacttatttgaataacccggtgacccaccaattgtagaagtaggatctttggcaagcaataagtacttaaataatacaattcgagtgtaccatcttctttctcatttcgaggaaaaggtgcaggaggaaaaggaaacaacggagggatccgaatcggacctaaatgggaatgacatgaaaagtctttttcaaaacctagcattaagggcgttacgacgatatacgagaggaatgaagaaaaactcgtgattggtgtggaggagaagatcagtttatgatatagttcaagaaaaagtcgtctcatttccttacttcttctttctaattcattcacttcaaggctggttctgaacgccgcgtaacatcatcttcaaccaacctccaccgtacgtacctttcggtgcacagccactaaagaattgcttatacactaaactgctgcttatatacgcttactaaaagactgactttcgttcattaggaagcatgaaactaagaaagagagatgtgcctaaggcggcatgcaagcaaactgtgcacactacgagaaaaagagagatgttcgcaattactaccacaagagccccctatcctatctctaaaggggcccgtcacttcgttcgtaccttcttggcttaggcttccaactttacttactttatagccttgccgccccgtcgctagcaaaagctaagcgcttgaaaagcgcgctaagaaaggttgcttctgtcggcctttctgttcaacagtccaccaatagcggaagagaggggtactgtacatacaagactcttccagttcttacgttagctttttcttaccagtcaagtagtacaacagctgtatcttatagcccggcgtggcgggtctttaattcagtagatagaaaaaattattagtaatacgtagatgagtgagtgagtcctcactgacctgagcgatttcgatcacctagcaggccttttttttatttggtaggtaacatcgccgaagcctatcatctgatttgactacgaagaaaggaactcgaggtgaggcggcaccgtcttgtgcaacgcaaccatggttggccctctatcatttctatctagtagacttggtaaaagggccccgacttattttcagaattagagttcgaccgcagctcctttttttttttgggggggggaggggaaaaaagttccttgccaactatcgactccaatctcttttaatttgtttttggtattaccaaacctagcctagcgccttcgtcaatcacactaaagcagagcacccaactatggcaaggcccccttaccttaagggttaggttagtcaatccggcccgagacgcattcgttgacaaaaccgccgtaggaatggggaccattcaatagagcggaggcgaactgatcaacgagaaagaggccctactcactacaaacgaatacaccacaagatcgaactgcactcatgcctctcccgcatcaagtggaccccccatacgtagtgcttctatcaatcatgtacgtagggccttccattctgattggtatatcataaaaaaagaaagccatttgcaccaggtttataaagactggttcgaaaggaccaggcgcactgcgctttcccttgcccagatgttcgcctttctaagctaagtcaagtaatggtgacccgcctaagactggagcctcgtaacatgttggcgaagagcttcgaactgagggttcgatcagcatcaactagttaatacttgttgagacctcttctcttttccgcaccaatcttaattgactactacatctttatttgggtgtatagctcagttggtagagcattgggcttttaacctaatggtcgcaggttcaagtcctgctatacccaaacctaccttaccacactatatagtaaagatgcgtagtagcgttctaagatcactgaggggaaggttggtcataaatttggagagtacacggaaactcagactttcgagaacaaatattgtaccgggaagaaaaaagggacagaaatccataaagtcaaaaaatatg

SEQ ID NO: 20457 - DNA, 3000 bp, Unknown; identical to SEQ ID NO: 20456
  misc_feature (1)..( 3000): 2750-1469P.txt file - cDNA_ID_1826087; gDNA_ID_1620739; Annot_ID_166319

SEQ ID NO: 20458 - DNA, 3003 bp, Unknown
  misc_feature (1)..( 3003): 2750-1469P.txt file - cDNA_ID_1826121; gDNA_ID_1620740; Annot_ID_49590
tatcattaattcatgtcatcatcatcattatccttattattattaatagattacattcatattaaagattcctactagtggggagaccaacaacagttcaagattcttactcgtcaggagacaaaacgttattatttcatcttaaaaatcttgtcttaaatatcgaaacagagaatagtaattataatgaattgcattgcttttaaaaccttaaggggtcctttgattttacaaaaaggacatttttcctttctaggactagatagctaatttttattggccttaattgtttgcagattcaagattatgattgcaatttttctaaaatgaatccattatccaagcatctcaaacatcttttttttttctgttaatcgttattcaacacaatgttttttaatctatcgttgcactagttgtaaaaacgctattttcttttaaatctaatttaacattaaattaaaaaaataataatgtaaatgtcaaaccttttgtatatatttttttttttgtatgaataaatgtcaaactttttcttcacgtttacgttaaaagtagtttacaaaaagctaaagagtattacaattttaaagatattttcttttgaacatctcactttgcttgttgtttgcatccagatggtgacgcggcattagattaaactatgcctatatggcatggtttatgaattttgtgagaggttacttgtcggtacatcctgcatgttgctgattttagtaaactaggatagtgatattttgaatcgttgtttattgcctagacgtcttttacgagtgtttagcgatccattaagttttctttgtcattttaggtattacaaactcaaaaggatgattttttttacatgtactcatctaataggattaatgattttataatacacctttaataaaacaaaaacacaattcctggtcgctattaaattctcaccaacaaaaatataaatacacaatcaaccgcaaccaacgaactttctaaatgttaaagatttaacaattacaatcagaagaatggttaaaagagagaagcagaacttaatggattaatcacaaggaacagatgaatcaataacccttttgtaactaaacaaataacctattgattacttatcagatttcttgccaagtttcatccatttgaatccaagtatggccttcccgataccgcttttgcttccatcttccttcttcttcttcttcttcttcttcttatcgtcttcgttacttgaatttggaggaggatcagagttgtaatcccattgatcagcccatgatagtccagaatccatcttcttcgtctctctttaagattttgtggaatgagaaggtttagaaacaaatatgagggtgaaagaaagattttgttttacttattatagacagtattggtttgacacaatgtctataagtttcttggttgcttatttttggggtttatctgtttttagttgtgcctctttgccctttggttggacaaagaatcaacatctttcacctttgactgtgaaaacccttcaacaagaaaagaaccccttacctgaaacacttgaatttttttgagtaatcaaaaactatacgcttcaacggttcaacctaatttctcttttacattttattcaacattttcaaaggatagttgagtagattaattactgttgataaaaaacgacatacaattttttttgtcacgctttgaaattatattattacgcttgtttcgttttgtgacattgtactaccaacaataattgttttttatagtcaaccatatcattaatcggagcggtcccttgattcgttcgagcgaccctctaatcaattgggaatactgtgacaaataaccatgcatttatgcttcaacaattttagttttccttcataaatatcacgggatgcaagtgacgctaagcataaatagttcgtctgtttcattgactttgtaatagaagatgaaaaaagaaaatatatagatatttatcttccttttgatgtcatgacgtttcgtgattttgatttacagtgtcaaaaagagagattacgctagcgaaacgtcactacgaccaagatttagttggagtatttatactctgatcattctcaatttctcatcatcgacattacaaatatgcaaaattaacaaaaaataataatatatacaactcatcaccttatatatctaagagcgttttgtctaactaataatatgttagcatttttatgccactattagtaatttaataatatagttattgcttaaatatatagatttttaacatattttctcttagatatatatatatatatatatatatatatatatatatatatatatatatatcaagatataaataaattctactaaaagaaaaacaaaaaaacagctaattttttgtcggtcaactcaaaataatcattaaatgagaaagatatatttatctatcgaataaatattattttattttttaaaagcgaaacactcgttagatcaggtgaccatgaaaagaaaaattcagctctatccaaaaaagaaaataaatcatgcaaatacagggagaaaaaagtacgaaattacaaaaaaaagccatgtcaatgtaaagagaatcattgaatcaagaagaacgattgggggtaaattagtatttaaattggtctaagcatgaaacagcttccagccgatggtgccttatgcctcgggcaaaaaaaaagaccaaacacactaaacaaaactaccaaacaaactaacaaacattcccttcaaattcggaaaagtcagaatctcatcacctatttattacactctcataaacgctaacaaatcgttgaatagaataattaagcaggtaaaatcctaaaccgtcagagaatatctatcctcctcttaaatatcactcttatctttatcctcctaaaatcttcttaattgtatctaatctctttctcaaaaaccaaacactatctctcgattatatcacaaggagatatg

SEQ ID NO: 20459 - DNA, 3000 bp, Unknown; identical to SEQ ID NO: 16499
  misc_feature (1)..( 3000): 2750-1469P.txt file - cDNA_ID_1826133; gDNA_ID_1620740; Annot_ID_49587

SEQ ID NO: 20460 - DNA, 3000 bp, Unknown
  misc_feature (1)..( 3000): 2750-1469P.txt file - cDNA_ID_1826136; gDNA_ID_1620740; Annot_ID_49586
aataccatgaatcaacaatcttagcaacctttataacaccatgaatttaacattatcatcgtagtcaataataaacgtttttttctttttatacattaaaaaaaaaaaaatacaatcgtttaattaatcaacgaaacgactgtgttttagtttccgtctaaaatttaacaccgtttatttgcaacatttgatagattatgcatttaatttgttcaaattttcaagatgaaatgtcaatacttttgagtttatttttttatttatttattttttattaatttttttatacatttttattaattttgattatggacaaactagatttttgtaaaattaacattgcaatcatgaaagtgatattttcaaaacaaaagtacattagtctaaaatgatactgaaatatgaaaaggataaaatatgcactactaatttagtatagaatcgataatgaagagagaatcttcttccctattccctaattgtgttcataattagcataatataataaggaaataatgttggctctgacaggtcacagatattgaagacttgaacaaaaaaaatactttatgaaagaagttgattaaagaaaccaatttggtaacggagacctgccaacagaaagcatataatgttttatagataaggacaaaagctatttctctctacaaacattataacaacaacactcatcatcatcatccaatttctcatcattatgatctttgaaacagaacaccaaaattaaaaaagtttgcaagaacaaaaaaaaaaaaagagataagattcttctctctgtatttttgaaaaaaaatatatataaatttttttcttggctttcacgaagtctctttctctggctgcaaaaatatcatcaatagcgaaaagtcgcttcttttttcttcttccaaaatctttaattttgtgaaaccgaagagataagacgtggagaaaagcagacgtctctgttgtttgtttttgattcatcgggttctaaggatttgtctgtttccaagacacaaactttggattctcttctcttcctgttcgtcttctcttgtcttgatccttttgttatcatcatcatctcttcatcgagagaagagagacgagattagggatttaagttaaggaggatgtattatcagttgaccaagtcttcttacagagactctttgaagattctggaggctgatattgagcacgccaatggactgtgagtcatcctctgattctttctgggttctttgatttttactgggtttagggtctttagtatcgattgttatagttggcttcgatgatttagggtttagggccccacaattttacattttcggtcgttatcacgaacttagattattaaaaatcgaaactttgcagaaatggtcaaaaaattgctaaattttgtggcatgcgtggtgtggtcttgatgcatatgttgtctgaagaaatgggttaaatgtgattagaaggatggtaactgaatagtctcacaatttgtatatctgtggtgtggtattgatgcatatgttgtctgtggaaatggtttatgtgattcgaaggatatagtaactgcttagtctcagaattggtatctgtgtggtttgttcttcaggcatatgttgtctgaagggatgggttatgttagaaggattagtgtaatgactgattactctcaaatttgattcagggctgctgagattccaatgggaaagagcggtgtgcgacttcagatgaaattggtgtgcagcaatttggctccattcttcatattcctgctacaatggatggatttctcatgtctgcttccaagatattttgatttcttccacatactcatatacaaggttgttaccgcatacatagatatcgagttgtgtgtgtgtgtgtgtgaaatggtagattccctgatagtttctctcctttcctcttggcttgtttgttttataggtgtcttctttgtcttgtacaggtacgtgctgatgggcggtggaatcgatctaggtacggaaggaaagctacgattagggagttttacggtaagactaagctcttaattgtgattgtgtttcttctactgtgggcttaatcttataactatggctctggctaaatgcaggtgttatattaccatcacttgagcgacttcatatcaactttgctgacttaccggacgaaagcttgtggtatccgaatccaaaagccatcaccaagaagcagtatgacattgaaggtagcagatacatgaatagcattgacttggaaagagaagacgaatgcgggatttgcttagagccttgcaccaaaatggtgttgccaaactgttgtcatgccatgtgcatcaaatgttaccgtaactggaacacaaagtcggagtcatgcccgttttgtcgtggcagcatcaagagagtgaactcagaggatctgtgggtgctaacttgcgatgaagatgtggtggatccagagacggtcaccaaagaggatcttcttcggttctacctccacatcaatagccttcctaaggattatccagaagcggccttcttagtctacaacgagtacttgatatgattttatcccgaaacataaatacgggtgtacagagggagagagtgatcccagacctttgattaagtgtacataagaatctggtgatccattaatgttccttcgttttagattatgatttatgaagattgtcataatcttaatgtgtaccccttttattatcaaagatcaaatgagaaagatgatcttcatgtcttcttgccaacataagcatgtttgaagatgagatttaaaaactgttataagtaaaatcaattcctagagatgttcaatccggataaaccaatgcaaaccgaatcgaaccgaaccaaaccaattgattgtgcaattgtgctaactgtttcaatttataaatcctcaagtttctctctctctctcgcagaacagagagtggtgaaatcaagtgaagaacactaaggttcaactatg

SEQ ID NO: 20461 - DNA, 3000 bp, Unknown
  misc_feature (1)..( 3000): 2750-1469P.txt file - cDNA_ID_1826139; gDNA_ID_1620740; Annot_ID_49585
atcgagttgtgtgtgtgtgtgtgtgaaatggtagattccctgatagtttctctcctttcctcttggcttgtttgttttataggtgtcttctttgtcttgtacaggtacgtgctgatgggcggtggaatcgatctaggtacggaaggaaagctacgattagggagttttacggtaagactaagctcttaattgtgattgtgtttcttctactgtgggcttaatcttataactatggctctggctaaatgcaggtgttatattaccatcacttgagcgacttcatatcaactttgctgacttaccggacgaaagcttgtggtatccgaatccaaaagccatcaccaagaagcagtatgacattgaaggtagcagatacatgaatagcattgacttggaaagagaagacgaatgcgggatttgcttagagccttgcaccaaaatggtgttgccaaactgttgtcatgccatgtgcatcaaatgttaccgtaactggaacacaaagtcggagtcatgcccgttttgtcgtggcagcatcaagagagtgaactcagaggatctgtgggtgctaacttgcgatgaagatgtggtggatccagagacggtcaccaaagaggatcttcttcggttctacctccacatcaatagccttcctaaggattatccagaagcggccttcttagtctacaacgagtacttgatatgattttatcccgaaacataaatacgggtgtacagagggagagagtgatcccagacctttgattaagtgtacataagaatctggtgatccattaatgttccttcgttttagattatgatttatgaagattgtcataatcttaatgtgtaccccttttattatcaaagatcaaatgagaaagatgatcttcatgtcttcttgccaacataagcatgtttgaagatgagatttaaaaactgttataagtaaaatcaattcctagagatgttcaatccggataaaccaatgcaaaccgaatcgaaccgaaccaaaccaattgattgtgcaattgtgctaactgtttcaatttataaatcctcaagtttctctctctctctcgcagaacagagagtggtgaaatcaagtgaagaacactaaggttcaactatggcgactcttcgtttcactctacttcttcttgtcttcgtcgtcgggatcttcttctccttctcctccgtttctcatgtatctccatctcatctcttctctaaaaacccaaactttttatattttgtgatccgaacacgatccgtttcttatttcttcgtggcgtctttggtaggtacgtgcaacaagtgaaatcaatctcaggatcgaaccattttcctcgccgttcgcgacggatcttgcaaagctgcaaactcaaattgggtacagtaacttaaagtcacttcttctctgttgattttactaatttgttcctaaatgtgtattggaggatcataattagggaaattaaggccatttctataagattagatactctcttgatgtgatgattaagttgaatcactgatttggttaaattctatactcttaaagttgtgacctttcctttttttttgtttggtgtagctacaagtttaacaacatcaaccttcttcgccgtgcaatgactcatgcttctttttctcaagagaacaacaaagccttgagtatctttggaacccatatcattgaaaccgcggtctctcttcagtttctcgctaaagatatcgatatttcctcgaaagcactgggccgtttgatatcagaggtttcaaatgtggagtcctcatgtgctcttgacggagaccggttgggtttggggaagataatcagagtttctactaagacagatgcatcgaactcggccattctttgtactggctttagggcaatctttggagctatagctattgatgctggaacggttgatgaagccatcaaggttttctggaaggtacatggagctcgagctggaagactagtctctatgttgtaaattagagctttattaagtcattaaagtcatgttttttcggatgccaagttctaagagactcttctccaatgcttagaattttatggttgatgttaactattagctgctgttatgagggtgtaagtgatcatactatagtgttgactccaaaactatctatttttgttgcagtacctgcagtgacttaatgactgaaaacgttaaaatgacaacaaatcagtcaattgcaaagaattatggtggtatctccatagaaaatgtgaaagtggtccaaaatgtgagagatgtgcatgcagacttgtggatccaacagttgtgaaagatgttatgtaatcagaatgtgcaaatgatgcaatagcgacacattagtaattcgaactgttacatgtgttgcagtaagcaagtcataggaaatagggatcccatcatcatttacttgttattatgttgaatttaattgatatattttgtgaatataggattacatatgtatttaatgcgatattttgttaagaagattttatgagagaatctgtaattatattctaatttttgtcttacatttgcaatatatacgtttgactaaaattaagtgatccttaaattgcacatattaccatataaaagtcacgtgaacagaagcaaacgtttcttattggacgaaacacatcacccacttcaatggcacgacacaaccaaaacatatgtccaaaaaaaataaacgattttgggagaaaacaaaacgcaccgcgtcggtcgtgctgcaacgctttcttcttcttcttcttacctcgctaatttattactcacggatctctctgacttgagccgtttcacacacttcctttgtttgctccatttctcgactctctctagaggtcccgtctttgattaccgatattggctaatctctctctctctttaatccttcttcggtttccgaattcgtgatagatctattgggggaaaaaagggttgggatcgtatttagataatg

SEQ ID NO: 20462 - DNA, 3000 bp, Unknown
  misc_feature (1)..( 3000): 2750-1469P.txt file - cDNA_ID_1826158; gDNA_ID_1620740; Annot_ID_49577
tttattacccttgccatcttaaatctacatttgcaactcacccaaaagctttatcctttgtgttttttccactgtatactgaaaacaaatctgaggtgacgaagatgaacgtgttgatttctgcggtggtatgggtatacactcacttaaggttatcagacgtagctttagccctagtagggctttttcttcttagttacttgcgtgagaagttagtgagcaaaggtgggccagtgatgtggccagtgttgggaatcataccgatgttggcgctaaacaaacacgatctgtttacttggtgcaccagatgcgtggtcagatctggtgggacgtttcattaccgaggaatttggttcggtggggcttacggaatcatgaccgcagatcctgcaaacgtcgagcacattctcaaaaccaatttcaagaactatccaaagggtgcgttttatagagagaggtttcgtgatcttcttgaagatgggatctttaacgctgatgatgagctttggaaagaagagagacgcgtggctaaaaccgagatgcattcttctcgtttcttggagcacacgtttactacgatgagagatctggtggaccagaagctggtgccgctgatggagaacttgtctacttctaagagagtctttgatctacaagatttgctcctgcgttttacctttgataacatatgtatatcggcctttggtgtttacccaggatcgttagagacaggtttaccggagattcctttcgctaaggcttttgaggacgccacggagtatacacttgcaaggtttctgatacctccttttgtgtggaagccaatgaggtttctagggattgggtatgaaagaaagctgaataatgcagttagaatagttcacgcgtttgcgaataagacagtgagagagaggaggaacaagatgaggaaactcgggaacttgaacgattacgctgatctcttgtcacgccttatgcagagagagtacgagaaagaagaagataccactagaggaaactacttttctgacaagtacttcagagagttctgcacaagtttcataatcgcgggtcgagacactacatcagtggccctcgtgtggttcttctggctagttcagaaacatcctgaagtcgagaagagaatcctaagagaaatcagagagattaaaaggaaacttacaacacaagaaactgaagatcagtttgaggctgaagatttcagggaaatggtgtatctgcaagctgctttaacagagtcactgaggctatacccttccgtgccaatggagatgaaacaagctttagaagacgatgtgttacccgatgggacaagggtgaagaaaggcgctaggattcactactcagtctactctatggggagaatagaatcaatttggggaaaagactgggaagagttcaaaccagagagatggatcaaagaaggaagaattgtgagcgaagatcagttcaagtatgtagtgttcaacggaggtccaaggctgtgtgttgggaagaagtttgcgtatacacaaatgaaaatggtggctgcagcgatcttgatgaggtattcagtaaaagtcgtccaaggacaagagattgttcccaaactcaccaccacattgtacatgaagaacggtatgaatgttatgctccagcctcgtgactggtaaggtagttcggtttaaaaacaatatagtactaataaataattgatgttgaacgatattctaatcgttttagtatctaaatttgtttgtggaatatggttaactaaaaagactattttaactaattcggtttggattttatgtgcaccaaccctagtttacttcaagcaatggacatatgagagtcacgaattgtatgtacatgaaatgtctatttaaaaagctctaaatcttataataatgaaagctgatcacatgaacatgatactgccctccactttcttccacaatcgtcatggccctttcgataatgggtgcaaaagaagtcggccctgtgacagaagtaaccaaagatcaggtaacagaacaaacaaacacagacacagcagaaaaagaaaacagagattcttaatctcaacctacaagacgcagctgaggaacaatctctctgtaccgtgaaacgacatcttcaaacccacttaatctcaatcaaacagagattgtttacagaatatatcatccgggtaaaaactgaagggattctgatcatgtgttgtagctgcaagaatcaaacatacaaacccataaaaacaattaaatgaaacatttctcttaacacaagaaagactaacaagtctatgttctgcagtcattaccatctccaaatccataacatggaatcaaattatcttcatcgaaagcatataaagtctttccaatgacagatatcgcttgctggtacgggtttggacttgttccaatgtaatgcaagctttgcctgttgaatgatctcgctcctaaattcaaaaccaaacccaccaaaacattactttaaaaaccttccaacttcaaacacaattgcttaacatacataaataaaacttctaaaacttttgatttaattgccacagttgccacagttgggcctaacaaataaaacgggcttaacttttgccacagttgggcctaacaaataaacagttagcctaccaaagcccaaatattttaattgaaataaattaattaagagagacatagtaaactaacccgacgagattgctttcttctgtcttcttcgccgtagaatttgaagttcctccgtcgtagaagatcgtctcttgtttcacctactccgatatagcccctctctgaattctccatcctccgagcagagaaggctgttggtagaaagttatattctcaaattttctaattttgcctcctccttggcgaagcaattgcgtcaattccttgcacgccactattacgactacgaaaatctagatcggagagaagactaaattatcttcactgatcgcacggtgagatg

SEQ ID NO: 20463 - DNA, 3003 bp, Unknown
  misc_feature (1)..( 3003): 2750-1469P.txt file - cDNA_ID_1826185; gDNA_ID_1620741; Annot_ID_49623
gaacaacacaatttagcaacggttcaaaacagccgaacttggttatatagttataagctaagaaagttttgtcgtcttagccctaagggttaccttgatgaaaacagtaagggtggggtgaataacttggtccagctattatttaggaaccggacacctaaataggatgaattatgatgtgttttagtctcttttccagttatccacattacgtatagcgccacattacgtattgttatggtcccaagtaaaatgtagcctttgtaaaatttgtcatggctttgtaagtgctacatgctatcagagccgaggaaaaacaaatactaaaagttaagctaatatataacatgctacgtgattcactaaaaataagtacaactttacgctaacaattctcataaacaaaattacatatgatgttaagtgattcgtccaagtgttagtgagaacttttaaccctaaatatatggattattcctgtcaacattaaattttgtgtcaacaaattgcccagatgataaatgatgtgatacgctctaattgtgttatagtataatatttatcaaaattgtaaatcatatacaattaataactattttatatatttagctagttaaagtattaggtatataccactaaaggtggctggattgatgaggccaaactaaattgtgaccgtccggctaactaagtttgatgtaacaattgaataatcatctcaccaaatccctaaactcttgtcaccagctctagtattttgcttacatttctatgcgatattttctaataattagattaagaacagaacaatgattagttgattataagtctatgaccaaataaaatgatgggcaaatgttcgtttttttttctttgtttctagccaacaatgatggcccaatgttcagaaaacttaacttcaaaatagtatttattatttaaatatgtaatcattatttttctaataattatcttacttttgtttagctgtctttgttaattaaagtaatgttgggtgcactagagactagaggccccaattcaactcatactcgatttatacctttctccaatttctccaccttgaactaagtaactaacgcctaacggtagattagtgaaatatatcaatagaagttttaaatagaagaatagaatacccaatggtctctgtttcaatcttgtccttattttctgagtccatatgtaaacaacgattacttttaagttctaaataaagttataagttgaaaaaaaaaaaagaatagaatccatacagtttcatgaatattacaacaccatccttttttttgtcaagcacaacaccatccttttaacatctatttttttatttgtatttgtatatccacatgtttaaatagatatatcgattatcatacaaaaatataacaaaagtgattttgaaatatagaaccgttcaatttatttgaaactagcagttgaacacgtacgaagttatacgttttgggggaagtcgggcaagatcttaagttggagcaccaattgcatggttaaataacagttttcttataatataagcacagtcccaatgtacgataaacacataacgatacttaaaacattggttccgtccaaaattcttgtattattatttttcaaattgttgatatgtatccatgtttccttgtgatgttttcgattatatattcactgctttatgttaataacaaaacagtagtatgtacatataaatacattttgcgggtttactgatttttatacaaaattttgtaaagtcatgaaacctgttatagtccatgacttaggcatgaatccaaagttcaaccattatcaaatagtattcattttattattacgctacacagtatcaataaaatagcaactcgaatacatatatatgcgtaaagatgctatatataaactccaacaacccatgcataacattgcaccttagtttcataaatacgtacgcaattccccatacaatcaaacatattttttccatcacgcaattaacagttcccattatatactatgtcggtcattcatattttaaggaaaaatgggaatataaaccaaatgatataagtcatatattgtccactataaatcgaaagatccgtctattgtggataaactttaatatagctcgtatgatatatattaaaataatatcagaaaatgagatctaaaaccagaaagagtgtgtgattgatccaataatttgttctaaaggattacaaactcatcatatggatcaaaacgaggaatcaaattccattatctaccaaaatcgttgtagttttttttttttgattactataaacattttatatagaaaaattattcgatttttcaccggtttcggcttagtatatgagattaggactaagatctagtttggttatgttaaaaagtcttgttaatagaaatatgtattatcacatatctttttcaaaatgagcatttataatttctataaaaacatatacattttctaaaatataccaatacacaatggcatttgtatacaaatacaccaaatttggtataaagtgtcgtatttcaagacactcaaaatatgccttttttgtaaatatttctcagaattgtgtatattttctatcacataaaagtagatataagatgaatagttttggtatttaatacaattagaaaaggaaactcgaaacccgcttaacaagccagaagggctaggcaacaaactgtcggaaagctctgacagaatgcatgagactaacaaaaggggtgaaacagtcatttcataactccagttgttacacgttggttgattgattatttgttgattcttgtcttcttcgccactgtttgctccgctcgtgttaaaaccttatattataaaatcccttccaaaaaacagaaccaacttagccaaacgtcacaaatccaaaactcaaaaccgaatcgtttttagcctccaagagagagagagagagagagatctgcatatagagaatg

SEQ ID NO: 20464 - DNA, 3003 bp, Unknown
  misc_feature (1)..( 3003): 2750-1469P.txt file - cDNA_ID_1826205; gDNA_ID_1620741; Annot_ID_49618
gagaagaaagaactcatttccccgctgagaaagttgatgaagacaagtagaagaaccatttgtggtgtcctttatctttatctaagctattgagagcatagagcagatgtggctgaattgacgagaacaagaacgggaacgatctgatgaaatatggacttcggatgatttctgaccataacttggacacaaggagaaacctcgatacatctttcaaaggcaatctcttcacgatctcgatcactatgtctatacgaaccgaatccgaatcgttcctgatctctgtctttttagtgcgacgtctcgtcattctcatgacgtttcttgtttctcaaagcataaaccctaactttttccccacggtctcctctcttattaatgtataggagacatggacgatttggactaagaaggcccaaagagacaggatttggactttaggacaatcttctagtactaaataatcttgtgaacaaaaatattggttcaagatggtaaataaataaataaatccatattttcatgaaaaaaagtgttaccatctctgtttcattctgcatcaagacaaactctacgatccaatatatgcacataagatcaaactcccactacgatatttctcctaatccgtagaagtaagaaaaaaattaagagtaacgcaacatgaacattggttagaacatctcttgtacaccgtagatgtcacttgttttgctctttgggggaggcagtttttctaacacccagctcggagagtcacttagccagagacctacaccggtttctttgtgcttaaaatccggcgattttggggttctctacatggattagaactataaatgattagtatgttacctatatgtgaaaacgattggttaaatgtaacggaattttcaccttgtccactctattgtcccaccacttattcatgttatctaccaagtccttccatgattcctctccggcttcacatgttgaaagaagcaagattgttaaagaaaattcgaattgcatcttccgagtcagagacgaaaagattagttgtcattccaattcatagaatactgcagattcattggtaagaaaactgtttccttaccctttggttgttttgcgtattttggaatatcaaacttcacgtctttgagctcggacaatatctctgtaggagcattgttaagccaaagcgcttgactcccgtctttcttcttgaaatcagggtgtttaggattaacctgtagacagagatgtcaagaaagaaaaagaaaggagaaccttagccaaatgtatcacagaattgtaacaaatagaaccactaagacaagtttcattaccgatccattctgtttcatttcacggtaatcacaccattcattcggtttatcaacaagatcaaaccaaagattagttccaaattctcttcctctttgaacgctagctaagaacaagaagatgaatgttcatggttataatcaattttaaacagccaaaccagtaaggatattacagtaaagaaaaaaaagaaacgggaatgatgcgctagacgcttaccagaatgctttagcacaccttcattttgatccaacgttggcaaaacctttggcatggctttagaaccttcaatgtagtggagatcacgaaccattacttgatgtgaaaagctaccatgaaagcttttaaacaactgaacatgtgcttggtcagaatttgctccagattgaatcacatctcctaaaatctgtccagtaatatgaacccgatcgtttttcttcaaataagagttagccgtatgagctaaatccccttcaaacagtaccggaatcctgatgttcacaaaatcaataaatttcttatcaataacaatatagtaatgcatcatcctaacaaacatcatttcaatttcaactcaataacagcccaaaatctagcaaaatggaccataggtactcaacaaaattcagaatcaaaaccataatttcagagttcatggcttaaagtcttaaactttacacgaaccaaatccacaggtaatcaacaaaattcagaaccaaaacccataaattcacatttcatggcttaaagtcttaaactttataagaaccaacctacaagacaatcaacaaaactcagaatcaaaacccaaaacttcacaaatcatggcttaaagacttgactttagccaagtacagagttacaaaacgacaatagaccaacatgcaaaactctaaaacccaaaaaagcaacaaactttcaaaagactaaccagaagttactagatgaatcagactcagacttggaatcagaagaaggttcatgagaaatgactgtgcctgcccagaattttccatcgagtgtagagtcgaactgaactggttggtgaacgtaaccaattaaatctatagagttcgcgattttgggttggtacggtacctccatcggtctcggccactcctccgacgatttctcagctctgtttcctcctcctcctccgcgagtacggctactactttccgtagaagaagttgaaagaaattgctgagaagaaagaacccatgattttctagcagttgaatttaacgaaggtcttatcgatttcgaaattgatcttccaagaaactgcatttcgtgaagattcaaacttttagccttttagggtttatggggtttgacgacaaaaaaagaaagactacgcctttttagattctcgggttcgtcaataaacggtgccgtttcttcacaaagtcgtttcgcggcaaaaaactaaacgatgtcgtttcgcgtacaatagtgcccttacgaaacgatgctgtttttgacggggctgatttagaaaacgtagcttttgtgagggttattttgtaatttatttttgtttagtttgtcacttcgccgtgcgcggcgggagagaacgctggcggaaaaaagaaatcggaaaactggagaaaccctaaatcgacgaaaaggagagacctttgaatcgaagcttggtgtgtttatactatg

SEQ ID NO: 20465 - DNA, 3000 bp, Unknown
  misc_feature (1)..( 3000): 2750-1469P.txt file - cDNA_ID_1826207; gDNA_ID_1620741; Annot_ID_49617
gtgtttgtaaaaccgtttattatattttatttgttgcataaaattataatttggtgtataagcacttaacttaacccttggtaacccacttccaaattagacttccacgactttgttttcacgaaatatatttttgcttatatattaaaaaattgtttagacgaaaatgcttatcgatattgttcatcacgttttgtcatgtttggtgatgttcatgttctcggttatattaatgtgtaaccgaaaacttacaaaagttaatgaaaatttacaattgttgtgaattacgccaaagaattttgaaaatttggagaaatcattacttgtaagtctacataattgtctttaattaacaagaagaaaagtatacaatttgttttgaaatttcttaaaacctttttgccaaatttgtatgagaaaattacaataataagtcatgacttatatcgaatttgtagtgttttttttttgtttctcgtttgtatcgggtacgatccagtggtagtgttacgatacaaagagaagaaggacaaagataaaatcataaaaggatagagataagagaagttgttgtgtatatacataaaatgttctcattcattaatgattgttaagtgtctgtatggagctgtaaaaacagattgtactataccggtcaaatccggtcctactcactatcatcatctaactccctcctttgtatttgtttcttcttctcttatcactgatttttaccactgtcctgtccttttccggtttaatctcggtttggtttagccaaatttgaagtcccaactaaaattcttgttctggtttttattgtctttatggtctagagaaatcataagaatcttcttaagactagcccgattctgtttcatccatccatattgggccaagaaacatgtccaaatcacattctttcacaaaaaaaaaaactatgagtaacatttagaatgaagagtgaaaacaaacaaattgtacaccattttattttaactcagttttattatgctctaaaccggaaaaagaactcttaatagaaaccaaacttagcacccttatgaatttgcaggaacacgagaatcaaagaatctaacttaaaagcaaaagcacaagataatcacaactcaaagcaatgtagtgtacagaagtcaagagtctctctcacttgtagagttgttccatgacactcttcagcctcaccacatcaacgcctacaatctctgctttcttcacgccacctttgaagaattgcagtgttggctgcattcatcaaattatcataatgctccattagatggatctcaaacattgataatattagagttcatatagatgcaaagctagctcgtgcttgatcctaaaatgtaaagtattttttgaaaggaacagaggatgttaccacagcagatacatttaacttcccaatagcatttgatagaccgccctgcaaatatgtaataagagatatctttgtcaacggagcttacaatgatactcataacaagacagcttatttgtgtgtggctcaaccacaaaatttctctactaagtgacttatgtcgcttttgagaatgtgatatcagtaaccagttacaggaagcataatgtagcaacatatctcagacttaacattagttgagttctccatttggttcgacatatcgactaataaaaggcatttgatagcagatactctaaaatcttctaaccacagaacagaacaatttacaatgatggcttcggtcgcatgatgacacttgtataaacctataaaagtcatgctaatgatgcaaacacacctcgtcaatgtcgaccttatacgttgttacatcaggatatttattactgagctccaatatcacaggagagataagcctgcctagagccaaaccatacaaaaattaataacgccacacgtagaaaagatttactatccagaagctttcatggaactaaaacttacaaggtccacaccatgcggcagtgaaatagaaaaccgatggcaaagatccatctgaaaaaaatgaataacatcaagagaagataaagcagagctgaatcatactaagcaactcatataattctgaagtagttaacaaaagaaaccaatgactgtttgtttatttacctcgagctttactcaatgcactgttgaactctgcttccgatttcaacactacaaagctggatcgatctaaatttcaaattacagagatcagcaaaactcctcaaacacaaggtaccattgtaccaccatcaagcttaaagctcatatttttcgattcaattcgtttctcaacaaataaaaaaaatcatctagacaatacccttgaaccaattcatgtactatgcaagaacaattagaattaacacacaaccaaattaagcaatttacctccttctgcaaaacagaagcttcttcgattaagaagagaagtgtttaagaagttgaattcgtttgaaacgtaaacagtagaagcagctaagaaagagtttctcccaatctgcaaaaacaacgagtttgggaatagaatcagagatggttcggaattgggggtctaagatcagagaaagatgaaaaacctgatgaaaattagaccattgactcttcatagtataaacacaccaagcttcgattcaaaggtctctccttttcgtcgatttagggtttctccagttttccgatttcttttttccgccagcgttctctcccgccgcgcacggcgaagtgacaaactaaacaaaaataaattacaaaataaccctcacaaaagctacgttttctaaatcagccccgtcaaaaacagcatcgtttcgtaagggcactattgtacgcgaaacgacatcgtttagttttttgccgcgaaacgactttgtgaagaaacggcaccgtttattgacgaacccgagaatctaaaaaggcgtagtctttctttttttgtcgtcaaaccccataaaccctaaaaggctaaaagtttgaatcttcacgaaatg

SEQ ID NO: 20466 - DNA, 3000 bp, Unknown
  misc_feature (1)..( 3000): 2750-1469P.txt file - cDNA_ID_1826234; gDNA_ID_1620741; Annot_ID_49610
ttgactctagcgccttagactagttacaatggtttgttgtaaaccattttacaactggtgaaaaaacaaattccactataatggtattttgtaattgaaaagtagctgatgtggcaaatttagtgttgataaattttaacatccgtgaaagtagaagggagaagataagtgtgacaagtgttatattttgattggttgctttgatttctaatatttttgtttcatcttaattatataacttcaattatttcataatatttatatatatttatatatatataatttatataaaattttataaattttcattctctataaacagagactattttcatttgatttaaatacagaaaaaaccatttttagacccaaaaataatgtataggttaaaatatgaaataaaaatggtggggtaaggtgttgtaattttattaaacaaaactattgtaagattaaaaattatgtaggtgttgaataatgatgtggaagagagagaaaataatgtggagtgttaaaagtgaaaaagtgggtgttataaataggtaatcattgtagatagtcttagactactcggccatcctaacgaggaccagaagtggaataatatgattatgtaacttactaaacattttggaaaaatatacaattaagcaagagttttgggttctttacgaaatattacacaagaaagtaccttttcttataaacacaagagagtaaccattagctaaaatgtacaattaaacaaacattgcacaagttgtagaaaaatgtaaaagcttcggatttaagcacagagaaacggcaaaacaagtgagagccaattttgcttcaataggagaaacgtagtagtggcagttttattttaaatgtataaattgaaacaaagtgtttttctcttgaagctgaacatagatggtttcacttttgtctcatgtaaatatggtcatatggattttgctttatccacaaggtatcacactttgaaataactaaaataaaaaatatgaatcaagaaaatcaataagccgctacatgtcacttccaaaattatgaaatatgagattcgaatctaagaggagtcttaaactgttaaacagagacgtgtttacagtcaagagaaatttataacatgggacaaattttattttattttatttaatagcgttacaaatttacaatgatcatattacataaggaggatacaaaagtagaagaagagctagtttaaaagtcccaagagtccaacactgattcatgactcatcgtctcttctatttctgcgcttccactatacaaattagaaccatcgattattttaacctttagtttttccaaataatctcttgagtttaatttaaaaaataatattttcaggactatatgtatacctaaacagtgacaatgatgtttctaagatttaaaacactttattaccgaaatatatctcaaaattttactatttcaaaacgttatgttgctattttatttttcaccacattttcgaaacattagcataccgttcaatcatttgaacattccattgttaatctattattattattacactagtcaaacttacttcaaatttatttatacaaaggggaatatattttatatagttagtaaaaatctcaataatcattaaaatagattttctttgacatatttccaaaattgttagattgtttgtttgtttttaccttctgaaaaatggttacctaatgtacgacgaggtttgccgggacatcgacggtaacaattctgaaggcacgtgatcggaattcttcctgtggtggcacaacctagaatgcaatcttcatggcattgagctttcgtctctccattgacattttccattgctataaccattgtcaccacaaacaccattataatcattgaattccatttagcacccatatctttaacttttttgttgttgcaagtgtttcatgtacttaagaaataatgaatagctatcctctatttataatcttttctaatagttatctaattcttagctcttatcgtctcttcttcttatttgttataggaattgctcttctttttttttcctggtcaaagtttctttgtaatagagactagttacttttttggttaatcttcttctgtttttttctctatttataatcttttctaatagttatgtaattcttagctcttatagtctcttcttcttatctgttacatggattccttttttctggtcaaagtttctttgtaagagagattacttactttgttggttaatcttcttctgttttctcacagtttattttaagttaatttgagattaagttaatttgagatttcattggacaaagaaaattaactcttgaaagaataaaaaattatgtcagaagtggggtttgaacccacaccctcttacgaggaccaaaacttgagtctaaggccttagagcatccacattggtcacttatatgtagatgtctttaaatataaaactataaataataataataaaaaaattatgaatgtttttagtttgagatttgtgtttctgtagagacactttaaacacaacaaaagtgaaatgtctttaattttattatttatttatactaaaaacatctataaaaagttgtctaatgaggttgctcttagaccacttgaccatcctaacggataacataaccaatactaatagtatcattatataacttactaagcattttggaaaaatatataattaaacaagagttatgggttctttacgaaatattacacaagaaagtaccttttcttataaatacaagatagtaaccattagataaagtaaaaataaataaaaaacagagaatctgaagatcgtagaagaaatcgagaaaacgctttgtaccaattagaaaccctagcgagcggaggaaggagacaaagaacgagacttttgagagattggagatttcaattttgagatcaaatcttgaaatcaacaaataggagaaagatttagtgatg

SEQ ID NO: 20467 - DNA, 3003 bp, Unknown
  misc_feature (1)..( 3003): 2750-1469P.txt file - cDNA_ID_1826263; gDNA_ID_1620741; Annot_ID_49601
atttagtttgttgaagaacttaaaagctttctctttttaagttcattgagattgagacaagtctttctatttgatttgttccatatttctgtgtagatgtagaaagttctgttatttacatatgtgacagaaatggtaaatatttggttttgattcattgttttgttttgcattagagtgttactttgcattaaaggtatggaacggtcaacaatccggtgtagcagcagttttagtagctgataacgtcgatgagccattgataacaatggattcacctgaggaatccaaagaagctgatgactttatagagaaactcaacattccatcggctttaatagacttttctttcgccaatactctcaagcaagctcttaagaaaggtgaggaagtagtcctgaagatagactggagtgagtcattacctcatccggatgagagagttgagtatgagctatggactaacacgaacgatgagtgtggtgcacggtgtgatgagcagatgaatttcgtaaaaaacttcaaaggacatgcgcagattcttgaaaaaggaggatactctttgttcacacctcattacattacatggttttgtcctaaagattatgtttctagcaatcaatgtaagtctcagtgtataaaccaagggaggtattgtgctcctgaccctgaacaagactttggtgatggatacgatggtaaagacattgtcttcgagaacttgagacagttgtgtgttcataaagtagctaaagagaataaccggtcttgggtttggtgggactatgtgactgattttcacattagatgttcaatgaaggagaagaagtatagcaaagaatgtgcagagagagttgttgaatctctaggtaagggacatcacaataatttttagtaccctttcttcacattcagcgtcttgagttttctcttattctcaggtttgccacttgacaagatcaagaaatgtattggtgatcctgatgctaatgtggagaatgaagttttgaaagctgagcaagcacttcaggtcttggctctcttcttaaatgcgtctatattttaccgtctttttaaaccgattcactgagattttttttctttgttacttataggtaggacaaggtgaccgcggagatgtcacaatcttgccaacattgatcgtcaacaatgctcaataccgcggtttgtttcattccttctcattgtaaatcagttaccgaaaagttaggattcttaagttctttacctgattttgttgctcaggtaaacttgagagaaatgcagtacttaaggctatatgttctggattcaaggaaagaaccgaacccgggatctgtctaagtggaggttatagaaattcccttgtaagcttatattcatgtgtggtaatagaatgtactaaagaagtcttgttttgtttacactgttgaaacagatattgaaacaaatgaatgtctcgaagcaaatggagggtgttgggaggacaagaagtccaatgtaacagcttgcaaggtacttagaaccgatgaacttaagggactacatttttatagatatttggttagttttatacctaaaaatggattctatcaggacacatttagaggaagagtctgtgaatgccctgttgtgaatggtgtacagtataaaggagatggatatacatcatgtgaacgtacgttcttcaacttctacattgatatcttgtagaaacacttcattataaacattttgtgttctgacttgaatgttataacagcttatggccctgcaagatgctcgattaaccaaggaggttgctggtctgaaaccaaaaagggcttaactttctcggcttgctcggttagttactctactgtgttatggccttttcagtaataatgccataatgtttgaaacttacaaattttctccaattgttgagttcagaacttggagacatcgggatgtcgctgccctccagggtttaaaggagatggtcttaaatgtgaaggtgaaaacttttattttctctagaattcaaaatctctcatcatgttttcttaaactgattcatctacgacatatagacattgatgagtgtaaggagcaatcagcttgtcaatgtgatggatgcaactgtaagaacaaatggggaggctttgaatgcaaatgctctggaaatcgtctctacatgaaagaacaagacacttgtattggtcagtaaagatctaaaacttttcagattctttttgaaacaatccaagaatcatattctcatttctttgtttttcgtttctcgcagagagaagcggatcaagaatcggatggttccctacatttgtgattctagctgcagttgcaagcatatgtgtaggtggttacgtattctacaagtatcgtctcagggtatgtttctccaaacattttttttcttctctttacttaatcttcaaactcattcatcatcatgaatctattatctatctaatgatcattattttgtgtcaaaacgaaaatgcagtcttatatggattcagaaatcatggcgattatgtctcagtacatgccattagagagccaaaacacaaccgatccaatgactggtgaatctcaacaccaacagctgagattaacttctgcagcctaattttataaatcttgaaaagatgaaatttttcttaaagagagctaaagatgaaaaaatttctttgtttaatcttgaaaaatacttctttttgggtcatttttattgactcttttcattcttgtagataagatatatgcattaagatttaaaaaggaaattgtattgaaagtggtaaatcaaacagctctttggtcatctcatacagagaatgaattggttggggaaatgtaacagtaaggatatttttatcataaacaaagtttgaggctttaatagaaaaacataagaaatttggggacataaatgaaaatatactaattgtaagattaagttcttcgggagaagtcaacgttagagaaaaagaagagatg

SEQ ID NO: 20468 - DNA, 3003 bp, Unknown
  misc_feature (1)..( 3003): 2750-1469P.txt file - cDNA_ID_1826275; gDNA_ID_1620741; Annot_ID_49597
gttcaaaaagcgaatccaattcacggtggcgatcacgttccatttgcataagaaaatcggtaaacgcttgtcgtcctcgtatcttcggagagaaactaaccaccggaaaattacttttctccgatgacgacgaagtgcaataaggcctcggcgttctgataatctcgagtccaccgccaccgccgctgccattatctccagcggttcgtttcttgtcttcgttgctaagcctccgaattaggtcagcgactcgtccccatttactttctccggaatcagaaaccaaaccatgtgacctagattcaatctccaccgttcgatcagcaatttcagaatctccatcgattgatgaagattctgaaagaccggaatcttgaacactaactcctgaatcgctccgactactactactcgccgtagattgactgctactcggcgagtttccaccgttggatcggtttagcctcgcctcccatatctgaaccaaagaagaagccacaagattgtcgtttctcttcgattctaacggagattcaagaacacgattgttcttgttattgtgagtttcgatccaagaatcaactaaattctcatcggagacatgagatttcaaaacctctttcaccggagatttcagattcttttgaaaaacgccagcgttttggttacgatctcttaagattaaaccgaatctctgaggagaagacaccatttttttacgatctaagaatcgaacaaacgaacataaaatcaaataatcattagagtttttgaatcgatcgaaagaagttagaggacaactctgttttctctgtctctctacaagaagaagagaaaatggatttgtgttagtgaagagacagatttttctctctgtttttttttcctgttaaagaaacagaacaacaacaaacaaacggtggagatacgatgatgatgaagaagcaaaacagaaccaaacagtatttgtgcttatctatttagtaagaggacttataaatgttaagagtcctaaaatggctctgttttgtcccttaaactggggaacgtgtctgtaaaacaaggcaataaagaatgaggtgtaagaatacagagaaagaaaagccttatgtggccaaaagtgataaattgttatagaaaaataaaaaagctacttataattttggacaaaattgaatttgaaagatattgtataacacatgtcattatactggtaaaagcatttaattgtgtaatgcatgaaaaaattaacattggattgttatactaattaaagggtgattaaattatttaataattaaggctcctaaatatgctagagtcaaaaaggagccgttgaggaatttagccgttgtcgagtgggaaccatgcactttctggattttatgccacatcataaatcaaattgaagaactaaagataacaaacaattttaaattgtataactgacaggaacaaaaacttttaagcaaagtaaaaataatttaattagagaaaattagatgttcaacccaagtttcatgtagtgtgcgattttattgtagtgtggtcaataggcccaggcatagtggtcaatgtcgtgcttgggttagtcgaatagagagagaacttaggacgagttgtgatttgtgactcttataaaacgatttaagaaaaaatagtctctatacaaaataacgataattgaaaccaataataaggttcacaaccgatcattttcggatcccgatgagttaacgattagtcaacgatagagtaaaacgaccgattaatcgagacttagtgtctatgatattggcacatacgacatatatttcgtatatatatttcaggtaactgggtatcgtttatattagttgcggcatatgtgataatgtattcttccacacttcgtatagctagctgacaatcttttttcttaaagtttaagtattaggaagtattatccggtagataaagaagatggacgattgaaaaagcgattgatacgatttttcttctgtgatttttccgaccggccggcgttggttccgacttcgattgtactcttttctcctttataattctagcaaatattagtttacatacatatatttcagttattaacaatgagttctagagaatcaactgcttttggttggcctcttttcacactgttggcgattttcatgacccaaaaattgagttttctacaattatttgtaagaaatataaattataaaaactagaaaaatatatgaaaaagtttaaggttttgactagtgagaatttgttgtatagttcaaaaaaactcaaaatttgaacgtttgaaaacttgttgagatgcatcaattttcaataaacgtagcctatggtgaattgtttttttttttttgtcaacatgtctctaatggacctatttttccgtgctaaaaaatgtgcagaggtaatatcgctatttttgttagaggatctgagcaaattcattattaatgattgtgcaaaaaatttgttaatttcgatatatcacattttgctttacggattactcgaaaacatactttgatgtcatcatccagtgtatatatacgtatgttaattgtagacaacaaaataaaataataatagtctcacataaccgaccaaaaaacaaacaaaattaaatcaatggaagttgttgacaaataaattttacaattaatctaatccaaataagtcaaaaccctgatttcagtaatgtaaagatcattatatcattttttctcttgtaaaaaggttttttaaaattatactattaatatatatcatttgatcaaaaaaaaattatatatcataaacattatatacgacatgcaggcaagtcactcgaatattcaaatcttaaagttgtgcctcccacgtaaaagcatcacattagtttccaaacccaattgtatatataaattactacacaacacacctctcatcaaacaaattcatcaaagccaatcaaattgagagagatatcaagaaagcaaaataatg

SEQ ID NO: 20469 - DNA, 3000 bp, Unknown; identical to SEQ ID NO: 5137
  misc_feature (1)..( 3000): 2750-1469P.txt file - cDNA_ID_1826278; gDNA_ID_1620741; Annot_ID_49596

SEQ ID NO: 20470 - DNA, 3003 bp, Unknown
  misc_feature (1)..( 3003): 2750-1469P.txt file - cDNA_ID_1826297; gDNA_ID_1620742; Annot_ID_49642
gagtggaataagacaagtccagactttgcgcaacaaaatggtaagctttcttctttcctgtagcatggggaagcatatagttttaagtcaaattctcactgtaaaaacatttctctgtttctttcaggtggatgagaatttgaaggttgtaattttgcgtggttgccacagcttagaagccattcctgatttatcaaaccatgaagccctagagaagcttgttttcgagcaatgcacccttctggtgaaggttcctaaatcagttggtaatctgagaaaattgattcacctggacttcagaaggtgttcaaagctttctgaatttcttgtggatgtttctggacttaagcttcttgaaaaactattcctctctggctgttcagatctgagtgtgttaccagaaaacattggtgccatgacaagcttgaaagagcttcttcttgatggaactgcgataaagaacttaccagaatctataaatcgcctccaaaatcttgaaatccttagtctaagaggttgcaaaattcaagagctacctttgtgcataggaacattgaaatcgctggagaagctatatcttgatgatactgcgttgaaaaatcttccgagttctattggagatctaaaaaatctccaggacctccatttggtacgctgcacatccctttctaagattcctgacagtatcaatgagctcaaatctttgaagaaactattcatcaacggaagcgcggtggaggaattacctctaaaaccgagttcactgccaagcttgtatgacttctcagcaggagattgcaaatttctgaaacaggttccgagttcaattggtagattaaattctcttctccaacttcagttgagtagcaccccaattgaagctctaccagaagagattggtgccttgcattttatacgcgaacttgagttgagaaactgcaaatttctgaagtttctgcctaagtcaattggagatatggacacactctatagcttaaaccttgaaggctctaacattgaggaactgccggaagaatttggcaagctggaaaagctagttgaactgcgaatgagcaactgtaaaatgctcaagaggcttcctgaatcgtttggagacttgaaatctcttcaccgtctgtacatgaaggaaactttggtctcagagttgccagaaagtttcggaaacctctcaaatttaatggtactggaaatgctgaagaagcctctttttagaatttctgagagtaatgttccaggtacaagcgaagaacctcgttttgtagaagtaccaaactctttctcaaagctcttgaagcttgaggaactagatgcttgcagctggagaatatcgggtaaaatccctgatgatcttgagaagctttcgtgtttgatgaaactgaatctggggaataattattttcatagtcttccgtctagcctcgtaaagttatcaaatctccaagaactttcattacgtgactgccgagagctcaagcgtcttccccctcttccatgtaaactggagcagctaaacctagcaaactgtttctcattggagagtgtatccgacctttcagagttaacgatcttgacggatctcaatctcacaaactgtgcgaaagtggttgatattccaggcctagagcacttgacggctctgaaaagattatacatgaccggatgtaactccaactactcccttgcagtaaagaaaagactttccaaggtgattccaaaaactccacagaatctcatcatggcctatttaaaaaactttcttacaccacttttgatttgttactgcaggcttctttgaagatgatgcggaatctgagcttgcctggaaacagggtcccggactggttctcgcaaggccctgtcacattctcagctcaaccgaacagagagctcagaggtgtaatcattgctgttgttgtggctcttaatgatgaaaccgaagatgacgactatcagctgcctgatgtgatggaggttcaagcccaaattcataaacttgatcatcacaaatgcaccaacacattgcatctctccggagtgcctagaacaaataacgatcagcttcacatctgccgatactcagcttttcacccactggttacgatgttgaaagacgggtacaccatacaggtgatcaaacgaaacccaccaatcaaacaaggcgttgagctaaagatgcatggcattcatctcgtttacgagggggatgatgatttggaaggcagagaaaatactttacccgagactcaacaaaccgtttctcagaaacttgccaattttttcagctctttcgaagaagaagaaggtgaaaccatctcagaaagtgaatctacagttatatgatctgctagtgcagataggttaagaaactgctcacaaataatcttaatcgatacaaaatgtttgttgctcatatacgatttggtgttttggcttttgtgtttttctttgttccttgtctctttagtctttaccttttgataatacaaacaatataaataaataaaaccaaaaagaagaggaaactcttgtttccaatgatctcgggcattctttaataacaatccaacagaactgtgaaggaatcttcttctgtgttttttgttttgacggcttccatctttaagaaagtcaatggatagaaaagaataaaatagaacatgttgcttgtgtgtcctatagcactaacgaaaaagaacactgcatctgcgtatcctttttgtctttcaaaaccttaattagcagtgtgtgccgttctgatttaagatagatatggaactgcctgacgttccggtgtggagaagagtcatgtccgttgtttgggattatataaaactgtttgcgtgtgatgtaacactaaagcctaaagactctaaactataataactatataacttctttactgattgtcgtgaaagagtttctgcattctttgaggcgttgactttcaatattgatatcgaagaagaaagatcggagataatg

SEQ ID NO: 20471 - DNA, 3003 bp, Unknown
  misc_feature (1)..( 3003): 2750-1469P.txt file - cDNA_ID_1826308; gDNA_ID_1620742; Annot_ID_49637
aaaaattaagattttttaaactctatatattatataatgatggtaaaaaattgtaatatatcaaactttttataagtttaaatattaataatgttttataaattttaaatatataaataataatatttaaaaaattaatatttttgcttataaggtaatgacataataactctaaaagcaaggatttagaagatttaaatatttaattaaatattttcattaataaataattaatgtcagtgacataacattgtaaataagttcaaatacaaaatttatttatttaaacaaaaaacgtttagtaagaataatatttatttaacaaaaaactttgttttaaaatattgttaacaaatatgtttatgctaattttaagggattgatttgaagttgggtgggattaaatttgattgataatgtgattgacaatttaaatcaaaaatttaaagtaaaattaattattttggaaaaaaaatttaatgctaatgacattaattgtaaataagtccaaatctaggatttatttgctaaaatggctgcaaaaatgtatatataaatggttcatggatagacttattccaattaagagaagattcaatttgttgaggagaatatccaatctaaatggagataaagactgggtttaataataaaaagttagatttagcattcgacaagttatttgatttagcacgccgtcatgtacttacttagcttgttaattccagtttgtcgtttaattcatatatgtatatctagtcataatctttctctttgcagctttgagttttctaaaggattttgaactctattaattcattaccacgaaagaacaaagactaggtaaatgtctgccactactattagataaccacaatgtaaagttaatacgttatacagttaacatagcattgtgaccaaacaaaagatcttgaggatttaatcaaagtcacgtttccttattatctttgttgaagaagtacatcttttgccattattatcttctatacacactcaacaaattaacaacaaaaacaaagattattttataaataattttcgtgttgtggtaaaaagaagaagaatgggcctctttatataaaagtgccgtttggcgaaagttttgggcccttataagttaagaaaacccaagtttttttattaataatgttgttgcttcatttttttaaataaataaatcatattacaccaagaattagttttaacctttaatgtttttaaatcaaaatatttattgtctccatatgctcctcaaacttgttgtatgcactagtctaattcacaatatgtgaccaatatttcaatctgtagtggctaccttaaattagggtcaaaatttttcagtttcgtttggcatgcagcttgatgatagtcttttagtgaaaataaaaatccgagttaattattaataaaactgtaaaaaacgtaattaactttaaatttttttggttgtttattaactcatagtattattacattatcttataagtttaatgttccttcttgaattttatcatatttatatatatttttgaaactattcatgtgaagaatatgaactcccaccaaattttagttaaaattccacaaccctaactcttttttttttggttattgtttggtcaactgtttcttggttttaaacctgaagcctaactttcatctcaaagaaaaactaagcaacatgtttaaattatttatttcacaatttcgaattcccttattagtgtatctaaaagatcattaacttagctaaaccaattacatatgtgtttaaaagattggacccatattgttattagttactcttcgtaaagcaaataccttttagcacatggtatacagatcataatcatgggttatatcattcttacccaattttatttcccacaattccagcaaacaaatcaggttttaaatatatcaaacactcaagcttatgtagtaaaacacaacaagttcaatatttcatatatctgaaattgtaatttcgtatatttatgtggtgtatatgcaatgatttgaaaatttgaatttggaaaatgagtagtgaaagcgaaactaaacgacatggacaacgactaaataaatgaactgtaattgggccaacgaaactaacgttccacacaccgacacgaccataaacgacgttgtcatttgtctaattgcaaaactacataaaataatggttcatgttctttataactttcaaaaaataaatactaatatcaagaaaatctagttcccgatttcttaaaataatgtttgagaatgtgtggtgggtatcacattcgaaaccacctggctctctttatattactcattaaaaatattactatgataaaaaatttactttttgaacttggaatttggtccaagaaaaatataaccgaaagtataattaataacgtcattagcggttatttgtatactaatttggagttttgcatacattacacattacaccaatgtgaacgtcctaatgatcaccgtttaagtttgtacttttttttttgccgttcacaattatgaatttaaagatgtcaactaaaatttaatttcaaagcttataaaaggacgtaagtttattacacaaacaatcacaaactctaattcctaataactattatacacatcgtgaatttgaaacatttttaagcgcaaattctcagcgagataaaaacgacgttgttttaatagttattggctttacaacttcgtcgtacacgccggttaccaaatatcgctaaggctcagaattatctctgttcaaagcttttgttttgttcccaattctgaagttttgaatcaacaaatcttcaataaagttttctcctttcactatctttccatattcttcttcttagtaaaactttgcattaatggcttacccaaatttgtaagctctttgtttcctcccttcttcttattctcttcttcattctccaaatttgtttctaggtttcttcagtttgagcaatg

SEQ ID NO: 20472 - DNA, 3000 bp, Unknown
  misc_feature (1)..( 3000): 2750-1469P.txt file - cDNA_ID_1826316; gDNA_ID_1620742; Annot_ID_49635
tctttgactgataaagtaagtgatgcacttgtttgcccttgcgttcatatacatttattttgctcttcttttaataacgatttgtgcaacttcgaatgttcaggcaatgtggtatcaagactggctttttgatattacgacaatttgggcattgagtaaagttgaaaaaacttcactagcacatgaattgctcgagggcctcaagtcccggtcagtactaccgctttctcatttgtgacattttttccaaatggagagttttgtctcttgacttatcatctggctaatattattactctaacagaacatccgctatgaacccgaagaaacaaaagctgatgcagaaagcgattctggtctgttcttgctgatcctgatttacaattatggagacttttttgagttctatgtcatatcataagaaccgtctttttctttctttcaaatcagcttgctgaagctgtttatgaatacgggaaaggaaactacgagatagctttagaactgcttggattagactttgacgctgctaactataaggtaatgcgatgttcttataagatatatgtcaaatcaaaacttattgaagaatacacagcaaatgctattgtctcttttggtgacgatataggtgattggaggatcgggtttacagatggatgtttttaatgaaatctggtacaagttgctgttactcaacggcaaatcttcaactggtacactcctcaaaaacactattatatccatatacttcggctatatcttcgttttctcagctactaactctgcgtttacaacacccgaacctgcagctattgaagtactagagaaggtgaccaaacagagagatggtgctcctttcttgtggcgtttgctggtaagtcatttatatgaccagacaagacaagttgattcatatacgtctacagtttatgaaacgttgactttcttttggcaggaagagagttactcaatggaaggcaaggaaaaagctggtataagtgcaggtaagaaagcaaaagcattggaatcttcatatttcaagtctgcttgatcgccaaaacggcatttgtcttgttgttttataataagtcaatggttatggtcaatgcataagaataataataattttgttaatataattgaaatttacattctattgactttgtattagtattttataaagatgtttatgagaaaaaaactactagaagaccattaaaatggatcttgaaagctgtatgttacagttagatatgttgttcaattgcgacatggaaacatgtctaaggattaggggacgcccatttctgcattttttatatgatttttaacatgcaacttttttttatcttaataaagatattttatattttaataataaaatgacttaaatcttagtcctatacacgagattatttcaataacattcaaagaaaaattgaataccacattattgatctccaaaatgtcaagtgactgtatcgcaaattctatataaattttttcaaaaaggctgataaaattaattatttttttcgaacatatatcttataatttacaccaagcttccaacattaatttcgtaatttaatatctaaaaacttgtaacttttttttttttaatactaagaggttctgaaccgaaacccgtaagctctccagacccgaaaccacatccacatcatgtaaattacatgcatcagtgtatcacttaaacaagaagtcgtgaaacttccatgaatttataaggttgatcttatagtgattttctcataccatataaaatacaccaatgaccagacgtctaatatgtttctgaaattcactataaacaaattagtgttaagacttgtagttacatgcgtcacctaaaaacattgaaatttcatgagttctccggaaaacaaaccaatatatttatttggtgtggaaggtacaaattaagaccgagtctctcaaagccctacgtcggccacataagccaaccaatggatataaaaaaattaaaaactcaactatgacatgttgccaaaaaatctgatatcaatacttttcggcttatccagaaagataggagtcacacgtatataacaaggcaatgtgttgtgtgtatctagatctatttatatgcaactgtttagaaaatgtactaatcctaaattattctacacaaatattcacaagtctacttcatgactttcttggttctatctacggaaaagagacaattctacacaataagcccacgcgctctacattacctcttcataaatacattcttttcacaacatttaatatgaagttttattgtagtattctgatttcttctatgattatataattattccattcaattatggagctacatataacataatttaactagctgaactgatctttcatcaatattacatgatcgtcatggttttcatgaatctatgagtttacatttccctcattaatttaaattctcaaatttacattgataagatttgaattatggtgcggatttatcgacgataaggtccatagactcattactagagggatcaaaagacacttatcagttatcacgcacacaggactgtaatcacatccataaaaccttatactataaccggataccggtttaaacaaagaaccaacattgaaccacaacctaagacattttctatcaaagtcttcacatcacgttctttacgcgcgtgaggtaaaatgttcaacaagttacgtaggtggaggagaaccttcgtaatactttttcattagtcttttcttcatttgattttgcgaaatttctaaataattgcgagctgcataatccctccgactattaacttacaaagtacccttttagccaggctttttctgtcttatttttttgtcattaaactatataaccaaacacaaacatcatctttctccttcatttcacaaacttaaaattctctgtttttgtttcttcttctttcaaaatctcaagcaaaagaaaaaatg

SEQ ID NO: 20473 - DNA, 3000 bp, Unknown
  misc_feature (1)..( 3000): 2750-1469P.txt file - cDNA_ID_1826324; gDNA_ID_1620742; Annot_ID_49632
cttatttttttctgcattatgtatagaaattgaaaaccaaatatttaccttgttcatttgtcaacattaggtcttatcacgaccaattttttgtgggttgatatagttattcagtactccattttaagcttataatcatgtgaacgtttgtataattgtttgaaatgaaaaatagatatagagagaacgtactagaattgagaagagggatgcgtaagcgatggtcttgaaacggccaatgtaggcgtcggagattaatgcgccgaggagtggagcaaagttagtgagacccatccacaagtagtatacgttaaaagcttctactggctccatgtgaaacacattcctcaaatacaacataaaatttgctgatactccaatcgatcctaacttctccaacgtctcattacctttattctcatcatttagtaagttttggtctcagcagataataacatatatatggtgtccaaaatatgaagcatcttttattatgaatggatggttctggtataacttaagttggaccgttaaatacaaatattcaattaatgtataaactcaagatctgtctgaaacttataactgttatatgcaaaggtttatgcctaaacaaaaacttgaaacggtcgaaaatataaacttgaaatcagataatttgatttctgattccatttctattgctactatatattttcttagattattgaattgcatgactcgcaaaagaagtttagtgtgctcatgagtcatgatattagcatggtgttggacacaactaccgattaggaaagaaaaaagtgatggcatatcattgtaggtattgtcaatgaaatttaaatttagagaatcatagttatgaaacgtatatatttttaactttgattgactgtttgttatctttagatatcaagaaaattgatatatgaagaaaaatgtgttttttttggggtgatatttcaagaaaatgtcatattgtgtaagtactctatctaaaacaaacaaagatgtgaattacaagacaacaaatacctaatcataaatcgatagaacctgaaaggcatcaatgtggtcggtccaccataatttgttaaatgcatggctaaaatggctattcatttaatagtttaccatgtttagatatatttttttgaatggaccatatgaatatttgaggcaaatggaagattaataattctcttcaaagaaaaaaacattattggaagaaacgaaatggaaagaaagaacatacctaggatgaacgtaatggctctccagcctccaagttttttctctggcaaaattttccgattctcaacaactcccatctccggcaacgacgatgagaaaaagctatgggaaaggttcgaacaagtaacaacaagatgaagaagatgttctaaaaaaaaccaaaaaaaatgactaagaagatgaattgtgttttttcttcttcttatgaacaatctcaaagtttagaatatacaggaatattttgaagttgctttttgggtggaatggtgtgatcagaaacaatatattctgactaaggcactatccacacacggcacaacttttcaactggaagatgaggatgatttcttatttatagacacagattgagaaagagagcgagagaagaaagttattctctttcccttgttattacacatataagtgtggatctcgtttcacttattagaggttaaagtgtaatgttataaatatatataagtttattgacaatttaaaatgtcttatttgaatggtgagttgaatagacttatatatttgtatgtttccaagtccaattttaatttacaattagtaacacaattaatcatctcgtaaagtttatggtatataatagtagtgttgtgggtggctatagctgatgatatttctatttagtaaatcaaattatttgatatatatataatcatattatcggttttgatgtgatttccgaccaaagaaatgctccacacaatcacacattccctcaagagtctctaaacatttcctaggcaacctaaaaactgaacactagaactttgcaatgctagagatcatacaagttataaataacaggaatacaaatttgatcataaaagttgtatacccttttgaaaatactcaaaattacacaaggaatgcaagaacattattaccttatcagttcattatacacgttagctgattaaaatttcagttcacgaatctttcgagatatgactcaaaaagattcttataaaatgtttataattcacaaagttataacaaaaattttaaaagatttcgaacaataaaatcaacaatcgaatgagaataaaacagaccaaaaatgggcctataatcgctgccaaaaagggcccatcatataaaactgcgattttgcgcccattttaccgcaagtaaaaataatgatgttaaacagtcaaattgataaaaagactagagaaacataaaaatgagaatctaaaaagaaacttaacagcaacattgatgatcttaagaattcgattaacgtccgaataaagcatacttctttcattttcggaatcagattgaaatataaagctttggtttttgtgcggtcacatggcttctttagattactggctggcttgatcaaatcacgtactagctagtggatcactttttcccagaaggtttttgttcgttgcttggtattacctcttcttcttcttcttgatgaaggccgcgtgaatagagcgcacacaaagtgttcgtcgaaatgctccaaccatggtctctatcaactccggccccatttcatcttttgtttctcgctattcgatgattgattccgatacccttttgcatctttcttcttttggttcaacttttaatcccaattataaggccaaagcttgcatacgttttgcaagaaaagtttgtgggtctactgttctagggtttcttgaggtgaagccgaggaagaaaagttgttgttctcgttgtaatggggtttcgaggatg

SEQ ID NO: 20474 - DNA, 3003 bp, Unknown
  misc_feature (1)..( 3003): 2750-1469P.txt file - cDNA_ID_1826332; gDNA_ID_1620742; Annot_ID_49630
atcggagagtacaagtctacttctgcactacagcatgtttgtctttcgtcaatttttattaacgtatttggcaattcgacagctcataacatacattattaagcgaatgccacaatttaagcaaagcagataaaacagcgaccctagacattcacaactacgaatacgacgggccccacttggagataataatgcggggcccaataaatcaaactcttcttacatcgcaaagcggtgcacgctccttggtcagttagattttgcaacataggtggtgagaaacgattttctaaagtcaactgatttgggtatcgatataattaatacatacatttatgtgtgtatgttgtaaatgatcattaagtatgaaactatgaatgatgaaactatgattagggtttataatatatagtatgaatgggttaaagcttgtggttgactaattttaatatcataaaatgaagattgaggaagaaaagtgaatatttattaaagtaccagaaactcgatggaggcggagatgaggaaaatgacgaatgtggagaagaaggcgtcagcaaggaagccaccgaggagagcgagaaggaaggctgtggccatgaaagtggtcacttcactcgacgatctggctagagacatgtgcatgaagttcttgagatacaacaccaagttgcttgcgttcgctaaaaacgctagattctccaatatctccaccgcttgaaaacacatgcacatacacaagaaaaagcaaaataaaagaaatcaatcacatgattcccaaaagattaatcaagactagagaagttaaggaaaaaggggtaaatttggaattttgagactgacccaagacgaaggaggcggcgagcattccgccgtgacggcctctcaaggcggctttgtttctccagtcagcgtagccttcccatttggagacatcaccatgcatttctacttcctgtatttggaaataatcaaaattaaaagactttagaaaatatctatttctctaaatagaaactaacatcagcaccccaaaactgatgtcttgttcttaaacaactaaaaattgcaacaacaaaaaataattagaatgagaacaatattagatgcttgaagaacccaccatttgatttctctctcaaattttgatgagaaataaaggtaagggtttttgaagtatataagtgataagaagggtgttttcggaattacaaaaagtagattttaagaaccctaattagtaattagattttaaagacataaaaatgataatttaatcaagactcgataaaaaaaagtaagcaatctcgtggaattttctgaatagtagactcactaagatctagtattattaaagaatagtagattttctgacatctaataatcaataatacacttctttaactaaataacaaaattttctagaaaaagagagagagaataaggttttacaacgtaagtgtgacaatgtatattacaaatagagaatagtttttcagtctgttatctgaatctagacgagacagcacatttttggattttatttatttaagaggtttagctttgagtttgcttactgttaatagaggaggatatgcgttacaaaaaaaaaaaaaatccaaattgaccaaaagatataaatctaaacgtgtcattactcattagtgtgaactgtgaagacctaatggttatattacatgctacttgatttcatcgtagtaaattggctttgcaaaatcgccaaatgtcgagcattaatacttttttggcaaatgtctccatatattaactgttcactttttatatacatgcatgtaaataaatgttaaaatacctctgatagtttcactttcacccaagaaagaattacttataagattaaatttaaatgtatatatattataaatttctataaatcaaataaacctaaagttgtgattggcccattacaatacagaaaccccatttaaggacccaaatatatcgtagcccaacctaaaccagtaatagaacctaatttcgaaccacacaattcccatcggagagtctgcattggttagtttgtttcttataagaacaattgctgatatttccattctaagaaatagcaagcaaggacttaagcagaggaaggcttcaaggagatcacaaagctccacgaaaattacgaaaagaaggaaatgttataaacaatgatgagtttaaaaaacaaaagagatgttaagatagttaccactttatatgtatacgaagtgataaataaaatctgatatggcagaatggagatttttcattttgtttttattatattgattagttccgaaatcaaaagctttatagcctctataacttcatcactcattcccctcacgatatgttgtcgccaaggtgtgaaatgctaaatcatacatatttttgggattgtcaaatttataatttctatttgtttccgtcacatagcatacaacccaaacaagagaaacaagacctatagttttacgtcaataaacaaaagcaagctaatacttacagcactggacattcacaattttcacaaaaccaaaccaaaagaatctgatgtatacggaaaaaaaaaaagaatgggtcacttttaaaatttcttttttcgtcaaatgtaggacatatgtattgtttgtgtcacttaaggaaatattgtgcccacttgcaatataaatagagacaacaaaggtgattagagagcatctccaatccaacttgcgaaatcattcacaccatttaaaaaacaaaaatcacacctattgaatggaaaaatgtaaaatcaatcaccttaataattattaaccacaagtataatccctattatagcaaaacagcacattcgtctccttcttcttaccagacactaaaacaagcaaaaggaatcgttttttctttctcttgtaacttttatgtttcgtcattctacaatttcttctttataaaaagtgactcttaagagtcccaacattttcagtaaaaatg

SEQ ID NO: 20475 - DNA, 3003 bp, Unknown
  misc_feature (1)..( 3003): 2750-1469P.txt file - cDNA_ID_1826332; gDNA_ID_1620742; Annot_ID_166492
tgtaaataaatgttaaaatacctctgatagtttcactttcacccaagaaagaattacttataagattaaatttaaatgtatatatattataaatttctataaatcaaataaacctaaagttgtgattggcccattacaatacagaaaccccatttaaggacccaaatatatcgtagcccaacctaaaccagtaatagaacctaatttcgaaccacacaattcccatcggagagtctgcattggttagtttgtttcttataagaacaattgctgatatttccattctaagaaatagcaagcaaggacttaagcagaggaaggcttcaaggagatcacaaagctccacgaaaattacgaaaagaaggaaatgttataaacaatgatgagtttaaaaaacaaaagagatgttaagatagttaccactttatatgtatacgaagtgataaataaaatctgatatggcagaatggagatttttcattttgtttttattatattgattagttccgaaatcaaaagctttatagcctctataacttcatcactcattcccctcacgatatgttgtcgccaaggtgtgaaatgctaaatcatacatatttttgggattgtcaaatttataatttctatttgtttccgtcacatagcatacaacccaaacaagagaaacaagacctatagttttacgtcaataaacaaaagcaagctaatacttacagcactggacattcacaattttcacaaaaccaaaccaaaagaatctgatgtatacggaaaaaaaaaaagaatgggtcacttttaaaatttcttttttcgtcaaatgtaggacatatgtattgtttgtgtcacttaaggaaatattgtgcccacttgcaatataaatagagacaacaaaggtgattagagagcatctccaatccaacttgcgaaatcattcacaccatttaaaaaacaaaaatcacacctattgaatggaaaaatgtaaaatcaatcaccttaataattattaaccacaagtataatccctattatagcaaaacagcacattcgtctccttcttcttaccagacactaaaacaagcaaaaggaatcgttttttctttctcttgtaacttttatgtttcgtcattctacaatttcttctttataaaaagtgactcttaagagtcccaacattttcagtaaaaatggaaaactcagacactgattcagaagttttcttttggtttcagaaccaaaaccaaaaccatagccataagtttccttcttcttgttttcctccgagctctcactctgctttttatggtatatctctgttcctccattctaattttattttattttattttcttgaaatgcatctttttcacctttgacgaatcttcatccccaaaatgtaaccactcagattaaaagattgtcctttcattttaaaagagtttgaaaagaatagcaagaactttgaagaacctcatgtgacgacataggtcagattctcttctataaaatttgtgtcattcctcattctcttcttaattcaggatctagctcaatgatcaacacagagactgcaactatggacgaagaagacgtatgtgagagctacatgatgcgtgagataaccaagaaacggaagctaacaccgatccaattgcgtttactagaggagagtttcgaagaagagaaaagactcgaaccagacaggaaactctggctagccgagaagctagggctgcagccaagccaagtcgctgtctggttccaaaacagaagagctagatacaagaccaaacagctcgaacacgactgtgactctcttaaagctagctatgctaagctcaagactgactgggacattctctttgtacaaaaccaaaccctcaagagcaaggtacagtttcttaatagattaacaagccactattttcaagagtctgttcaaaattttgatgacacattcaaacaggtcgatcttctcaaagagaagctgaaaatgcaagagaatcttgaaactcagtctattgagaggaaaagacttggggaagaaggtagttcggtgaaaagcgataacacgcagtacagtgaagaagaaggtttggagaatcaatacagtttcccggagcttgcagttctcggattttattatgatccaaccttaactgcttcaaatctaaggttgtgatagtgtaggtcaacaacgttccgtgtgcctcaagttatcttcgctgtctccatcctttttatcttagacttcatattctaagaaagaaagcagtaataatattcattgatggaataaaaatgcattgtaatttaagtcgttaagttatatgaactttttatgaaaatggaaaaggtcacaaggccatattttcagtgactagataaatgaaaagtgcatgcttttcaaatgatatggacgttttggtatttacctcaataattcgtatgctacattttcatataaaccaagagaacctcgagattagaaagtgaacacattccaattagtcaataattcagcaaatagtagaagaaagtagaattgattcatttgagaaaaggactggcactatttgatatatacagtatgctgataatatatattaccattatgcaataatataaaccttatcacaacaaatctttatccgaaccaccaccaatggaagatgttcaaaactcagacaagaacctttgaaagtcacgtgtgcggatcagatgactcagatccaaatatctgacgtcacagaacctgcgagctccgcacatgtaaactcctgccggagttcatctaacgacacgcggcaatatgtgtgtgggttaacaaatgtggattttgtggggtccgctacctatctgttatacactcggatggacagtccagttactatgtgggccttgaggctatgttaatccggcccatttagcttaaccccaatttaatttctatattttcaaaggtagaaaaaaattgaagtgacacagcgaagttcgagtatg

SEQ ID NO: 20476 - DNA, 3003 bp, Unknown
  misc_feature (1)..( 3003): 2750-1469P.txt file - cDNA_ID_1826340; gDNA_ID_1620742; Annot_ID_49628
tagttaagtcggtggacaacgaaaagatctcttacgaccacttctttttcaggacatttaaggtatgaatttactcttcaaaaatttggtgaaattgtgtgcaggaggatctaaaaccttaacaaattggtcaaatatattgattagcaagttctttgcaaatacgattatagtaaatctacctatttaacaattaaaaaagtggttttatacttttaattgatgcctttgcaaatatatacttttcttcaagctcatcttgtaatccttgagatcttctaacattaacggcatcaattaaaagtataagcgctaaatggttttaattttatacttttatgtcagcaatttttgagacctgttttttctattttaccagtgtatttgttagtgggctcaaattttttaatttttctttaggcccgaaatacttggggccggcctgattgtataaattgattttttcttttttgctttgggggtgtatgggtttaggtcgatggttatggaattgattccctggcgagttttttcatggattatggatataaagttggaggcagacttgattttccaaagaagaaagtacaagttctctggctttctcctccggatgttcacttccccgataatggttacggtattggcaatggccctttgccaagacttgttatagctgagcttcttgtggaggaactaagccctgagtcacaggtattagtgatcacaaacataatgttgttataatgagtctttaataatacataataacttttttgttggtcctaatttctggttaactaggagataataaggaagtatttgaaaccggaaggtggtaagcaagctgttctttcaagtactttggggtctttaatttgggagaagccaacatccaccgatttcaatcaacttgccaagtatatgttctaagtttataatcaataatcacacagtatctttgatggttagctaatttaatttttgagttttgtaaatttttataaatgatgaagagaaagcgaatttgccgcatggacgcttgtctacggctacacaatgaaccatcttgctttcgcggttcatcgtcttaaacaccgtttcagcgacatcaaatgcgtcaaagagtattttgaagaaaacggtttcgaactcaacaaggatggaggagtcctcaaaggttttctttacttattcttcacatgacatctttcatttagattggttctattctataaccattatttaagttgtatggaaaaatatttcagtgagtgaagacagtctactgttacaagtgtcggctatgtcggagaaacttgtggttgaatttgcagacggagtaactcaaatcgtcccggcttcatacattgagttcgttgaacgtctagttcttccacagttcaaagatatgccgtgtgatgaggtaagaagcaattcacattaatcgaattcttttataattagacatttttatatatttccgttgtaatgcagatcaaagagtttcatagacgcgagggcttggagcaagctagcgcctaccacataatggaaagcacccgtttcacagcgtaaatatagaaccagcttgttttgttccgctcaatatgtcaagtatgtgtacgtactattaaaatgttttgtatcttatttggacaatttgtgtgtgagatatttctgttcttgtgttgtgaagtgacggtataacttaatattacccgttaccgacgaataatggaaaacaaagtgtcatggtggggtgtggtatttgtggtgtttttgcatgtaatatcttttgatagtaacgtgacacttgattttggtgactcgtaacacctcttggggttgaagaccaacgtgcccaatctttcatttaccttagtgtcttcttctttttgcattattggattttggtgtttcacgtagagaaactgacatcacattgtcttttgttagtttttttttgtgttgttaaccttaagtgtttttacgtagttaatatatcttagagaacttaaccttttcatttagctattattcgtttataattatagtttggatctaaattagtctaacagttgtattatgtgttttagaccatcgcattcctcgatcttaaccaaatatcttaacaattatttacaataaaattttgaaacatgacatgtaactgttttttcactcataaaaacctcttagctaagaagcaagtctttaatttttaatttgttttgatttatttttcagaatttaattttaagatattagtctaagatacatttaagatacatcattgaagatggtctactaattagtagcttagcaatttccaaagttggtttaaggatcaactttttgtatcattttatattagtgatcaaaatagttacataccaaaaattatttatttcatttaatatagtttttaccccccactagctctggaaaagtccaattatattcttgtcgttagcaatcattgatccttggctttttttcccactctttctagctgtataaaatacgaatttacgataagatattagaaaaaccaaacaaagctgtgtttctctcgtacacttaaagcatcgtcccgcaacggttctcttgacttgccaaacgtttcataattaaattttttctctaattatgatttacaaaaacaaaaatcacgataatccatgatctaactataagagggagtaagagaaacatttcacttggtttttcttactgagtactgatataaataaatatagaatcagacaaagattcgtttgctgaacgattttatataaatttagtccttacctgcgcagctaatcatcgtgagcggagcgactatgcgtcaagaaaaaaaaactaaaatactaataattaagtgactccttctctctccttttttttggggtatgcaccaacctttatttataagtataagcaagaataaataagaacaacaaagcaaacggctcatttctcagaaacaactcaaacatg

SEQ ID NO: 20477 - DNA, 3003 bp, Unknown
  misc_feature (1)..( 3003): 2750-1469P.txt file - cDNA_ID_1826343; gDNA_ID_1620742; Annot_ID_49626
aagtatctatatgaaccaattcaaaagctttttcacgaatgtgattcacagatttaaaaggtaaatgtttctgttttgataaatggcaaacatgacaatgagaagaatctttattaatcttttgtttaggtaacatcaaaacatcagaaagagtatcaatctttgcaaaagaagggtgacctaaacgtttatgccacatttcagattcattcttaacactagaacatacagacttaccaggaaaagacgacacatcaacaagacttttatccagattcagaatatataagttgccgacttgactacctttgccaagcatcaattccttggtaagagcctgaatcatacattcatcagatgtaaaactcactttagattgtaaagttttagttaaaacactaacactcaaaagattaaatttaaattcaggaataaacaaaacattgtgtaaagacaaagcatcagtgagttgaataaaaccagtgccctctattttaaccgtatggccattagggagtctaacaaaggttctatctaaggctttgtaagtgtggtataaattcctttcatgagtaacatgatgactagcccccgaatctataacccaagctctaagagacaactcagtttcaataggtatagaagaggttaacatttcataataagtagagtcatataaagaaaggaatgtaccagttatctgtgagatagaaggtacgggatttgaacttgaagctatagccttgtcaaaacatgaagtgatactaggggactggagcttagtgcttaagtatgagatcagttgttggatgtgatcattagacatagtctcatgtccagtggcagacatagtcggaggtgcctgagtctcaatctgatcagtactagccaagtttgtgcttccaacataagtgttctctttggctcgtggatgacctggaggatacccgtggactttgtagcacttgtccacagtgtggccaatccggttgcaatgagtacattttggtttcttgaagttaccttgagctagtagaatagtgttctgatcattgagaactccttgagtttgaaaagcagctggacttggacttggaactgattttgcagcaaacccaaccaaacgctgactttcatcttgatctagcatattgtagatttcattaagccctggtcgtggcttcatgttgaaaatttgactccgaatagtgttaaaatcatcactcaaacccatcaaaaattgtatcactcgacttgtctctgcctcttctagcagctccttcacttggtcacaatcacatttctttacactgcgagactttgtgttagcaagttgttcccacaaggtcttcttcttcgtaaagtatgtagagagatccagtttgccctgctgaagagtcatcacagcttgttcaagttgatacctcctaggcaaattgttcaccttaaaacgagtaaacaaatcaatccaatttcaacaccatcctcataatataagatactgtcataaatctccttgttcacaacattaagaatccatgacttcaccatactgttgcatctactccagatccgaaaagtagaatcatcaacagagggtcgcaacaaagaaccatcaacaaaacccagcttgtttttcgcatctaagctaattctcattgcaatcgaccaactgttatagttactaccatccagaatatgagctacaatagataaacctggatgatcggaggaatggaggagcagtgggttttcaccagagtcagaaaccttaaacccatttccaccataaacgtccgatcgttgagctagctgttgtttcagtgtcgtgagcttctgatcttcaaggattgctgcttcacgaacagatctgacagctgaaccttcatcatcaggtgtagaaccgcgagtcttcatttttcctcccttcttcaccatttttcttcaaatccaaggtcgcggaaagacaatcggagaagaaagaagatcagaaaaggtgtgattaagaagaaattgaagaaacgatggtgaaaatcaccagatttgtgtgaggaaatgctctgataccatattagaaatcatgaacaaagagaattgtagaatgattttctatttcctcgaagaataaatgtgttacaatgagagtatatatacaattactctaaaccatctaaaccaatgtacaatctctaaatagctaaaccaatctaatcaaaccggaatactatatacaatctaatagtataagagacaagagcttaggcagtcaaatgtttgtgcaagtttaaggcgaaatcaaaaagagtaaggaagcgaaaaaagagaagaggaaacgagaggagaagctaatggcggtgatacatcctgagagaaatgcaaagaagaaactcaagttagctgcaaagaacaaggctaacaagaaaagaaggattatgagcaataaaatggatagatggtcacactcttaagctcccataaccacattaaaccatttttgtttatgttaacatagaaattattatttgagattagactttttcaggtatttatgatccatttttggtctgttacaatccaattctaaaccattgcatttaacttgtttcttagcagaaaaaaattccgacatttatttgattacataaacttaaaagagataaactttattaaattatgattactaaaaaaaatatttaacaagattatcaatatgattacgtctgttaaaaacaaaaaaggaatttgccacgtggcgacactaaaattacgtaatgttcaagtcaatcaccggcgatgtggcttttctcgccgcgagttgaggcggttgaaattgagtttcgagacgacgtcgtttccaagtaaattgcactagcacgtttaaaaaaaaaatgcaataagaaaaataaaccatgagttcgtcttcttaatacctaaattaaattcgatttttgagacaaagctcgacaagtcgtcggcggcggtgtaaaaatagtcggagctatg

SEQ ID NO: 20478 - DNA, 3003 bp, Unknown
  misc_feature (1)..( 3003): 2750-1469P.txt file - cDNA_ID_1826359; gDNA_ID_1620743; Annot_ID_49665
aattgaattgaagaaatgaagaataatgaaaagaatatgtttaattaggttgagtatatgtctacgtcatgaaaataccctaaacggctctaaaaatgttgaactaacttcaagaaaaaaagaatgaatgagatgaaaatacattcttcgaactttttatctttaccttattcatttttttccttctcatttatgcttttgccttttaccatttggagtgtgtttgacaacaatgactatccttttagtaacttggaggaaaattcatctcaactcaacaggtgatttcttagaggaaaagagaaggaaacatgtttcttcagctgacaaattggaatcccaatttctcatttcaaagatgctttttgcttacgtctttgtgtttttctatatattaaaaaaatgattcccaaaaataaaaaaaacgattccctaaataaaaaagaaaagaatattagcaacggtcacaaacacgatttgcatattggaatggaaggccctcatgacgacgcttttaactattacgttcttctcacgtaggcccactaacactccattacccctttcatcacttcttcatatcatatgtttcttttttattaatttctgtcaccaaaattagacctcttttttctgttccatttacaccaaacttctacatttcatttcttttttctttccaataaaatgtatctaaagttatatatcatgttaaactattttcaaatccgttggaatccatcaaaaaatatgtaagaaatgctcaagccatcgctggtcgccccttaattgatgtgtatgcgtcatcgtcttatatatagtggtcatttcttttgtttacgtctcattgttgtcatcttctagacaagaaatgacatctatattgtcatttcattgatgcatcatcgattcatcgtcttatattggtcattacatatgtttttttacgttttattgtggtcttcttctaaacacaaaatgacatctatattttattgcaaaatttccttacgatatatagttattattaaattagttattatcgcaaattaaggtgcttttcttatagcatagaatgtcacaagagaagaaagatagcaattatatgaatcacaaaactaccgtttttagctacgaatgtgtttgaaaatgataaatgcattacatagatgtaatgttttcatgtagttgattgccctcttgtctttattgcgaacattttgattgttatatcacatgagtcattcagaagagaaaagaaaaattagatgtaactggaggtgcgagcgacggcggcagccaacgacccactttatcaatttttatttgacatgtctccatcgaaattgtaaactattgagtagtaaattctactacgattatttcatgactaattacgaactatcataaacagatattccccttaacattattatcgatacataaaacaaatattaaagctaaagctttcttcatacaaagcaatctcctaaagttagagacttttgttgcagcaacaaacttatatatattagtattttcaaacataatgatttaatactatggttataatttgttaatatagttaaggagttactcaacaatctattagtcaagtcttggaaaaaaaaaaatctattagtcaagtcaatctattgtacatttgtacatatctactacaaattttaaaggtaataacaaattagttcaatacattcttatatcttctctttgctagttcaattcttcttattggcaattagtaaattgacccccaaaaaaaagtacattcttgagttttaatttgttttttttttaaaaaaaaatcttgagtttaaaaccatctataatagatctacatttatttcttcttctttttattcataatataataaataaatgtattgtgtttttttggataaagcatttccatcttcttaattacatgtctattgtgtctactactgcaaatattattttaaaatactatcattaaacattaatactaggaagccaaacaaattaatctgaaaaagaacaagacagagtgaagagcacaatgatgggagccacatggagacagaacatatgcttgcatccaaacacaacagcagccatatgcacagctcttagccaccttggctttcctttttttctttctttcttttagttactgtattcctttttcttcatattatccatttccaaaatgtacatctttttttttaataataatatatggtatttattgtttatgatcacgccataattgactttcaaagtaaaagttacatgaaaatttattataaaatataatttcctatttttgctgtaattctaagacaaaattgacaaaaattagattttttttaatttatatccaaaatatgtttttcttattttcggcgaatttatggatgcttccataaattttcgtattcacatttaaaccagtcaaatcctataattattaattaattaaacactaatcatcattacattttgtagagggtatttttgtcttacaaaagtttccacacttgcacaacgcataaccgttgtaattccaacgaaattccagttctacccttggaaccttcgagcaaatctttaagacggcggccaaaaatgtaaataaagtaaaaatatagggtccacttttataataaaaaaaaaagaacaagaacgtgaacgatccgcgcgagccacacaataaaggtttccagcacagagaagagagagagagattgcttaggaaacgttgtcggacttgaaaccagtttcggtaccggaatttagaaactccgttcaaatccggagccaatctctaaaggataaagcttccaactttatccattaattggagaaaattctcagagagactgaagtcgacaaagtcagagggtttcgttttttggcttctgggttttttatttcaagtgttcaatttccgaattaggtaagaaagttaggttttgagatctgtgcgaattgtgagagatg

SEQ ID NO: 20479 - DNA, 3003 bp, Unknown
  misc_feature (1)..( 3003): 2750-1469P.txt file - cDNA_ID_1826382; gDNA_ID_1620743; Annot_ID_49657
taatggataaagtgcggaacagacattatcaggtgattaatcttaactaagacctcaaatctttttggcgattgtagcaataactaacatgctcttcttcatatgcatttatatggtaaagctcgcatgcaccttaacctttgaagctgtttatggtacatcatgtgatactggtatcaaccatcccaaccaatactttgaagaaagtcagaagattctgaaatccaagactccagctgctccggtttaatctccttatggtttcaatgtaatccgtgacataatattaaaaatttaaatctttaagttgatgccaaacctgtttgatgatagtaccatgtttttaaaagccaagcatacctatatcaagaaaaaaaaacattacgcatatgttaggcatatgcttccttttgttccaatattgtcatgttgtgcgagtttaaatcatgaacatgtttctttaactattcaaagaaatcaatgaaactgaagtgaatctcttactcacactatgactgacacatctatcctcgtgactttttaataaaatattcaactgtatgatataagatttgaccacaagccattgttattgtagttattatggttgttgttgctactactatcttagatgtacatttttgaagtggacaatgtgagtgaaggtgaatatgaagagatgttgagagtggagagaagtaagttctctgttgagttacgaaatttaatctcttggatacactgtaaaaaatgggaatatctagctagtaaccgcggttactaggcgaaacttctaaattacattagaataataatgtctattcaaaatattttggggtatatttcatgtttatttgtttttttctagaattttctcttttatttttttttacctctgttttttaagatgaaaatgaaaaaaattataactactaactttttaatatattaaaatctgtaacataaattaattagaggatgtacctctcattttgtaggtgaaccacttaaaattgtacatattgtttgttttttttttttgctcaaattgattttatgggattgggttttgatccaaattaatccttaaattacactttattaaatcacgtttaactaaatttgtatgagaaaactattttatccgtatgcaaataccaattctcaaagagttaaattatgtgtattttgaaatatttgtacttcaaatatgcaacaaaagagaggagagggtcaccaacatgtaatttattacatgaaagcaagaaggacaagattgaaccgaacttgacagatataaatgattaatgatgtaagttcttactatatttatatttctttgtttgcccaacatcgtacaaaagaaactgctagagaagataatggaatatagaataattattgatggtaggtgatcataattaaataggaagcattgaagatgacaatggaggaaaaacattcaactccatagtatatcgttaaatttatgaacaagctgttgaatcgagttttggaacattatttttcacaattttgggaaacattgtgattatgattcgtgaatgcggttgtttctctctttcaaagcataataattaaaagatagatacttagattttgaaagaatgttacggacgaaacggactaaattcttagtaaactagatcgtaacggattctatttttgggatgtacaataatttgcaggggatcaactttatttttatgtaaaagactaattgatctgtagtgaatttttttcttttaaaaagtacattactacaatagagtatatttataagtgataaataaaaatagtttaatcaataaacatatttatccgctttaactatggtaaccgttaaatttttttagagagctaataatgtcaaatgtatacgatatttaatttaggtgactttaaaaacttcatagatccaaagattaatcttcaggtccaacaaatctatgttaaattgttcgaacctcaatgaccaattttactcgaacccaaatagtagaaattacctctttttaccattgtaccaaagctacttggttcaacacaaaatatgtatagatcacatatttgttgctgataatttttttagtatatcaattcacaaaatagtaaataaagacatttaaaaaaatgcattaaaaataggacaccaatccaattttttttttgtcgatatatcttttgacttttgttacatctcaataccaccttttttattttgtcatgttcttgaataaaaccttatcacccaattcctaattcaagaaaatgctatgcagccaaatatcattttcttggacacttttttctcctttactttgatgtagattacacaaagaaataataacagattgtcaattgtaccctcaagtttttcacaggcaaattgtactacttttaatcgtcgtgccgacgtgctaatttctctacgtacactacacaagtcaaaagtcaaacgacaaagggctaattccgtaattgtcgtctaaaccaccatgatttcacacatgttaattttaatttattttaatttatttttgccgactccatagaaataaaatctgcgacactctaagatcatgccacgtgggtatcaattatagaagaactaataataaaatgagtagcgtcgcagaggataattcctttacctgtgacatagcaaccatcttcgtggctatctgtcggaaccctcctgctaatccttcagattctttatttcgtcagtccatagtcaaattattacaccttcttttgtctctatcttctcttcttctttgtctatcgtactggtttagcaactcctgtctgtctcgagctccgatccttatctctcttccgaaccaaacttgatctcatgtttgtcttgatagattgacttactctacttcaattcgtcaccagtcgttatgcaatctggtgagttttgaggggtttcttcattttcctcgaaagcatcaaactttatgtatttcgatg

SEQ ID NO: 20480 - DNA, 3003 bp, Unknown
  misc_feature (1)..( 3003): 2750-1469P.txt file - cDNA_ID_1826386; gDNA_ID_1620743; Annot_ID_49656
atcatatcgttaaatattcatataaatcattcttcacatttcacttaagatgatgccaatccaatttgtgtagcacaagttaaatccagataaattttttcttatacttgtattttttaaataggcaaatgtagaagctaggcctcttaaaacattatgaaacaaagagtaataacgatagaatacataatttattttaatgagaagcctctggatatagtttatattttaataacgatttttaaactcagatcgaactatgcggtgctccaattaaaagaagtatcgaagaacgaatatttggcgcactctagcaaaaccggtcaccaggctggtcggtcatgttagcggcgttaggtatctcgaagtgccagagcctacctacggagttgaccttatacttctcacaaaggaactcattggcaaaagcgttctccactttgcggttaacgtcatgaaggaagacgtgagtcgtgccatcacctttccggttacgtgccatgatggccgaggaaaatatcgccgccatccttcctggcgcctctgggaagtacccttttggtgcgtccaccatgatcagatcccactcggtatcatagaactcatcagggagagaagtcaacgccaagggacacttttcgttgtagcggatcgggaaagctttagctggtaaacacatgggttcgttcttgtaagtcgagagaaggcggccggcctcagaaaggtgggtccggtactgaacatggtgggccctgagggatggggcgtccttgaggacggcctctatccactcaggatcctcttccaagaacacagttgtgccacctggattgagggaggcccacatgagggagtcgcggccgaggccaaagactagaaagttacaagggagacgctccttgaggacgtttaaagagatcgagatctcctcgaaagattgttgagggacggtgtgtgaagtggcgtagtggacgatggattggagttggattggggtggctgtgtatttggctatagacgcagctgtgttcttagccgtggagcagagtgacaaggtgttgtccgtagctcggatgaagcttgtgatgagcattgcgccacctataagaccagctagagccacagcgaggaaccatggccgctctagaagcgtttgctttgcacctttagacttgtcttgaatcatgtttggtttgctttttggggtttggcgagagaggctgatgagtatatggttatacaaggtgaagagatcggatgagaaagtggagaaataatgctaatggtagagtcaacgaatgtgaagcacgtccgtctcaatcattaatggcacgtatgattgatcgatcctcgttgttcttttaatctaatttactcacttctcttaaatatagatctcaactgatcaaatatagtttatttccattttaatgaaaaaagttttaaaagggtaatagtaaagatttatagcaatttaaattatgtaataaattatcaaattttgtaagtaaatttatgacaaaaaatatcatcatacaaaattaaatatcaaaagaaaagtgtactaaaataatgataaacatagtagataatagataattaaccatatataatcatatatactcacatatccaacttagtcattgcctgcacatacagaataaacctttcttaccagcaaacaatgaatgtaaataaaaagacattcttaagagaagaaagagatacttacccttataagaccctgctttccaacctcaatttctatcgtacactctgcttcccagcctctaattctatcgcaaatgtgtgatacacttgtccaaaacagcctcctcaccttcgtttttcacaacttactgcaactcatccaacatatctccaatctctatcttcatcccatgcttgaatagagatcgaattaccttagccttgctgattgacgaactgtattcatattactttatggtaatcaactaatggtattacaaggtgagtttactcttattatcatattcgcacctatatataaagcaaaaaagtttaattaacagcaagtacaaaagagattatcatatatgacaaacagtattacacaaatcacatttgccacaatgaaagtataaggaggctttctttaaaagcaaaaacatacctcatgatgtatactatttattaactaatgtgtttataagatgtataatttctatatgttatccgatttccatcctacaaatctacaatatagacaacaaaatataaaaaattttgtattacgaaaaataggcagaagacaagaaatattatttgactttttataaaaatatacaaactcttaagaatcaaatttattcaaagttctggaaaatctctttaaaatttttgtctgctgtttttctatattgtctgtgattggaactttcaatcttgaatttgattttaactctagacatgattacatatagctgaccaaaataatatattcatttgatgtaggttagatgattattttttttttaaaaaatcacaaaacaatcaacacaattttaaatttttaatagagttttggaagttcaagattgaataaaattaaagtccatttatttttgggtcaaaaacattaaagagttttttttttagctctttaaaaaccaataaatcttcttggtttaaagttttttttttttttttttcatatgagagtaaattagtatattttcatttttatttttctcgttaaaatataaaaacatcttgagctaatttcacctcctatttctcctaccgtcgaactaaatcctagggcacaggtgaaatcgccgagtgacgtctagccaccgcaccgcctccttctccggttatctcgctactaatcagactattccacagctatgtcacaggtaacaacactgcccactatattccttgttcccgtcttatagtgaatatcgcagatctgacactgaatcgtcaccggagctttgctttgtgattgattctatg

SEQ ID NO: 20481 - DNA, 3000 bp, Unknown; identical to SEQ ID NO: 4894
  misc_feature (1)..( 3000): 2750-1469P.txt file - cDNA_ID_1826413; gDNA_ID_1620744; Annot_ID_49682

SEQ ID NO: 20482 - DNA, 3003 bp, Unknown; identical to SEQ ID NO: 16466
  misc_feature (1)..( 3003): 2750-1469P.txt file - cDNA_ID_1826416; gDNA_ID_1620744; Annot_ID_49681

SEQ ID NO: 20483 - DNA, 3000 bp, Unknown; identical to SEQ ID NO: 4890
  misc_feature (1)..( 3000): 2750-1469P.txt file - cDNA_ID_1826434; gDNA_ID_1620744; Annot_ID_49673

SEQ ID NO: 20484 - DNA, 3003 bp, Unknown
  misc_feature (1)..( 3003): 2750-1469P.txt file - cDNA_ID_1826442; gDNA_ID_1620744; Annot_ID_49671
cttctcgatttcgaagtttctgattattttgtcttaaagatccgaaatctcgatgacccggcccgttttatggcaacagatctcaatttccgcgttggattaacgggctgctaaatcactattttaaggcccatttaactaaagttggatttacgtggatctaaaaaagtctaaagataagtgaatgtgtgaatcacggattatatgtgagtaacgagaaaatcataatgaatgaaaaactttgaataagtgaattaatagctgacaaaaataaaaacaaggtaaatatataaacgacaaaacaaaagcagaattatgtttttataactggttaagtggttagtataaatgtaggaaatgaggagatggacccaaacacaagaacaataaacaacaaaagtaagtaggtttccatgtttccttggagcttttctttttgttaaccaaaacttcatttgttctcaactcttaactcttaatcctttgccttaatcatcattcattttgtttctctaaagtctaatcatacaatctatcaccatcgcatcctcttagtatttccttaaattttatcaaatatttccgcttcagaactttcctattaaatcttatactgtcttgataataaaactttatagatactttcataaatatacatgtaatatggttttaacacacatatatatacataactatttatatgatctgtattagtttcttgaaacgatattgtcaagtgttattcatgagattttacgtttcagtaaaaatattgttcgtcttattcattaacatgttattcttaagtttacttacatagagataatataatactcatgtacatttgatttagacttagaactcaacatttcgaatatagtataatatcatctatgattctatatatgtatggaaaattgaactacaactttagtgtcttgatagttgggcatgcatcatccaatccaaggtttcgatttgcttttacaatgtcgagaagagctagatcctatgtaattatgtattggctaccaaacaaatcacattcatattcgctaaataaccagttaaccactaactattttgttttgtcggtgaatgtcaaggattacgcaaataaagaatcatataagaagaataagattaagggagacgcactattatagttttcaccaaaagtggatacattctcctcgactaactccccgaaaatgtggagagaagcacccagaccaaatgggcccacttacctctccttagggatacttttgtctttttcatagcaaacggcaaccaacattcaacgtagctgcgccaaaagaataaaccttccctactagtaaattaccattgcgtgacctcgtgttagcccggacaacctgaaccggccagctcagattctaatttatatgttagggagatttggaaattgattacaagtgaaattgtaatggcaaggaatctatacaatgatattaaaagtaatcaaaccaagaaagttataaagtcaatattattcatatctaaacaaatacctaatatcaaaaaacaaatgctgcacatagctaattgaataagaaatcaatattgatcataattaaacaattaccaatttggtcaacaaacaaatgatgcacttagttatctaatttttttatttgtgtttaatcataagtttttagataaagtggttcaaaccatatactgatatacgcacgtaaagatttgtatgttgattagccaataagcttacttttatataaagtataaattaaccaaacaaacaacttcttcacaatagagaattggaaatctaactatgcaatattgatcacaatgaaagtacgtacgacgaactaaaattagttctaaaacatagaatatgatgtaatccactcccataccatatagtagttttttaaaaagaatacaacaaaaacaatttaagttcgaatgtacaaacaactgcatggggaacgcctcttcactttttttttttatttttcttttttcctaagcatcaatagagttatagggatgcctcaatttttttattttaaagtataaattgttgttaaaaacaaggaaatagaataaagtataaagtatatatttattaataactccaagaaattaaagtgtttcctttatatttatatagatgtaattaatttgtggtaaaacaattttaccgtcgagtgtctgtgactccgtcttcttcttcttcttctccctctcacatcgtcgtcactttctttttggctattcttctctctgtcatcgctgtctctgacttcattgtcttcctccttcttcctttttgcttttccgtcgtttttctccgccggatttttctctctccaccaccactacctacctcctcctttgtctcgctggaaattgtttccgagctcaaaattaagttcctgaagatcgggttctagtccttttccatctcggagaagcgtctttagatctgggcaagcactgccatcttcaaattttttaccttttttctccttctctatctctcttcaccaactggggtttggttacgggttaaattgatggtttccgaggcggctagaacctcgtgggctcttgtttgtagatgatgaacggtccttcgtgtaaggatcgaagagggtggttctcttctgctctgtttttcacatggaatggcagatcttgtgacctatagtaatgccgaccacaaccttgaacaggttcttctgctcactacctttcatcatttcgattttgctcagtttgggaaagagtttatttgttctaagcagtagaaagctcaaatctttgattgaaaaatgtaatctaaggagtttatggattgaaacccaagtttaaatatttgagattttgtttgttcaaattccagcaaatctctaagtctttctcaaattcttctttgtaataccaaagagtcaattagctggatttaaaatcaccattgagactcattacttggtgatgtaaacgaatatg

SEQ ID NO: 20485 - DNA, 3000 bp, Unknown; identical to SEQ ID NO: 4888
  misc_feature (1)..( 3000): 2750-1469P.txt file - cDNA_ID_1826446; gDNA_ID_1620744; Annot_ID_49670

SEQ ID NO: 20486 - DNA, 1694 bp, Unknown; identical to SEQ ID NO: 4887
  misc_feature (1)..( 1694): 2750-1469P.txt file - cDNA_ID_1826452; gDNA_ID_1620744; Annot_ID_49667

SEQ ID NO: 20487 - DNA, 1694 bp, Unknown; identical to SEQ ID NO: 4887
  misc_feature (1)..( 1694): 2750-1469P.txt file - cDNA_ID_1826452; gDNA_ID_1620744; Annot_ID_166563

SEQ ID NO: 20488 - DNA, 3000 bp, Unknown; identical to SEQ ID NO: 4922
  misc_feature (1)..( 3000): 2750-1469P.txt file - cDNA_ID_1826456; gDNA_ID_1620745; Annot_ID_49717

SEQ ID NO: 20489 - DNA, 3000 bp, Unknown; identical to SEQ ID NO: 4922
  misc_feature (1)..( 3000): 2750-1469P.txt file - cDNA_ID_1826456; gDNA_ID_1620745; Annot_ID_166646

SEQ ID NO: 20490 - DNA, 3000 bp, Unknown; identical to SEQ ID NO: 4929
  misc_feature (1)..( 3000): 2750-1469P.txt file - cDNA_ID_1826460; gDNA_ID_1620745; Annot_ID_49716

SEQ ID NO: 20491 - DNA, 3000 bp, Unknown; identical to SEQ ID NO: 4923
  misc_feature (1)..( 3000): 2750-1469P.txt file - cDNA_ID_1826464; gDNA_ID_1620745; Annot_ID_49715

SEQ ID NO: 20492 - DNA, 3000 bp, Unknown; identical to SEQ ID NO: 4927
  misc_feature (1)..( 3000): 2750-1469P.txt file - cDNA_ID_1826468; gDNA_ID_1620745; Annot_ID_49714

SEQ ID NO: 20493 - DNA, 3003 bp, Unknown
  misc_feature (1)..( 3003): 2750-1469P.txt file - cDNA_ID_1826498; gDNA_ID_1620745; Annot_ID_49699
aacccttctttcatttgatgatgatcagcaactcctcctcctactgcattgttgtcgtttccatgtgacatcacttgttgcaaatttacctttaaggcattaaccacagattcattgtattttgctttgtaatgccagttctgagcttccactgccacttgttttatcttatccacgagttcccggttcttcttgttcatgctttcaatctcatggtctttctcttgaagcttcttactcacatccttctctaaggccgtgacaaaggacgtgacatgtctctgtttaatatctctcacacctttcgccatttgatctgcctgttccaagagagaacaatttcaacgacatgggatatgtaagcaaaaacatacgctttgtagataaaattaatacccggaatttgataaactgatcaagctcgtcgttctgtctattgaggtccaatctgatattgtcaccgagtgactgatagactggagttgttatgcttccatttgctgaagttacagaagagttgcgctcatcatcatcataagatagtctcagaccagttgacactaagttctgctttgggacttcatcttgaacaacagtattattgttgttgtagttataattcaaagagatctgcagcttctgctgtctctgcataatattgttgttttcagtttcccttccgcgtgtgctattaagccgcatcataggagcaaggttatcattagcaaagtagtttacaggatcaatagtacaaccagctctcactgcaaccacatacaaaggaacaagcttttagctctataaagttctaacaacattcaaaccaaatgaataacaaaattcagaaacttactcgtcccaagcaagtgaagctgattcaacgatgtgtttgattgataccgaaactggctgtcgttcattagaacctgcggcacagggttatcattgttgcctcccaacatcttctctagagcttaaccgttttatgtgtatatatatacccgtaaagaactgaaacagaaaaattacagtaagaaacctgtagacatacgaaactaattagttgtaagatatgaaagctcaaatatcttcagcttttgacatgacgagccaagatgtaataagatttaactgtcctaagcaatacagattacaatccaactagagacaaagttgagatctttgaggaaactatggttcatgatcaactcctatgtgatgaactttctttgatcttgcctaggaaccaaatttagagatcatggtcaaagattcatctgaatattaaaccaagtaacaaaaaacaggcaaaataaattattatgtcaaaagtgataaaataaggcaaacctctggaacatggaagaaagatagcaactccaaagaacaagacataacctaaagatcttgtaagagagaagctaagagaagatttgtacctgttagagattgcccataaaaaaaaataaaccgtagcttccttcagatcctacaaacctaaaagaaatcattatcacaggctcacagcgatccaagtttgcttatttgcatcaattaaagtttaaaaaacaaaaaaaactgtaaaattaagaagtcgaagagaagctaaatcaatcaatgaatgattcagaatcttaagaagaagaagatgggttttgatgatagaaacgctttgaaacaataaaatccaataatttaattcaaagattttaaatttaaggagaaagaagaataaaagaaacggatgggaaaaaagaaagaatgaaatgaatgatggaaaggtgagaaatcagcagaggacaggacacagttgtgaaggagtgggaggagttgggtggcaaagtcgagatattaaaaacaaaacaaaaacttgaaaaatagactcgaaaataatactaacattttttttttgggagatgatgataacaagaatagtaatagtaaccggtggcggtggtattggttctgctgatttccccgtgagttgtgccttctctctggtgtgacgccattttactctacttttctccattttccctctgtcctttttctccttttctatttttttcttcctgaccagttcaattcttcttcttctttttttaaataaagaagagttcaaacttttaaaatgggcaacactaatttgtttgctaatttacgatagggacccaatgtatggtcgtccggtttagtctttttgttttttattagactaaactaaatttgaaatcacatgtggtttgttatttatctactttcgtgtttgagttgattggaactagttttggttttagttttgtttagtttcttggctcattcttctggttatcttggtatgctataataaaaaaaatactggagtgagaaccttcaccattatgggtttgaactgccataactaaatttggagaatatgattattcagatcgggtttgtttagaaatcgacatttctacttatatttggaaaagttatatagtagaaaatcaaacaaaatgtcgaatgttatatttctcgtttcatgattttctatatatctcatttgtttaattataagacagattgtttagttcgttcttttcgtttactgttttctcaaatttgttttgtagattttttttccatattcggcgaccaatcatataattatcttttaactaatatgtggttaattaaaaaataaaaaaatgtcgatttggttcggacttaagattagaatttcggtttggtggtaacgaaaattttaaaagtcagaaatcaaccaaactccggttggacggttcagccgcttcggttcggacttaagccatgccgctattagaaaaatggatgtttttttttctagtattcacacgtgtccataaaccctaattttccagttttatgaaattgaagaacgaaattgaagtgaaaagtgaaatcgtgcaattttcatcttcctcttctccttaaaccctgatttcggattctcacaatcgaacttggctgcagagaaggatg

SEQ ID NO: 20494 - DNA, 3003 bp, Unknown; identical to SEQ ID NO: 20493
  misc_feature (1)..( 3003): 2750-1469P.txt file - cDNA_ID_1826498; gDNA_ID_1620745; Annot_ID_166626

SEQ ID NO: 20495 - DNA, 3000 bp, Unknown; identical to SEQ ID NO: 4913
  misc_feature (1)..( 3000): 2750-1469P.txt file - cDNA_ID_1826502; gDNA_ID_1620745; Annot_ID_49698

SEQ ID NO: 20496 - DNA, 3000 bp, Unknown; identical to SEQ ID NO: 4910
  misc_feature (1)..( 3000): 2750-1469P.txt file - cDNA_ID_1826514; gDNA_ID_1620745; Annot_ID_49693

SEQ ID NO: 20497 - DNA, 3000 bp, Unknown; identical to SEQ ID NO: 4908
  misc_feature (1)..( 3000): 2750-1469P.txt file - cDNA_ID_1826530; gDNA_ID_1620745; Annot_ID_49689

SEQ ID NO: 20498 - DNA, 3000 bp, Unknown; identical to SEQ ID NO: 4908
  misc_feature (1)..( 3000): 2750-1469P.txt file - cDNA_ID_1826530; gDNA_ID_1620745; Annot_ID_166611

SEQ ID NO: 20499 - DNA, 3003 bp, Unknown
  misc_feature (1)..( 3003): 2750-1469P.txt file - cDNA_ID_1826550; gDNA_ID_1620746; Annot_ID_49734
cttgagttttcccaaaaaagaaaagattttggtatgattttcccacgtgaaacaatattgtagattaaaatagtagtgtataatggtggcttagtgagtttggttaatatcatttttcacatacccgtagtgagtttttccttgtcgtggttaagtcaggcggcttagccgcagtgctaaggttaccatcagtgaggcgatattcatgcatgatccaatctgtttttatccctttaggaggctttccaccgtaaaaaacaagcgctttcttgacaccaaccttgtgactattgcacgtaaatatcggtttatcggttcccgttgctttccaataaccggaagttgctgcccggtttggcctaaccccatttggatacttccgatcccgaggactaaagaagtaccactcgtgctctccaaaactcgccttgcctaaaccattcaaaatattattatccacaagatagttactatatataccaaatttaaatagtggctagattacagtggtcatagtaaaattaaatcgtacattttaatcatatcattaaagcataaattaggaaatataaatacttggaagctcccaaggatcaaacttgtaaagatcaatctctgcgatgattgagactggaagtggaacagaatctgctttcttcttgaggtaatgaactactagttcctcatcagtcgggtgaaaccgaaacccgggagggagatgcggatggcccggccctatgctcgaatcccccatgttttccatcaacttctaatttgatataatgacgatattttcacgaaatcagtctcatgatcgtcaagagaatatgtaggaaaagtatagattattttggagagtgaatgtgtttcatataagatgcgagaagaaataggtgttaggtttgtgtgagcatatgagtaccgaactgggtccctcgacgaggaaattacacgtggctaatcgtagggcccaaaattagcggccaatgggcattaaattttggagaaaaggcagggttttttcgaactgccttatgtcatgcctttcttatgctacacatcacgcacatacctcattttggtttttgtgtaagattttataaaaactagaaatgtgggaattctctataaatatattttaaaaaattatcgtgttaccaaaatgtgtttttcgttcgcaattgaactctagtaaactatgaagataattaatacaaagaaaatccaaatagtcgactgtagtagttatatatatatatatatatatatatatacatgtataaactttgggtactagcataattttccaagttagtaatattatcaataatcaagagtttcaaattactgatgatgtttttaggaatcgatcgactcgttgcatggaactacacgaggtgtacgaagattcttcgtcgtcgaaggacattgttcaagagatatggtgaggtgactttatcaggagtcaggagatatgaggtcatggggtctgctaggatgttttgttacatttcggtggacatcactaggacgtggtataaaaagactggctcaccttgatatagattgaatctagtggacctcatcctatagtagtaggcccggccataggcatgcatgcgatgctaagactcaaaaggtaaggcccatgatcctttcatctaaattcctttgaagcctaactttaagagtttgggtgatagaattgaggatttgcttctgagatatggactaggctaggattttaggcctctaatggctaaatttttgagaaatttcttcttcttccccctcttcattcttgtgagttgtgacaattctttttgacactatgttagcaaactctccaaattcttcttcttccaactgttccatgagaggattcgaggagactcatatattagtattacacacggttgtggttcagattactgtccactcccagcccagcccagccccgacatctcgaacattaattctatatatatttcgtctcttttttttctgtacgaacaaaatagtttagtatttcacttataaaattaacgagagtaaaaactacgatataatacaaatggccattaaagattaaataaatataaacatcaaaacatatcaaagcggactggttagttatgttacgttgtaccacctttttataactttttttaaaccgttttatttatatataagctgttgactaaactgaaaacatcaaaacatatatcttcctaagaaattggtgtgtctatttaaatttaatatctgagttaatatgaaatttaattttattgatgaatttgtattttgatttaatatctttattctagatacagttggtcatttctctttgcttttactatgttactttttgagatggtgaccgtttcaaagatgtttacacttttacttacttctttcaacggggtttagtataaaaaagaacaaaggaaaagtagcgaatactttttgacgcaaatataactaacaaatattttttgattcaaaagtatatgtacgtctttgaaggtttttttttaatcttttcttcaaaccacacgagaaaagacaaaaatgcttgcaagtcaaagataagaataaattcactcgtttcttgaagtattttcaaatagacactagtattttcttgaagtccaaatgttagaaaaagaagtttgaattcttccttgagtattagcgcgagaagaatcacaatttttatgaatatttacaaaaacaaagtggcaaaatatccaagatccgacatggagttctcggaccttattcacaaagacacaaaccatagctaactataagcgtaaaacgatcacttataaatatagagacacatatctatttcttactaatctaaaatcatttcttcttccacaatactaaaagcaattatcaaaaatatatcaaaaccagtcttcatctctaaatcactctttcgcttaattcaatcatttcatttcttcctcgtctattcaaaactcttcgatg

SEQ ID NO: 20500 - DNA, 3000 bp, Unknown
  misc_feature (1)..( 3000): 2750-1469P.txt file - cDNA_ID_1826554; gDNA_ID_1620746; Annot_ID_49733
accaaataataatttatgagatataagattgttatttctatattgcgtgtatgatttctaacaaattcgtaaaagaacctgtaatcaaaaaaacagtcgaatgttttataaaataaaatgctatgtttttattttaagcaatcctaatattttaatatgtaaaaatgaactatatattgcattcatatggttaaaaatgataaatatatatatatatatatatatgtatatatatatatatataatgtagaaaaacaagagcatacccattagatgtatcaaacgtgagtcctacggtatattttgcttcctcgagagccaattgaaacctccggatctcggcagctggacgtgtcttgtcgtcttttacgcagagttccgatggcttgacatcgcaaaatatagggatgactcttttcttgttcttcacgagcaatgcgagttcatggagacagaagtaagagtcacagtaacgaggagagaaaaccgcaataccaaccccgcatgctttgattgccatgtcgatctcgacaaaaagcctgtctccaggctttaaactcttactatccaagaaagcagtcaaacgttgtctagtgaaacaatcatatagtaggcctgaaatagtcttcttggtatcgatcccacgatgattgatgaaaatatcacatgggtttgggtaaggtagggttggatttgcaatgtatcttgttgtgtatgcgatttttgagcaaggtgttaacaaacgttgcatcgaagagttttgaatagacgaggaagaaatgaaatgattgaattaagcgaaagagtgatttagagatgaagactggttttgatatatttttgataattgcttttagtattgtggaagaagaaatgattttagattagtaagaaatagatatgtgtctctatatttataagtgatcgttttacgcttatagttagctatggtttgtgtctttgtgaataaggtccgagaactccatgtcggatcttggatattttgccactttgtttttgtaaatattcataaaaattgtgattcttctcgcgctaatactcaaggaagaattcaaacttctttttctaacatttggacttcaagaaaatactagtgtctatttgaaaatacttcaagaaacgagtgaatttattcttatctttgacttgcaagcatttttgtcttttctcgtgtggtttgaagaaaagattaaaaaaaaaccttcaaagacgtacatatacttttgaatcaaaaaatatttgttagttatatttgcgtcaaaaagtattcgctacttttcctttgttcttttttatactaaaccccgttgaaagaagtaagtaaaagtgtaaacatctttgaaacggtcaccatctcaaaaagtaacatagtaaaagcaaagagaaatgaccaactgtatctagaataaagatattaaatcaaaatacaaattcatcaataaaattaaatttcatattaactcagatattaaatttaaatagacacaccaatttcttaggaagatatatgttttgatgttttcagtttagtcaacagcttatatataaataaaacggtttaaaaaaagttataaaaaggtggtacaacgtaacataactaaccagtccgctttgatatgttttgatgtttatatttatttaatctttaatggccatttgtattatatcgtagtttttactctcgttaattttataagtgaaatactaaactattttgttcgtacagaaaaaaaagagacgaaatatatatagaattaatgttcgagatgtcggggctgggctgggctgggagtggacagtaatctgaaccacaaccgtgtgtaatactaatatatgagtctcctcgaatcctctcatggaacagttggaagaagaagaatttggagagtttgctaacatagtgtcaaaaagaattgtcacaactcacaagaatgaagagggggaagaagaagaaatttctcaaaaatttagccattagaggcctaaaatcctagcctagtccatatctcagaagcaaatcctcaattctatcacccaaactcttaaagttaggcttcaaaggaatttagatgaaaggatcatgggccttaccttttgagtcttagcatcgcatgcatgcctatggccgggcctactactataggatgaggtccactagattcaatctatatcaaggtgagccagtctttttataccacgtcctagtgatgtccaccgaaatgtaacaaaacatcctagcagaccccatgacctcatatctcctgactcctgataaagtcacctcaccatatctcttgaacaatgtccttcgacgacgaagaatcttcgtacacctcgtgtagttccatgcaacgagtcgatcgattcctaaaaacatcatcagtaatttgaaactcttgattattgataatattactaacttggaaaattatgctagtacccaaagtttatacatgtatatatatatatatatatatatatataactactacagtcgactatttggattttctttgtattaattatcttcatagtttactagagttcaattgcgaacgaaaaacacattttggtaacacgataattttttaaaatatatttatagagaattcccacatttctagtttttataaaatcttacacaaaaaccaaaatgaggtatgtgcgtgatgtgtagcataagaaaggcatgacataaggcagttcgaaaaaaccctgccttttctccaaaatttaatgcccattggccgctaattttgggccctacgattagccacgtgtaatttcctcgtcgagggacccagttcggtactcatatgctcacacaaacctaacacctatttcttctcgcatcttatatgaaacacattcactctccaaaataatctatacttttcctacatattctcttgacgatcatgagactgatttcgtgaaaatatcgtcattatatcaaattagaagttgatggaaaacatg

SEQ ID NO: 20501 - DNA, 3000 bp, Unknown; identical to SEQ ID NO: 4941
  misc_feature (1)..( 3000): 2750-1469P.txt file - cDNA_ID_1826557; gDNA_ID_1620746; Annot_ID_49732

SEQ ID NO: 20502 - DNA, 3003 bp, Unknown
  misc_feature (1)..( 3003): 2750-1469P.txt file - cDNA_ID_1826565; gDNA_ID_1620746; Annot_ID_49730
gaagatgaaaaaagagctccggattcgtgtctagtatctgcaagcatgggttcaaagaagaatcagattttgcttctttattacatcagaaaagtgaatgactactctccacacaagatatgaagaagcattgtacctcaggattcaaatcattaactttttcaatcgcatcctcgacatttccgttttgaacagcctttttaacagccattcgatcagtaatggtcgcaagatctatctctgctgtttctcgataaggaagttcaaaaggagtagataagctaaacatcaaacacaccaattccataaacaaaaactcaaaaccagaatcagaaaaaggatacgtttggttccagactccctttggaatttctcagcagcttcaacatatccttcagtcacaagaaaattcatcaccaaagtattcatatcttctttcctaagcttcacagcatttagtttcttctcccattcttcacgtgtgatcattttcttcgaagtagcctgcgacaagccacgattaaaactaggtcacacaacgtgcataaagattaaagttttccaaaaacccatcatcaagttgtatcaaataacacaaagaacagactcataagaggagtcaaaattaccatatcttcgtcgtcttcttcaagctgattgataaaaatacgaaacagtgacattagaacgccagtgaggctctcatatcttgaaatctaatctaatccactcaatacgaaattaatacctgttcgagcaacactccgatcagagctatttccaaaagaaattgactttgtgatcagatagtgatacaaagtaatttagggctttagtcaaaattcaagctttaatctcaaaacagcacaggagtggtagttctaagaaagagagagtgtgcgactattttcctcaaaaattgaatataacgatgtacctggagaagtggagaatctggggaagattatctgggaacgattcttgcaaataatccggagatttggcgatcgatttgcttctagattgcttgcgaaagtctcttccctaaatttacaatctgataaaacaaaaaaaagttggaggttttcgatagagaagaagagatcgggtttaaattattaggatgttgacgaaccgtcgatgaataatccggtttaaattattaagggaaccggtttgtttttggatttggttctttatataccggatagtattatgtaactcatttccaaatgattttaatacccaaagatttttaaactattttacctttgaagaacaaaatttcgatttaaaatcataatttttttttatttttttttttaaatcttggaggttgtgggtcaaagtccgtaatcccccaggcctgaaaccacagcataaaatattagtttcgtcccaagcgtcactcgaaccggcgacctctaagctttgcataaggtctttaccaattgagctaacgacacttggttaaaatcataattaaataagactgatgttaaaaatctctatattatttggaatttgatacacaatttaaaaccaataactgatactctattatactctattaaaatcaactattaggtaacaaatatgtgacataaacattttgcagtccgatgcaaaatatatctttcaatctcaacaatatgttttttcttggtcaacaatctaacaatatgtttaattgcatcttcaaactaaagtcccaaaacatgttttgttctttgcacatggttgtttgtgtggaaccacaataagacaaaggatcgattgcagaatttgaggtcttctagctagttgaccgactaagaatcaatggaccacttattctttaatattatttttcccaactggtttggaaggacttagtgaagaagttacactaaaacttctcgagtcaatcctcatatggtttcttttggcaattcctatctctgcaaaatcaaaggctcttcatatcaattaatatggcaagcaactactttgagacatggcaagaacggaattgttgatcacataataagcaagctctttctcatcaaactacctacaaagttttgcgctctacaagatatttgatcaatcataaaaatggtgatctcgtataatactagtcttcttttagggctaacaaatgattcagaagattacaaatgtgctttgtagaaattagcaatatagtgctttgtagaattttatgaccacaagattggtaagatcatttagtcaaatatatgttttatctcttcttattgattgagatgattatttttctaatgagtcgatccacatgtctaattccaattgatctttgtgatttagtttcatatttgttttctttaacatatgaaatttttttgttagtgtagaaaatctaattttcacacaattaaaaataatttttacaataaattatgattagcaaacacttcaaaaaaatctccattacttaaacacttcagtttcctactactaattaaagttgtttccttttgtttaaattgtgattttgctttaacaataaagatgacggcgcataaaatataattatatataatcatgcattattaaataatgaaaaaatggaaaaaaatgaaagaaaaagaaaaacaaatgttcgaccgttccttatttaaagccggaagtcccatagccttgtggtgtttactttttccaattcggagaaagccaaaagagagaacaaggcaataaaaagaagccaccgtcgctacaaaaagtcgcgatttttattttctctatcccaactgctctctacctttcctcgaaaattccttcaaaacccaattctcaagccttcttcttcgtcgtacctgaaaattctacaatctctggatctacgcgtctacttctgaatttcgatttgggtttcccgggagctgaaattccgtgacttttgggttttctgatttagggtttgttcctcttctcgttctttctcgggttagttttttttttttttttttgtgatttttgatg

SEQ ID NO: 20503 - DNA, 3000 bp, Unknown; identical to SEQ ID NO: 4939
  misc_feature (1)..( 3000): 2750-1469P.txt file - cDNA_ID_1826569; gDNA_ID_1620746; Annot_ID_49727

SEQ ID NO: 20504 - DNA, 3000 bp, Unknown; identical to SEQ ID NO: 4943
  misc_feature (1)..( 3000): 2750-1469P.txt file - cDNA_ID_1826569; gDNA_ID_1620746; Annot_ID_166673

SEQ ID NO: 20505 - DNA, 3000 bp, Unknown; identical to SEQ ID NO: 4938
  misc_feature (1)..( 3000): 2750-1469P.txt file - cDNA_ID_1826573; gDNA_ID_1620746; Annot_ID_49726

SEQ ID NO: 20506 - DNA, 3000 bp, Unknown; identical to SEQ ID NO: 4937
  misc_feature (1)..( 3000): 2750-1469P.txt file - cDNA_ID_1826581; gDNA_ID_1620746; Annot_ID_49724

SEQ ID NO: 20507 - DNA, 3000 bp, Unknown; identical to SEQ ID NO: 4934
  misc_feature (1)..( 3000): 2750-1469P.txt file - cDNA_ID_1826593; gDNA_ID_1620746; Annot_ID_49721

SEQ ID NO: 20508 - DNA, 3000 bp, Unknown; identical to SEQ ID NO: 4957
  misc_feature (1)..( 3000): 2750-1469P.txt file - cDNA_ID_1826605; gDNA_ID_1620748; Annot_ID_49747

SEQ ID NO: 20509 - DNA, 3000 bp, Unknown; identical to SEQ ID NO: 4960
  misc_feature (1)..( 3000): 2750-1469P.txt file - cDNA_ID_1826607; gDNA_ID_1620748; Annot_ID_49745

SEQ ID NO: 20510 - DNA, 3000 bp, Unknown; identical to SEQ ID NO: 4960
  misc_feature (1)..( 3000): 2750-1469P.txt file - cDNA_ID_1826607; gDNA_ID_1620748; Annot_ID_166713

SEQ ID NO: 20511 - DNA, 3000 bp, Unknown; identical to SEQ ID NO: 4955
  misc_feature (1)..( 3000): 2750-1469P.txt file - cDNA_ID_1826621; gDNA_ID_1620748; Annot_ID_49741

SEQ ID NO: 20512 - DNA, 3000 bp, Unknown; identical to SEQ ID NO: 4954
  misc_feature (1)..( 3000): 2750-1469P.txt file - cDNA_ID_1826625; gDNA_ID_1620748; Annot_ID_49740

SEQ ID NO: 20513 - DNA, 3000 bp, Unknown; identical to SEQ ID NO: 4954
  misc_feature (1)..( 3000): 2750-1469P.txt file - cDNA_ID_1826625; gDNA_ID_1620748; Annot_ID_166706

SEQ ID NO: 20514 - DNA, 3000 bp, Unknown; identical to SEQ ID NO: 4952
  misc_feature (1)..( 3000): 2750-1469P.txt file - cDNA_ID_1826633; gDNA_ID_1620748; Annot_ID_49737

SEQ ID NO: 20515 - DNA, 3003 bp, Unknown
  misc_feature (1)..( 3003): 2750-1469P.txt file - cDNA_ID_1826633; gDNA_ID_1620777; Annot_ID_167780
tgtagaaaattaggatgcaaagactttagatatttcaatcttattggtaaaaataaattctaataattatttttattattattaaatatagtttataaatattatttatgataagtatgaatttatttgaaaaatagtgactacaattgatttattaataattatttttttgaaaattaaataattcataaataaatgaataaataaaaaactcattttacaaattcactatttaaaatcttcaaatatgatttcaaaagaacagaaaagtaaaactacatttaatcaatcaaaattatttgataataaaatataaatatttttttaaatagttttgaaattatatggaaaaagaaaaaagtattttattttcttttattattctctcttaaagtgaaagtctcgtttatgagactttagaaagaaaaaaaaataaacgaaaagaaaaagagtttacaaacttttaaaattaataaaatcttgaaagggagattggttaaaaaataacttgaagaatttaaaatattttcaaaactaaaaatattaacaaagtcttctttgtcaccgttaatgtcctcttgttcttctatttcaattcgagtttggttatagaaggaattgagtcgggtctctttatcgtttcttggaaaaattcctttatggtggtgtttatattgatctttttcggcggtggcgacaagtgacgactcctctggattcatgtgaatgctctgtaaaagatcgaacacaacttcttttgtaagttcttttaatccctctaatactttctctatagtttctttcgttggcttcaatttttcggccactgaaactatcttcgtgccggcttttctcatcgttgaaaaaaaagctctaaaataacagaaagaaaatggttaaactggagaagaagacggacccaattcaattggaagagatatgtgtatacgttcatttatgagtctaaaagaaaatatccatacatttataactctacatccctaaggaaataatatcccatatctctactcatacacattagtcataaaatcttacttggtacttgtcaaattccctaattgatcataaactcctactaaatatctcataaatgatgtttatacacataatatataccataaccatcgatatttacgtcgtatcaatctcacgtcttaatcaatgcccatatcaaaacttcatgcataccttatatagctagcatctctcccatgttcgaacaacttcacatctcgaattaaatcaaatctttagacgatcaaaactattatacaattttatccaattatattagtattaattaaataaattatattgttataaattttagtggcctgttaaattagttattatccatactgaatgtttgttaaaatatataacatatgctaagtttaattcaccaataacacatataacaaaaagttgttaaaaaaattgggagatttgcaaaactaccatttttttactacctttttgcaacaatacttttttatgttgtccatttttaaaaataccctttcccttgaacaaaatgaccaaattaccctcatctaatagaaacatgtaattggaaactgaacttttcccaccaattttttggcgccaaaatttttttttcccgccaaaaaaaaagtttccgccaaacttttttcccgcaaaaaaaaaaattctgccaaaagaaaaattttccgtcaaatttttttttcgtaacaaatttttcctcagccaaaaaattgattttaaaaatccttataaatattttctggcggcaaatagatttacaaggaattttaaaagggttttaaaagatttacaagagatttaaaaatgttttaaaagatttacaagagattttaaaagagttttaaaagatttacaagggattttaaaagggttttaaaaaatttacaagtaattttaaaaggttttaaaatctcttgtaaatctttcaaaacacttttaaaccctttaaaaatctttacaaatcatttgtaaatcttttaaagccctttaaagttccttgtaaatattgtaaaccccttttaaaatccattgtaaatattttaaaatccttttaaaacaattttaaaccctttaaaaatctttataagacatttgtaaatcttttcaatccctttaaaatatcttgtaaatcttttaaaacccttttaaaatcccttgtaaatcttttaaaaaccttttaaaatcccttgtaaatcacccttttaaaatcccttgtacatcacccttttaaaattccttgtaaatcttataaaacccctttaaaatcccttgtaaatcttttaaaactcttttaaaatcccttgtaaatctatttcccgcaaaaaaaaaaattggcgggaaaaatatttttgaaaacaaaatttggcgggaaattttttttcgaaattttttggcgggaaatttattttggaatattttaggcaaaaaatattaatatttcattttgtaaacctaaaacaatttccaaataagagtaaaatggtcgttaaaaatttaaagagggtagaaataaaaatggataaaataaaagagtatagttgaaaaggggcatcataaaaaaggcattagaaataatttttcatgttttaaatgacaataatttaaaagttaactaaaagagtctataatgggtaataacaaacgtataacactagtgaaaataggacttgtcaatccatgaattaaatattttcatggatacggtcgtagggaaataaatctttccgtcagtcctaaaaagcctaaattattggatagacaaaaatctgaaaatcttaaatcacacgtaaatcaaacgtatttacccccacatggaacttaatccaatctattaaattcaggtggcgaccgttcattggttcttgtctctagaatcccaaaggactcgtttccgagtataaaaatacgttcctcaattcaaagtacaaaccaaaaacagaaccgaaacagaaaatg

SEQ ID NO: 20516 - DNA, 3000 bp, Unknown; identical to SEQ ID NO: 4952
  misc_feature (1)..( 3000): 2750-1469P.txt file - cDNA_ID_1826633; gDNA_ID_1620748; Annot_ID_166701

SEQ ID NO: 20517 - DNA, 3000 bp, Unknown; identical to SEQ ID NO: 4951
  misc_feature (1)..( 3000): 2750-1469P.txt file - cDNA_ID_1826637; gDNA_ID_1620748; Annot_ID_49736

SEQ ID NO: 20518 - DNA, 3003 bp, Unknown
  misc_feature (1)..( 3003): 2750-1469P.txt file - cDNA_ID_1826657; gDNA_ID_1620749; Annot_ID_49776
agttaaccgcaaagtggtgaaggttaagtttaacgcgcgaaacagcgggggagaaagagcttggacggtcgatggaaccgaatgctagaaattctgaccaccatggacggtagctagaaacagaagctattagattgtgcaccgacaaggagataacatcaccagcggagagacttatctcctccgccgggatcagaacactctcccccggtgctaacatcgccgatcaccggacaccacttttgagttctctagtcaactagtttaaccgaaattaaaagttttgaaggtataggtatatagcaaaacaaaaagtggttcccacgttgattaacgttttgggatgggccagttttattttagggcccataaaagtcgggtcggatcctcttcaaaatgtggattcggttcagcgattctcttctcggtagttctcaaaagcagagagcagcggcagagacgtctgagtagaacctgggatccaggttcagttattttaccattataccccttgaactcgtcttcttcgtcaaggtaatcttcgatttcagatggaatctgtagaaatctagattccaatttgcttaattgccaatagtttgatgggtttttgcggttttgcgaatccgaggctctcggaggtgagattttcgtctttgaatttagagttctcgggtctgcttagttcctttaagttccagagatgatgaagaaaaatctattttggattaagctcaaatatgaactctgtaattcattatagcactagtgttgcggttcgtaaagcttctcgctttctcttcacatcgaggaaattttgcaatggtagcatcggtggtgatgtaaccgataacgggaccgaagagcccttgaagataacttgggaatcttcggagatggattgtgagtttgaccaggaggaaaatggtgagaaaatctctgttagaaaaaggtttatggagagtactaaactcagtgcgtctcgggttctcgatacgttacagcaagattgtcccggtttcaatacgaaatcagctttagatgaattgaatgtttcaatctcagggctattagtgagagaggttcttgttgggatcttaagaactctgagctttgataataaaacaaggtgtgctaagctcgcttacaagttctttgtgtggtgtggtggacaagagaatttcaggcacactgcgaattgttatcatttacttatgaagatatttgctgaatgtggtgagtataaagccatgtgcaggctaattgatgagatgatcaaagacggttatccaacaacagcatgcacgtttaatctattgatatgtacttgcggggaagcaggccttgctagagatgttgttgagcagttcatcaagtcgaaaactttcaattaccgaccttataaacactcttacaatgccattttgcattctttgctaggggtgaaacagtacaagctgattgattgggtttacgagcagatgttagaagacgggtttacgccagatgttctgacttacaacattgtaatgtttgcaaactttaggttagggaaaacagatcggctttatagattgctagatgaaatggttaaagacgggttttctcctgatttgtatacatacaacatcctcctccatcatctagcaacaggaaacaagcctctcgctgctcttaaccttctgaatcatatgagggaagtaggagttgagcccggtgtcatccatttcactactctgatagacgggctgagccgagctgggaagttagaagcttgcaaatactttatggacgaaacggtgaaagttggatgcacgccagatgttgtttgctacactgttatgatcacaggatatatatcaggtggggagctcgagaaagccgaagaaatgttcaaagaaatgacagaaaaggggcaactcccgaatgttttcacatacaattcgatgatccgcgggttttgtatggcggggaaattcaaagaggcgtgcgcgttgctcaaggaaatggagtcaagagggtgtaaccctaattttgtagtgtatagtacactggtgaacaatctaaaaaacgcggggaaggttttagaggctcatgaagtagtgaaggacatggtagagaaagggcattatgttcatcttatttcaaagttgaaaaaatatagaagatcttagttttttttagtttgtttcataaggcttttttgtgatatcgattaaacggatttttttttttgcctacctcatgttccttaacatgttttagtaggctgttgtgtattagccattttaaccgaaccaaatgtattgaaccgaagtgaaaagaaccaatcagaaccaaacgaatggatactaaattttaaatccgaattcactgaatagatacttaaaaatctataaaaatacttgaaaataaccgaacaatatccaaaaaaacaaaatttaccgaatagatactaaaatttaaatccgaatgaactggaaccaaaacttcaagatacccgaatgaacactatagaactgaaaccgatcggataaccgaacatcgaagactaattttcagaaattgaaataaccaaccaaaaaaaggaaaacgcatcgtcgacagcagggttcgaacctgcgcgggcgaagcccaacagatttcaagtctgtctccttaaccactcggacatatcgacttgttgtgcagaatcgaacgtaccttttatataattgttacaaaaataaaccagcccaataaaggcccataaatggtggcttcgcttgaatcttctagttgacactaaaggttctctttacgactccggcgcgtgtttcgttatcgactttagtaaaaaaaaaactcggaatctgaatccgatcaaatctgaacaacaccggcgacgaatctctgcggcgtagatttagatttcatcccggggagacttaaattgatgcagtagtgaaatatcacggcgaagggatggtttgttggtaaaagagccaattgaaatcagttatg

SEQ ID NO: 20519 - DNA, 3003 bp, Unknown
  misc_feature (1)..( 3003): 2750-1469P.txt file - cDNA_ID_1826677; gDNA_ID_1620749; Annot_ID_49769
attgattcaaggtagctttctttctctttacactgcacctgaaaagtttcagaaatcatgtctagccaatacttatgagctctggtgctctgtgctttagtcaattgccagaattccttggaggttcatgctcttgctttggtgatggaggagggtgtcttcgctctaataaaggaccctggaatgatcctgaaataatgaaggtaaaatctatatctttttagattttgctgttagttttcgaggatgctgttccttaaggaacttttaagtaggagttcagattctatttcggctttgtacatgaagctcattttagatctattccttgattagctcatctaccatggagaatcatcactttttaggcaaagcaccagaaagctgactgacccgcattattcttcttcctacataagtatacatccatcaaaggtaaatgattctatctagccaatttctctgtttgtcgtagaacttttttcatggttaatatgacaatgcaactttggattttcaggctatacaagctgagacttcagcagcagagtcgatatcttgttctgatgttccttcttctccaactggaagattatgctcagcctcttctcatgtgaattcagcttatgaggaagtgagttcttgtgttagtgcatttttgtcacagaacaccttagttgatactgaccagaacagtatgatctatgtaggctagggcatcagatgttaatggctattatagttgcgacgacaagtttgccatacctgacaaagctactaaccgaaaaggccaagaaaggcaatcccaataccaaatgcgtgaacttaatgcaacaactatcggtttaaaatgtgaaacatcttcaccaggttatacttcttattaatgcttttctcataaaacaatttcattttatatgtctccttttttaattcaaatgttgctcagtgctaatattacagatttcttctatagttttctcaccttttgaatttcatcttctctctggtatctcctaggtgctcccatcatccgttggcttcatgatttaagggtaatgattgacaagataaaatgtgagaacctagcgaaaagactactttcgttaatgctgaaactagctgcagtttttcgttatactccgcttgagcttctgagaagccagactacagtcagcccttcaagtctaacagaagatgacagtcggtgcagcctcatctcaccacctcctagagagcccacaatgaaagaccggattcttccatgtttggaacgtattcagaaactggagaaaagttatgaggatattcggaacaaacccgttgcaatacctgtagagaaggagagaatgttgatggattctttagatagaatcaagtcagttgagtttgatctcgacaaaacaaagagggtacgatacctttcctgttagttttaaaaccttcaaacttaaagattcagtatggactcaaaagcgttttttcattggttgcagcttttacacgccacggtgatgaaacagatggagataactgaaatgctgcaaaatatacgagactcccaacttcacgtaagaacctaatctgcctcagtatagcaaggaacattgtgatgagataactaacactcgagattgttctttgtgcagagaagaagaagattgttctgttaataaaccataagagaacatctgagttttgcataaatacaaatctgcacatacagagaaagagagagagagaattgaaaacaaaagacatgttagtttctttagctctttcccttctcttctaacttatttcacaacttttttttgcctttctaaataggtccctatgcttccactttttaagttataaaaagaagaagaagaagatagtgacagagaaagactctgatgatcaatcctgtctgtgataatttagattgagagagatcagaattttaaaaaccaaatccttttgttgtaatcagtgtagataagaaactacactaagctaaacaaatgagattttgtaaatctttcccaaggtattttgataatgagaaaaacactcttgagtctctgaagaatccattttgtttaacatgaaagcaaaaactatattattaagtaaaacatttatatcagaatctgatatttcaagtggatttgcagttgttaatgtttatgattagagtttgatatatcatcaaggttgcataataatgaatgatggccaatgagataaagacaaaacagccctcgtaatcagaaccctgtattggaattatataagggtaaaaccgtcaaaataagtaacaaaataaggaaattttaaatcagaaaaaatagagaccgtccttttccactgtgaacgaagataaatttcgctattcctctctctctctctctctctctctctctctctctctctcttcttcttcttctccgttcgtgctctggactcgctcgaaatcgatccgatgataatttatgcagctcgaaacttaatttagaatcatacctttttctggatttggctgacgaatccgttttcaattgcacgagttgcttcgccaggtgaatctatcgatcctaggttttctccgcctctgattttttcttgttcctgagtttttggaatcgaattttacgattggtagggtttgtgttcttgaggaggcttgtgaagtatttattatttggtttcgtttctcccatcttcgattatgtcggtagttttggtttctggaaatggactttgatatttgtgtacatagattgcaggtttgatccttgtttctgagcgatttgcttgttggagattgttataatctcatggagtcgtaatctattaggtgttttcatgcttgattgttcactaaatcacatttttatgttttaagtatgttggtgttattggattctactatattgtagcttctgtggtccctggctttcgtagtttttagtaataaaggtgctttttgatatatgtaggtttatcaacttaagaatg

SEQ ID NO: 20520 - DNA, 3003 bp, Unknown
  misc_feature (1)..( 3003): 2750-1469P.txt file - cDNA_ID_1826681; gDNA_ID_1620749; Annot_ID_49768
aaacataagtcgaaggaatagtttcttggaaactaaactgaaaacgaaacaacatttcaaatagattgcagaaaatctaaaccccaaatagaagagattgtaatatactcgtgcaaaaacattttagtatttttttaataaaattttggagaagtgacttccccgcaaaagtatgagaaatcttattataccaataattatgtaataagtactgtggtaatttgctggtgagactttcagagcattaaatgttttttaacttggatttttatttgtcggcacgcaattgaagaaaccaagtgaaaaatttaatggcgaatgatggtttgatgatgcgtttgtacagaagaaaaaaacgatagtgtcttgtgtcgttttagagcggtaaaagtaaaacagtaatcattaaaaataaaataaaaaatcatttgataatgatgtaaattttatttcttgccgactgaatttatattcgaaactgtacaatttcttgaacgtactgttatgttttgatgggacctttctcatttattgctggacccgtttttatttgcaaacaaaaacaaatacgaatagtgaaaaataaaacaaaaagatttattgaaaatatatggtaactaattgataagtgttgataacttaatatacgagtgaaaacttttgataacgaaaaataaaataaaaaaaagttcgaaaaaaagaagaacatataggagctgagtaatgtacgtatatttatgagaagaacacataacataatgataataaatttataagaatgttagtattttcttttaatggttaagaaatggacaatcctagtatgaatctaaaatgatgggatgcatgcattaaattaatcaggctgaggaatattgacacgtgtccatatccatatgtggttgtccgaaaaagtcaacttactccagttaattaccaccacccttttcatttcttctagaaaattaaaaaacgttacgaaaaacttaactaattgtcatatcgtatacgttacaaagattattgactaattatttattcaacgtatttttgccatttaattttggttcattgacttattatttttattagtttattgactaccagaccattaaatagatttagaattagataaaacgtcaaacaaaatagctgaaaaaggatagtaatttaggatactctccaactaaagtttttaagcacttgacgttaataacgaagttattaactagttaatcgatttgaaataaaacaatccaagataatttttcaaattttcgaaataaagcgactaacatcttgataaacataattgttttgaagaagtctaaacttaaaccgaaaaagtagagggactttcttaaaaaacaaaaactaattatcttctagtaaatcaaccaaaaaatcttgtagtacctgtaaaaaacctaaacttgaacaaagcagtatcttaagggtatgatttaaatcaagtttgggaatgaacaaacccactatctacatgctttcaaaacaaaatactacagaatacagattgtgcattttaataacagaataatataaatgacttgtaacaaaaaaaaaagaataatgtaaatgacactggggaaaacaaatgtggtattaaaacatattaaacagtttatgaaaacaaattctaaggaaaaacgaaagttatatacatgttggggtgaatttattagacattgaaatcaataattaaatactcatgggggaagaaaaggacacgcatgcaaaatagagacagaccaagggtaacaaaaagctactgaccaacgctgccaatgcacactttcttttaccttctttctccatttgttcactctgataaggaccattggacccaacactacacacaatattaccaaacctaaagaattttttttctttcaaaatgaaccaaaagaaaagaaaagaagagtatattaatttattaagtagtagcgaaaactcaaaagagtaaagaagcagaagatagaagaagaacaacaacacacgcgagaaatttcagatctttcctctctccgcatctccctttttgcatcctcgtgtaatcatcgtctaagaagaagaagaagaatccttttgcttgttgctttactttctctgcaaactttcgtatctttgcgtgtttgagaatctctctatctttctcggatttggagagttatcgaagagatcgtgtcacattaaggtaaaaacagagttttaattagagttctgtttcggttctgttttttttttggtttgtcggtgggtttactgttaccccttccgagaatcgagggttgagatctcatccgtattgttcttcttcaatcggcattactgcgaaatctaacgtttttattgttttttccgaatcactgattcagcggaataacagagtatgatggttttttgatttcgacgttttctgattactactgtttctttttaacggtttctgtctcatttaaagtcttgagatttgcatttatggcgatagctaaagtaatgtcttttttttattaggattgaagacaagtctttaatgcagagaaatcgtgtgaaaatggattcttaagccccacttttagttgcagatctggagctttttactgggtttctgctaatttatcgacaagaacaaaaaaaggtttacacaagtttttgtttttatgtttctgttttgtggttaatggcttaggcaaatatcttgtgggtttggtactgctttagttcttatgttcacgaggaatcctttgctttgaaagtctatggccgtgtaaaagagatatgtatttaatgtaatcacaggaagatttacttttgattcaaaacccaagaaagttatgatgattcttggtttaatttgttttgacaagttttgtcttttgtttctccaggtttgttttgtctcacaagtgatggtcgtatgactcacatgcatgtcctctgagctcgtttagcatcaataagctttccctttgaattgatatg

SEQ ID NO: 20521 - DNA, 3003 bp, Unknown
  misc_feature (1)..( 3003): 2750-1469P.txt file - cDNA_ID_1826695; gDNA_ID_1620749; Annot_ID_49764
cagaggagcaaagggcttgaagagaaatgtccatgaagcttatggattactaaaggaatccattttagagattagagctacaggattaagtgatccgttgattaagcctgaagtttctttcgaggtgctattctgtcacataataaaaagtgtgctgacaaaagaaatcattacttattgctttgttgcctgagctaaaaattgctaaccctattcaggttttcagttcgttaacccgaaccattgcaactgctaaaaatattaatgggaagaacccacgagagagctttctggacagattaccaaagtccactaaggatgaagttctacacgtaagtccgacattttccagtgtcctaagtgacaagaagctctatatgtactagttagtgaagattaggtagtaatgcatatggataagaggacttttcttctttcatctacagcattggacatcaatacaagaattactgaaacatttttggtcatcttatccgataacaaccacatatcttcataccaaggtaatgttattgcaattttcaaatctcccagtcccagaaattgctatatatattgattcctaggctttcacgggaaatttaatcttattatacaccaagagcaagttattataccaaatatttttcgtcgattcttgtgatgttatattattatcatgcaggttggtaaactgaaggatgcaatgtccaatacatattcaaaacttgaggtaagctttgaaattcttcatctttctgacagaataagcaactgatagtaaatctgctatgttaaaacagtagttcctaatcataccaatgcgtttacgaaaatgaaatttttgggtaaataaaattgatgcagtattgtagtcgaatcttatttgcatatatatggtcaactgtacggtttccttgatattaaactccatgtaactcaggcaatgaaagagtcggtgcaatctgatctccggcatcaggtttctctactggttcgtccaatgcaacaggttagcttcttccaatatctacggaagagttttatacttttattacatcatgtctcggttaagtctatattttccactcatattgcatctatatccagtttctacagccttgcattgtaatccggtttgaaaattgatcttaatcggttttctctgctaggctcttgacgctgcgttccatcactacgaagtggatctgcagagaagaacagctaagagcggcgaaagaccaaacggctacgtatagaggacaaaaaaactaaaactaaaaagctttgcaagatctttgaattgtttcatcagccttggttggtgtttttgaaaatcttcatttgtccctttttgtccgaccattgagatacaaaaatgcgtttatattgtagtaatattttcttttcttttttttgttaattaggcgttatattgttaactgcgagagacaacaaagagattttctcgatctgaacatttttaagtttgcaatgtattagtaaattctctacaggctttgaggacgttactacagctccaagaaagctctcagtgccataattgtttggttatttggttactggtgaatatttataataatgggacaataatagagaaaatgcttcgatggcgtagtagatttcaatgtttgaatcgcatcaaacaacaatccaaattagaaatatataaaattcaacataaaactttttttgacatagcattcatggataacttttgatttgaatgattaatttactcattgtgaggaaaaaaataaaaacagataaagttactcattgcttgtcatattgacatgacatacaaaattcaagctccataagtaaagctataaagaaaaagaaaagggggactctccacttttaggtttcatataaactcgttaactagagattgggttttgattaagcacgatataatatatatggccgaaaaagccttttggttagtttacttggctcacgttttcgtcttcatattttcctgtggacttgtcttctccttctagataacttgcatattcttctcttgacatattcgattttgttttctcctctaaacattggtgagtttaggttttctttgtgttgaagttacttatttccagacacagccacagaggtatcgatatttacttggttcataagttgatcgatatttacttggttcataagttgttgcattggtaatagatgtgtgacctttatttgagaacaaaccgtccaatggtcgtgcatatggtgggccttgtaccagagagatctgcgccgctctattaatgatcactgacataccactagtagatcttttcgcatgcaaatatattttatattattttctttgttaaaagatttttcctagtattatcatatgagtaattaatgtttgtcctttagctttcactataaaaacgcatattattatcgatagtaaacatcccaaatgttcggttcatagcattttcgattttcatatttgaaaggtagagaatcttttatatttaacaaattacaactttacaagcattgtagtgaggttatatttatacatggtgcatcaaatagatataggaggattagtttgcgatttcaatgattaaacccaaaaaagaacgacaagaataaagtaaacttaaacatcatattcgaaatgaatcatatccgtctatgaataattatgtcaactattcagcatttacaatcacgccaaacaattgacacgttattctctaatcataatattggttacaagaaatagaaattcaccgaattacctttccaaattttgttcaaataaatgtacgtatcttattatactaattttattttgcattttcgtgtccgctagatatgaacacgtcatcgataacgttctataaatatcattcctcttgtccaactaattaactcactctcgagagtagcgtgagtcttgaggtttcattattatttttttgttttccctacaaggaagtaacaatg

SEQ ID NO: 20522 - DNA, 827 bp, Unknown
  misc_feature (1)..( 827): 2750-1469P.txt file - cDNA_ID_1826721; gDNA_ID_1620749; Annot_ID_49754
gaattcgcgtactcctaacattgatgaagtcatgaagatgtccagaatgtaaatgttggaattgtacctttgattgaaactgcaaaagagagaagaagaatccatgagaagaagaagatgaagaacagagaaagaagcattagcaaaaggaagaagaagacgttgtcgcataagagacgtcgtgaagagaagagtcaaaggaagagaagaaagtcaacaaaccaaatgggtttgtgttttgtgagttgggcccataggtgatgagataagacccatacgaaataaaataagtgttttgtggttgtttagttaaggtccaacaagaagaggttgtaataactaaaagtaaactaaggcctagttagagtctaaaagtgtgaatcaaggaactagtgttccattgtgtagggtggctacttgtcttgtcttgtgtaagagtcatgattaggcctaagtgaaaatgtgtaagtgtgttgcaagtagaaaagtagtagtatatttatgagagtgttgtgttgtgtaagatgatccagtgtagtcattaaaattcttaaaacgtgttcttgtttctcaaagcaaaagagcgagaaagaaagtgaacagagatacaagagagtgagagaatgatggaagaggtcagaattacaacagtaaaacatcgtcctgttgagtaatagtaagccttaaatgccattatgaataattaaacgttaattattcatcacaaaacgacgtcgtgttgagtgtaggtgacgaaacagttgttttcttctcccttccattgttggtctttgaagagaagcagaaagttttgagaagaaaagatg

SEQ ID NO: 20523 - DNA, 3003 bp, Unknown
  misc_feature (1)..( 3003): 2750-1469P.txt file - cDNA_ID_1826789; gDNA_ID_1620751; Annot_ID_49824
ttaaaaaagaactgagtcctcctcgagacactttgtagcttgcggataacgagacaatttcaaatttccagcctgtgccagcggaaagtcaacaatcgatctaactgtaaactaagatcaaatatatgtattattgagggtttaggttggcatgtgcaactttcacatattttctggagaaatcaaatataataataatcattatcattgattgaatgatcatttttgacttttgatggcgctcctcctatcttccaattagtagtaacttttaagggttaagttgtatactagtcactttttaaaatttaattgaaaaaatagtcactttactatttataatttgcaaaatagtcacttttcactgtttgattcgtacacttagtttgtacaccacttttagtgatcagatgtatataaaaaatacacagcgtacactttacatttgtacaataaaagtgatgtacaatccaagtgtacgaatcaaacagtgaaaagtgactactttgcaaattatgaatagtaaagtgactactttcctaattaagtttgaaaaagtgactattttgccaaaacaccccttgaacgagatttatttaataaatactgtattaattaacgaaagaaattttaaaactttaatgacaaattgggtcaagtaagaggaacctgagattctttcgaaacagtattctctctattcgtcgaaaattgggactaagaacatcattattggtagtatcttaggttagtcttagcttagttcttaggatttttttataattgattttgaaaattttgaaatgaaagctaagaacatttcattttatctcttatgtaaaagactcttttaacaaatatatgattaaaaagccaaaattttctaataattaacctaagcaactaccaataaatgtgttctaacgttttgatttaatctggtatttagggtattttgtcattttggtttatctcttatggatttttgtttccatgtttgttgtgtggcattgcttaccaatacatagaatagaaacaataaatgaaactatgatgcttttcttacttaaagagtctgaggtcatcaaaattcaatatgtagagtgagtgagatgcaatttctatataaccgaaatccaactgcattattgtttgcatctggaagctcctctctttctgatgtattttatctacaaactaaaaattcatttgtctatcttgatgatggttcttttcttctttatcctcattttaacaaatattcgagaatcactttcgctatgaacgtgtgctaacatggatatatttctttttaatattcaatattgtgattcaaaccaaccatcgaattatatcagccttctttttaccacagtttggctcaaccaagtttcttccttttatttcaaatgagattgtttgagagattttgaatatgactgtatgtaacgtattgtatgcgcttaaactaaacttagtgctctccatatctgtttttactcgcattttgtcaactattgagttttatattgcccccttagctagtggatcttgtcgtggtgtatgcttattttgagataattaaaatcgaaagcatgatatcatcttgaagtttacagactgtccgagtgcaaagtctacgaaagatttaaagattagaaacttgaagaaatcaatgtgaaaattaatggtcatttacacatatatatatgtgttggggaaacaacggacaactgtacagcaataaagttccaccctacatatttatgtgagtttgtgaaaaaaaataaaaaatattttgctagcaaaaaagtaaaaaataaatgagacaccaaattatacgtaaaaatcatcttaatgtgaagagtaaaaactatgggaccgtagtacactcaaaatttcagacacgaccagcaaatgtccaaacgttctacacaaaaaaacctaacagatctatttttctcctcctctagatcttaaacctctcttttcttttgtttcttatacacaaacaattaggttaagagtgtttatatactccctcataacccttacccaaattccaatctcatggattaataatataaatggttgaactccaagtttggttctccaaatcaaaacccaatttggttcccaccactaggaggaaaaccaacagactcccctccgataaagtactggaggaaacaacaatcctgactatgataacatcgtatttttgcatgttttagatatagattttttatgttttaaaaaagtttttgtttgattttcaaatttttttagtactaatgtagtttatacgagattaatattgtagtctttaatggactgtatcaaccaaacctgactttgttggggcaatttgtggtaattgtatatatgaaaaaatggtaatgggcttgaatatcccacgaagccttttaccaagaagtttcacgcatcccacatcggaagggtaagagagtttgatagtggaaacttttatataaatagacttcactctccctcagattcaaatttcgcagctatgtggtgagcacaaagcgaactattctttcgccttttactaaagaataccgtgtgctctccacgccaagtggcttacgcctatttttggagggcccttacttaatcgtgaggcccaacatttaacctagtctgaatgtttcatttgctaaaaactttgtttgttgctactgggcccaaaggtttgaaaggccagttcaattgaaatatcgcataatcaaattgaatttaatctgcaagaccaattcgttaatcaataagagcatactaggatttcaaaccaaatgattcagttcaacgatgttttaaattatcatctagaaattataaaatgtgtaataaagcattttttttttttttaaacttgacaaaatctctaaatgtaaagtctaatataaaccttaaaatctaaaaactaattatgcttgtttttgagaaatttttaaaaaattgtgaaaaagaaaagtaatg

SEQ ID NO: 20524 - DNA, 3000 bp, Unknown
  misc_feature (1)..( 3000): 2750-1469P.txt file - cDNA_ID_1826789; gDNA_ID_2926183; Annot_ID_140669
aaaaagaactgagtcctcctcgagacactttgtagcttgcggataacgagacaatttcaaatttccagcctgtgccagcggaaagtcaacaatcgatctaactgtaaactaagatcaaatatatgtattattgagggtttaggttggcatgtgcaactttcacatattttctggagaaatcaaatataataataatcattatcattgattgaatgatcatttttgacttttgatggcgctcctcctatcttccaattagtagtaacttttaagggttaagttgtatactagtcactttttaaaatttaattgaaaaaatagtcactttactatttataatttgcaaaatagtcacttttcactgtttgattcgtacacttagtttgtacaccacttttagtgatcagatgtatataaaaaatacacagcgtacactttacatttgtacaataaaagtgatgtacaatccaagtgtacgaatcaaacagtgaaaagtgactactttgcaaattatgaatagtaaagtgactactttcctaattaagtttgaaaaagtgactattttgccaaaacaccccttgaacgagatttatttaataaatactgtattaattaacgaaagaaattttaaaactttaatgacaaattgggtcaagtaagaggaacctgagattctttcgaaacagtattctctctattcgtcgaaaattgggactaagaacatcattattggtagtatcttaggttagtcttagcttagttcttaggatttttttataattgattttgaaaattttgaaatgaaagctaagaacatttcattttatctcttatgtaaaagactcttttaacaaatatatgattaaaaagccaaaattttctaataattaacctaagcaactaccaataaatgtgttctaacgttttgatttaatctggtatttagggtattttgtcattttggtttatctcttatggatttttgtttccatgtttgttgtgtggcattgcttaccaatacatagaatagaaacaataaatgaaactatgatgcttttcttacttaaagagtctgaggtcatcaaaattcaatatgtagagtgagtgagatgcaatttctatataaccgaaatccaactgcattattgtttgcatctggaagctcctctctttctgatgtattttatctacaaactaaaaattcatttgtctatcttgatgatggttcttttcttctttatcctcattttaacaaatattcgagaatcactttcgctatgaacgtgtgctaacatggatatatttctttttaatattcaatattgtgattcaaaccaaccatcgaattatatcagccttctttttaccacagtttggctcaaccaagtttcttccttttatttcaaatgagattgtttgagagattttgaatatgactgtatgtaacgtattgtatgcgcttaaactaaacttagtgctctccatatctgtttttactcgcattttgtcaactattgagttttatattgcccccttagctagtggatcttgtcgtggtgtatgcttattttgagataattaaaatcgaaagcatgatatcatcttgaagtttacagactgtccgagtgcaaagtctacgaaagatttaaagattagaaacttgaagaaatcaatgtgaaaattaatggtcatttacacatatatatatgtgttggggaaacaacggacaactgtacagcaataaagttccaccctacatatttatgtgagtttgtgaaaaaaaataaaaaatattttgctagcaaaaaagtaaaaaataaatgagacaccaaattatacgtaaaaatcatcttaatgtgaagagtaaaaactatgggaccgtagtacactcaaaatttcagacacgaccagcaaatgtccaaacgttctacacaaaaaaacctaacagatctatttttctcctcctctagatcttaaacctctcttttcttttgtttcttatacacaaacaattaggttaagagtgtttatatactccctcataacccttacccaaattccaatctcatggattaataatataaatggttgaactccaagtttggttctccaaatcaaaacccaatttggttcccaccactaggaggaaaaccaacagactcccctccgataaagtactggaggaaacaacaatcctgactatgataacatcgtatttttgcatgttttagatatagattttttatgttttaaaaaagtttttgtttgattttcaaatttttttagtactaatgtagtttatacgagattaatattgtagtctttaatggactgtatcaaccaaacctgactttgttggggcaatttgtggtaattgtatatatgaaaaaatggtaatgggcttgaatatcccacgaagccttttaccaagaagtttcacgcatcccacatcggaagggtaagagagtttgatagtggaaacttttatataaatagacttcactctccctcagattcaaatttcgcagctatgtggtgagcacaaagcgaactattctttcgccttttactaaagaataccgtgtgctctccacgccaagtggcttacgcctatttttggagggcccttacttaatcgtgaggcccaacatttaacctagtctgaatgtttcatttgctaaaaactttgtttgttgctactgggcccaaaggtttgaaaggccagttcaattgaaatatcgcataatcaaattgaatttaatctgcaagaccaattcgttaatcaataagagcatactaggatttcaaaccaaatgattcagttcaacgatgttttaaattatcatctagaaattataaaatgtgtaataaagcattttttttttttttaaacttgacaaaatctctaaatgtaaagtctaatataaaccttaaaatctaaaaactaattatgcttgtttttgagaaatttttaaaaaattgtgaaaaagaaaagtaatg

SEQ ID NO: 20525 - DNA, 3003 bp, Unknown
  misc_feature (1)..( 3003): 2750-1469P.txt file - cDNA_ID_1826797; gDNA_ID_1620751; Annot_ID_49822
taatttagccggccaagatatggtaaaactgcttgatgtgattaagactggtgcaccaaactcaagcagtagctcaaataaacaggttgaagaaagggtcgaagtttcccttccatctcccactccatcaactaatcctggaatggtgcgttacttgaaacctattcaccccaaattcctcggacatatccaaaaccctattaatagatcatgttgccaaattgaatctcacgacatatagaaaaaaggaaagaactacaacaggctctagctaacaccaaactggattatgaattccagctgttagatctaacctgatgagtacaatgcccccattagaagatgttaatgtctgtttcttattctcttactgagttaagtgtattgttccaattttacagagtggatggggacaagaagggattcggaatccattttcaaggcaaaaccaagttggtactgcagttgctagatcgggtacacagcttcgtgttggttcaatgcaatggcatcaaacaaatgaacaatcaatcccacgacatgctccatcagcatacagtaactcgatcacattggctcacacagaaagagaacagcaacaatatatgcaaccaaaacttcatcacaatttacattttcaacaacaacaacaacaaccaatctcaacaacctcgtatgcagttagggaaccagtaggacaaatgggaacaggtacatcgagttcatggaggagtcagcagagtcagaacagttactactcacatcaagaaaacgagattgcatcggcttcacaagttacttcataccaagggaatagccagtacatgagtagcaatccaggatatgaatcatggagtcctgataatagcccaagtaggaaccagcttaacatgaggggacaacaacaacaagcatcaaggaaacatgattcttctactcatccatattggaaccaaaacaaaagatggcgttaaaccatatataagactatggttctttggtcctcaatatttgcttgtcatggttgaattagcattatactctgttcagacacagattttcatttttaactcacaacagattcatcagagataataaactaaaagaaagaatgaatggataaagttattactgtctcaattggcttcaaggcttttcaaaaacaagtcttgtcttcatcattattcgactaattccaaatctgattcaatttagtaacagtaacactggctaaactggactgcttcggtaattggagattttggtatacaatatccatttctgtgaagattgatagaatgtggatactgttcttattcgtacacaatttttgtttacaaagggaacactatatactgttcctattggtactctcagtttaaaccgatatcttaaccggttgggatggataaccgggtttacttttgataactaaaagaacccagcatatagtttaaggccacaatctcaacttgcaaatacagagttaacagccgtttaattatcgttcttatgatttgttctttgttaaatgataggtcaaaaattatttatgtcttttctaatttcataactgtgaatgtttattgaatccacattactcgtcaccgaactaagtaagcagtctctaaattaagacggtgatagacagtgctcttcataaatcgttcataagtcgttcaaacttgtattagccaaatcattcaaaaaacataattaagagatccaaaaacagaagattaaaattaagaataacagattaatgagagaaagagccaattagtcagataattgtagtctgagttttggtcgacagaataaattaatatatccgaaaaatcgttatcatcattccatcggctctttctcatcgtcatcaatcttaaacagtaaaaaccaaaccctaattttcccgagaaaactgaattgtgaatacaaataagcagtgaaggctcagaaggatccattggtaaattttctaatcagagaattactcataaaataggtagtttttaatcatcactgccttcactctaaaccctaatctagccgaaatcgaattgaaaacaaaaatggattcaaatcttcagagaaaatcaaaaattgaaaaccatcgaaccaaatcaagcaacgaaaaaagaagagaaaaaccgaaacatgaaagaactactttgtggaataatcgatcattagaatgagttgattgagaaaagtaatcacaggcggcaatatataagacaatggaggaagctagggtttacgttttcgaaagaatcgggtcggtcccgttaacccgatgagtttgggctttgtgaattacatcaaactcggcccattgagtatctagtttcgggtttgacccgttatacatgatgccacgtagaccgagacgaacaaaaaaagccagagaagaagaagtttcagagaaattttccgggaaaaggcgcaagaaaatatcagacaaaaaccgattattattctgggtccattttttcaaaggtttattaaaaacgcaaccgttttgtcaaaagcgataatgagaaaacttcttcgacgactctgggtttctcgggaaacaagtactcagagagagagagatatttcgagaaaagaagaaacactcctccgatccatacgaaataagataaaggggaaaccaaaccctaaatcgagcttctccttatcggaaatgtcgcacttccaccacttttgactcctccgttcatcggcggcgatctgaatcaccgtcaatctgatttcgtttctgtgaaggtatacgcatttgatttctactactgagagctgatttgagttcttttttaaaaatcattagctaagttagtttcagagctcttcttcgaatatctggaagagagacgagtttaggtcgatcgattttgaaaatggtatagagcttcgtttatttgtgagaacgaccaagctttttctattgtgatgttatggtataatgatatgcatagaattctacgtgaaccaggaatg

SEQ ID NO: 20526 - DNA, 3000 bp, Unknown
  misc_feature (1)..( 3000): 2750-1469P.txt file - cDNA_ID_1826797; gDNA_ID_2926183; Annot_ID_140671
tttagccggccaagatatggtaaaactgcttgatgtgattaagactggtgcaccaaactcaagcagtagctcaaataaacaggttgaagaaagggtcgaagtttcccttccatctcccactccatcaactaatcctggaatggtgcgttacttgaaacctattcaccccaaattcctcggacatatccaaaaccctattaatagatcatgttgccaaattgaatctcacgacatatagaaaaaaggaaagaactacaacaggctctagctaacaccaaactggattatgaattccagctgttagatctaacctgatgagtacaatgcccccattagaagatgttaatgtctgtttcttattctcttactgagttaagtgtattgttccaattttacagagtggatggggacaagaagggattcggaatccattttcaaggcaaaaccaagttggtactgcagttgctagatcgggtacacagcttcgtgttggttcaatgcaatggcatcaaacaaatgaacaatcaatcccacgacatgctccatcagcatacagtaactcgatcacattggctcacacagaaagagaacagcaacaatatatgcaaccaaaacttcatcacaatttacattttcaacaacaacaacaacaaccaatctcaacaacctcgtatgcagttagggaaccagtaggacaaatgggaacaggtacatcgagttcatggaggagtcagcagagtcagaacagttactactcacatcaagaaaacgagattgcatcggcttcacaagttacttcataccaagggaatagccagtacatgagtagcaatccaggatatgaatcatggagtcctgataatagcccaagtaggaaccagcttaacatgaggggacaacaacaacaagcatcaaggaaacatgattcttctactcatccatattggaaccaaaacaaaagatggcgttaaaccatatataagactatggttctttggtcctcaatatttgcttgtcatggttgaattagcattatactctgttcagacacagattttcatttttaactcacaacagattcatcagagataataaactaaaagaaagaatgaatggataaagttattactgtctcaattggcttcaaggcttttcaaaaacaagtcttgtcttcatcattattcgactaattccaaatctgattcaatttagtaacagtaacactggctaaactggactgcttcggtaattggagattttggtatacaatatccatttctgtgaagattgatagaatgtggatactgttcttattcgtacacaatttttgtttacaaagggaacactatatactgttcctattggtactctcagtttaaaccgatatcttaaccggttgggatggataaccgggtttacttttgataactaaaagaacccagcatatagtttaaggccacaatctcaacttgcaaatacagagttaacagccgtttaattatcgttcttatgatttgttctttgttaaatgataggtcaaaaattatttatgtcttttctaatttcataactgtgaatgtttattgaatccacattactcgtcaccgaactaagtaagcagtctctaaattaagacggtgatagacagtgctcttcataaatcgttcataagtcgttcaaacttgtattagccaaatcattcaaaaaacataattaagagatccaaaaacagaagattaaaattaagaataacagattaatgagagaaagagccaattagtcagataattgtagtctgagttttggtcgacagaataaattaatatatccgaaaaatcgttatcatcattccatcggctctttctcatcgtcatcaatcttaaacagtaaaaaccaaaccctaattttcccgagaaaactgaattgtgaatacaaataagcagtgaaggctcagaaggatccattggtaaattttctaatcagagaattactcataaaataggtagtttttaatcatcactgccttcactctaaaccctaatctagccgaaatcgaattgaaaacaaaaatggattcaaatcttcagagaaaatcaaaaattgaaaaccatcgaaccaaatcaagcaacgaaaaaagaagagaaaaaccgaaacatgaaagaactactttgtggaataatcgatcattagaatgagttgattgagaaaagtaatcacaggcggcaatatataagacaatggaggaagctagggtttacgttttcgaaagaatcgggtcggtcccgttaacccgatgagtttgggctttgtgaattacatcaaactcggcccattgagtatctagtttcgggtttgacccgttatacatgatgccacgtagaccgagacgaacaaaaaaagccagagaagaagaagtttcagagaaattttccgggaaaaggcgcaagaaaatatcagacaaaaaccgattattattctgggtccattttttcaaaggtttattaaaaacgcaaccgttttgtcaaaagcgataatgagaaaacttcttcgacgactctgggtttctcgggaaacaagtactcagagagagagagatatttcgagaaaagaagaaacactcctccgatccatacgaaataagataaaggggaaaccaaaccctaaatcgagcttctccttatcggaaatgtcgcacttccaccacttttgactcctccgttcatcggcggcgatctgaatcaccgtcaatctgatttcgtttctgtgaaggtatacgcatttgatttctactactgagagctgatttgagttcttttttaaaaatcattagctaagttagtttcagagctcttcttcgaatatctggaagagagacgagtttaggtcgatcgattttgaaaatggtatagagcttcgtttatttgtgagaacgaccaagctttttctattgtgatgttatggtataatgatatgcatagaattctacgtgaaccaggaatg

SEQ ID NO: 20527 - DNA, 3003 bp, Unknown
  misc_feature (1)..( 3003): 2750-1469P.txt file - cDNA_ID_1826801; gDNA_ID_1620751; Annot_ID_49821
agagttatccgaatataacaagtaagataatatgaacctgattagtagccgtgtcttcggcctgttggacaagagcgttaccctctgctgtgacatgctgtgaacgaataacaagttacagttaatgtcatacagtaattaagagactgcaagtagaccatgaagaaaagactatccatttgctaatcataaacaaaagaatgaagataggtaataaacctgcttaaagatgtttgcaacaggttccaagcctcgcaaaattttatggtaaagcctgtacatcctggagagatcatccacctgaaagtagacaaatataaccattaaagaaataattaagtcactaactactcaacaataaaaacaaaaatacttgctctaccttgtcatctcttagcaatgcacggcaccctgagtgttctttttctagaagctgacttgcaaacacaaccagcaattcatgttgtactttctgcatacaaaagattactatacaagtcaaacagatatcaatctttaaaatcaagtatgcctggactacgcatttaaaaagagtctggaaagtatctcaatacaaataacaaaattcaaaatcaaggcttatgcaagatctatggtttcttcatcaaacctacaagtacaggcataattacatagtgcataataaccaacctcaaccagctttggctcactgcttgagtgtaggtagtgagccactctctccctctccttctttagacattcttcagactgtaacatgaaagcacagaagttaataaataatttcaactattgtgaaataaaaacaaattttagaaaatgatatcacgagtcatgccttcaacatgtaatcagggcaagaatcttcctgaatccagcttgatgccttgcgagaataatacgaagaagtatcttgaagcatgaagctttcaaaatcttcttcatacctctccatctgccccattccaatctctacatagatatctaatacgtttttcagcagggccctatcaatctgctcgccctcccgttctttatcaacctgacagaagaacaggtcatgttagaccttgaatcaggcaaaagccagagttggatgtaactgcacaacaatattgacgccatacttacaagagctattacagcttgtttgaccttagaatgtagctcattataaacctgaagcgaacagaatcaaggaaaagttaaaaatatttcaatacaactgaaagctataaagccacaggaatgaatgccataccaggtcacggaagcatgtcaggccaacttcattcagtggtggaagtgatctccgagcaatgaagtaacggtcaaggtagtagaagaagcgggatagccatctgaccattactttatggtttgaccatcttttaaatagctcccgcagcataaactcatcatgcttctccctcaacgcaggcaaaacctaaccacagacaacaagagagcaaacattcaaaaccgtttgaatcaacttaaaaccaagaggggacaggacttcttgacatatgaaaccatgcacaaaagtggcatcttaaaattcagaggtagtaaaaacgagaagtttataagaaagaaactaaatatcaatcagactcactgttgagttaatatattcctcaaatgcttcccgatacttgtcataaagctgctgtgagtaatcatgaggaggtttctgggtgcacatgttgtagatagtcctgagaatcaaataaattccccatcataagtatcaggacaaacagccaaaccgctatataaggtaataaacaagtataaaacctacgtataaagcatcatatattgctcagagtcaaatgctggctcattcaatccttccagaatccgtttcagcttagtaattccagtctgcatatagtcccatccttgctccaagtcaatagtcttgcgctccatgttgacaaacaacttttcaagctctcctcaacctaagttaaccaaagaacaaggagaaaaccaaaatttagaacagcagtattaagcaacacaatgaaatgactgaagcgagagagtcaacaatatttatcattcttcagaggttataataacacgttaacacccacattatcgaatgcgaaacgagtattatcacccaaatcaaacccaaactatcagattgtgcgcaaacgaggacataagcatcagaatatactcgagaaacaatcaatccatgagataaacacgaaattacacagtagaaacgcaatccagagactccgacgtaaccctaacaatctcgatcccacaaaaattcaaataaaaacctagaaagacgaacaatcaacagaatgataaaaaaatcaactgtcgtatggaacaaaacaagcgagaatccgacagaaatagtgatacctcgagatcttaaaccctaataatcagaaaatcgcgtcgccgtaccccaaacagaccctgacgattaccgattcccgattacacaggatcggcgagagctgctgcgatcgaaaaagaagcgagagagagagagaatcaaaaccctaagaatcgttcaggaaaaaagcgtaaaatagagagaaagagagacgagacctatgagaagggcggtgaaaagatatctcaggaaacaaactcgttctcttctattctattattttcaggtcttatagatttaattatttttattttatgtcaactaatatattagtataatattaaacaaatttaatttcttaccttttcagagatctacatcaagacgctgcgttttataatttttctttgtaaagtaacttatttacttttatgcccctttattttgccttccttactcaaaccctaacccgaatcggctttttgacaatccgaaattaggtaaccatgttcattgaatttatcgtttcaacacattcgaatcactgagtcctacgtttcagtttaattccctgatgcacattttgaattcggtttgcgtattggtcttcgagttttccgtcggcggccatg

SEQ ID NO: 20528 - DNA, 3000 bp, Unknown
  misc_feature (1)..( 3000): 2750-1469P.txt file - cDNA_ID_1826801; gDNA_ID_2926183; Annot_ID_140672
gttatccgaatataacaagtaagataatatgaacctgattagtagccgtgtcttcggcctgttggacaagagcgttaccctctgctgtgacatgctgtgaacgaataacaagttacagttaatgtcatacagtaattaagagactgcaagtagaccatgaagaaaagactatccatttgctaatcataaacaaaagaatgaagataggtaataaacctgcttaaagatgtttgcaacaggttccaagcctcgcaaaattttatggtaaagcctgtacatcctggagagatcatccacctgaaagtagacaaatataaccattaaagaaataattaagtcactaactactcaacaataaaaacaaaaatacttgctctaccttgtcatctcttagcaatgcacggcaccctgagtgttctttttctagaagctgacttgcaaacacaaccagcaattcatgttgtactttctgcatacaaaagattactatacaagtcaaacagatatcaatctttaaaatcaagtatgcctggactacgcatttaaaaagagtctggaaagtatctcaatacaaataacaaaattcaaaatcaaggcttatgcaagatctatggtttcttcatcaaacctacaagtacaggcataattacatagtgcataataaccaacctcaaccagctttggctcactgcttgagtgtaggtagtgagccactctctccctctccttctttagacattcttcagactgtaacatgaaagcacagaagttaataaataatttcaactattgtgaaataaaaacaaattttagaaaatgatatcacgagtcatgccttcaacatgtaatcagggcaagaatcttcctgaatccagcttgatgccttgcgagaataatacgaagaagtatcttgaagcatgaagctttcaaaatcttcttcatacctctccatctgccccattccaatctctacatagatatctaatacgtttttcagcagggccctatcaatctgctcgccctcccgttctttatcaacctgacagaagaacaggtcatgttagaccttgaatcaggcaaaagccagagttggatgtaactgcacaacaatattgacgccatacttacaagagctattacagcttgtttgaccttagaatgtagctcattataaacctgaagcgaacagaatcaaggaaaagttaaaaatatttcaatacaactgaaagctataaagccacaggaatgaatgccataccaggtcacggaagcatgtcaggccaacttcattcagtggtggaagtgatctccgagcaatgaagtaacggtcaaggtagtagaagaagcgggatagccatctgaccattactttatggtttgaccatcttttaaatagctcccgcagcataaactcatcatgcttctccctcaacgcaggcaaaacctaaccacagacaacaagagagcaaacattcaaaaccgtttgaatcaacttaaaaccaagaggggacaggacttcttgacatatgaaaccatgcacaaaagtggcatcttaaaattcagaggtagtaaaaacgagaagtttataagaaagaaactaaatatcaatcagactcactgttgagttaatatattcctcaaatgcttcccgatacttgtcataaagctgctgtgagtaatcatgaggaggtttctgggtgcacatgttgtagatagtcctgagaatcaaataaattccccatcataagtatcaggacaaacagccaaaccgctatataaggtaataaacaagtataaaacctacgtataaagcatcatatattgctcagagtcaaatgctggctcattcaatccttccagaatccgtttcagcttagtaattccagtctgcatatagtcccatccttgctccaagtcaatagtcttgcgctccatgttgacaaacaacttttcaagctctcctcaacctaagttaaccaaagaacaaggagaaaaccaaaatttagaacagcagtattaagcaacacaatgaaatgactgaagcgagagagtcaacaatatttatcattcttcagaggttataataacacgttaacacccacattatcgaatgcgaaacgagtattatcacccaaatcaaacccaaactatcagattgtgcgcaaacgaggacataagcatcagaatatactcgagaaacaatcaatccatgagataaacacgaaattacacagtagaaacgcaatccagagactccgacgtaaccctaacaatctcgatcccacaaaaattcaaataaaaacctagaaagacgaacaatcaacagaatgataaaaaaatcaactgtcgtatggaacaaaacaagcgagaatccgacagaaatagtgatacctcgagatcttaaaccctaataatcagaaaatcgcgtcgccgtaccccaaacagaccctgacgattaccgattcccgattacacaggatcggcgagagctgctgcgatcgaaaaagaagcgagagagagagagaatcaaaaccctaagaatcgttcaggaaaaaagcgtaaaatagagagaaagagagacgagacctatgagaagggcggtgaaaagatatctcaggaaacaaactcgttctcttctattctattattttcaggtcttatagatttaattatttttattttatgtcaactaatatattagtataatattaaacaaatttaatttcttaccttttcagagatctacatcaagacgctgcgttttataatttttctttgtaaagtaacttatttacttttatgcccctttattttgccttccttactcaaaccctaacccgaatcggctttttgacaatccgaaattaggtaaccatgttcattgaatttatcgtttcaacacattcgaatcactgagtcctacgtttcagtttaattccctgatgcacattttgaattcggtttgcgtattggtcttcgagttttccgtcggcggccatg

SEQ ID NO: 20529 - DNA, 3000 bp, Unknown; identical to SEQ ID NO: 4981
  misc_feature (1)..( 3000): 2750-1469P.txt file - cDNA_ID_1826805; gDNA_ID_1620751; Annot_ID_49820

SEQ ID NO: 20530 - DNA, 3003 bp, Unknown
  misc_feature (1)..( 3003): 2750-1469P.txt file - cDNA_ID_1826805; gDNA_ID_2926183; Annot_ID_140673
agtctatgagtaaaatgtcactaaacaacaaaatgagaggtaaaataagtattattcgacacataaaccaaaacttgcctctgtttcagaagcaattgactctgcgaatcaatttgcgaactgttacgattttgtttcttcatagcttggattttcgcaaataacttggtccaccttgataacaaaccttttgccctgtttgatatgtctgatcttcaaatcagatgatgaaatcgaataaatcacaacaagaactttggcattgatgaaagctacgcagcatttaggtttttcagaaattacacctgatatcctatagaaacgaagtccattaacgctttgtaatatggcagacatattttcaggagatgctttgtggagaggtaaatgacaaagaacctgcgtgttaaatgtcaattatccataataaaacaatctgcatatttttacagccatccagctgcaagtaaattaatctcgtaccttcaggataagaagtaagacacttgtttgctcttcactagcagcttgacttaaccatgttgtaagtatcaaaacccctccttttgataaaaacctgtggcacatatagaaaatgactgtcaagacgggaatataataacaataaaataaaataagacagtgggtgaaagagaacccccaactagtaccagatcagcacagaagcatcttgtatctgcatgatccactccattagtttcacctggcctgaaaatgtttcctctttacgcagcagagaaaatatattctcaacaaagtatttgtctgaatcgctgatgtcaggtggaatatcttcaggtggaataagtgccactgtttcaccttcaccccagcttatagaacatgcctccggatgtatagagttcaagggaacgggttcaacatgatttgtggcattgttattttccggaacaccatcatcttgtaaagcatgcgtattggacataactactttctcccttgaaagcctcacctgtttcctcactcttgtcttttgagtaacaaaaaattctcgaacctgccattgaagaaaataataaagagacaaaccaaagtctcatgagtacctcaacatgacagatctaaactgacatggaattctaaaagcatggcaaaaaagagtacatatcatgtagaagaacaatacctgggcgactgtgatgccaaataaagcacttatctcccgagattccctcttactaatagcatctttaattgcgaaaactgcttgtagatacttaacagccttaggattcaacaagtctcttggccgctttcctgaaatatttacaaattcatcagatactaggcatcgagcacgtaaaagttgggtatgcctttaatgaacctagagagcaacaatgaattgaaacattctctgtgatatacgtaattatgccaaaagatctcacgaatcctaagatgactcaccaattttaatggacaaagcaccagcagcctgaaacaacaaaaaaattaaacagattaatgtctttaacagagatgattacttgatcagagaaatgacatataaacagttgaagcatcaccattacagttcacagaagaaacggagaggtcgagctatatgaatttataccaaaaacacctctaatttttgctagactcaatacccttcaaagaatttattccaaaatccgaatgacctgtccctctcagctttgcccatatcaccataccccaataaaacacgaactttagataccaaaaaacatagaaacaataacccaccatttcttgcgcaaggggattaacgccggtaagtttgcattgcgcaacgacgacatcttggagctgatcgatctggctatgaaaaagcaccttctgcgaatccaatagctccattaaagactccaccgagctcccgatttctatctcctccttgaacgcgtccatggccgccgacggaaaactcgaagaccaatacgcaaaccgaattcaaaatgtgcatcagggaattaaactgaaacgtaggactcagtgattcgaatgtgttgaaacgataaattcaatgaacatggttacctaatttcggattgtcaaaaagccgattcgggttagggtttgagtaaggaaggcaaaataaaggggcataaaagtaaataagttactttacaaagaaaaattataaaacgcagcgtcttgatgtagatctctgaaaaggtaagaaattaaatttgtttaatattatactaatatattagttgacataaaataaaaataattaaatctataagacctgaaaataatagaatagaagagaacgagtttgtttcctgagatatcttttcaccgcccttctcataggtctcgtctctctttctctctattttacgcttttttcctgaacgattcttagggttttgattctctctctctctcgcttctttttcgatcgcagcagctctcgccgatcctgtgtaatcgggaatcggtaatcgtcagggtctgtttggggtacggcgacgcgattttctgattattagggtttaagatctcgaggtatcactatttctgtcggattctcgcttgttttgttccatacgacagttgatttttttatcattctgttgattgttcgtctttctaggtttttatttgaatttttgtgggatcgagattgttagggttacgtcggagtctctggattgcgtttctactgtgtaatttcgtgtttatctcatggattgattgtttctcgagtatattctgatgcttatgtcctcgtttgcgcacaatctgatagtttgggtttgatttgggtgataatactcgtttcgcattcgataatgtgggtgttaacgtgttattataacctctgaagaatgataaatattgttgactctctcgcttcagtcatttcattgtgttgcttaatactgctgttctaaattttggttttctccttgttctttggttaacttaggttgaggagagcttgaaaagttgtttgtcaacatg

SEQ ID NO: 20531 - DNA, 3000 bp, Unknown
  misc_feature (1)..( 3000): 2750-1469P.txt file - cDNA_ID_1826809; gDNA_ID_1620751; Annot_ID_49819
ttatggaaacatattttaggctttgaaagaggcatttgagattttttgtaacaaaacggttgctggaagttcaagtgcagaactacttgcaacattttgcgacaatattctcaaaaaggggggaagtgaaaagctgagtgatgaagctatcgaagatacgcttgagaaggtacttttgtcaaactgttttttctttttcaagtctccaaagagtggtcctgaattttataatgttgttacaggttgtcaaattgcttgcatacataagtgacaaggatcttttcgctgagttctacaggtttatctccaacttcaatctttctttatctgtggatcgactctttttgcttctactctttgtttttcttgtaatgttttgtttttactagctttttgtggagatgccttgcaacaatatacaatttgattgacataagttggattactgagttgcaagccattttgtttatggttttgattgcaggaagaagctggcccgtaggctcttatttgatcgcagtgctaatgatgatcatgagagaagtatcctgacaaagctcaagcaacaatgtggtggacagtttacttctaagatggagggcatggttagtttgagtgtccctgtgtttcttattttaaagcggtgcgtgctctgatgacttatgttttctatataattttaatccgctggtgacaggtgacggatttgacactggcaagagaaaaccaaaacagtttcgaggattatctaggcagtaaccctgctgcaaacccagggattgacttgaccgtcactgttcttaccactggtttctggccaagttacaaatcatttgacataaatctacccagtgaaatggtaaaaactctattgattttcttacatacctgaaaaggagattgtttgcttctgatagatctaattcgttgattctttgtttcagatcaagtgtgttgaagtcttcaaagggttttatgaaacgaaaacgaaacacaggaagcttacgtggatctattcactgggaacttgtcacataaacgggaagtttgatcaaaaggccatcgagttaatagtgtctacttaccaggtactgtatgtttctcagaaaatactgatatatattttctatctgtaaacggactctgatgccacgttctctgtctctataggctgctgtgcttctactctttaacacaactgacaagttaagttacactgagatcttggctcaactgaacctaagccatgaagatctagttaggttgcttcattccttgtcatgtgctaagtacaagatactccttaaggagccaaacaccaagactgtctcccagaatgatgcctttgagttcaactccaaattcaccgatagaatgcgcagaatcaaggtttgtgacgttaatagtaatactcaaaagtctgcaagtttatgtcatgttttacatattgttaataactaacatcaacttgggtgatttgcgtcacagatccctcttcccccagttgatgaaaggaagaaagtcgttgaagatgtcgataaagacagaagatatgcaattgatgctgccattgtcaggatcatgaagagcaggaaagtattgggacatcaacaacttgtttctgagtgtgttgagcaacttagccgaatgttcaaggtaaattatacatataattatatttatacagagacatttgaagatgcacgtggtgatgaaactcattggatttgtgatgtttgttgcagcctgatatcaaagcgatcaagaagcgtatggaggatttaataaccagagattatttggagagggacaaggagaatcctaacatgtttaggtacttggcttagggcaaaaaaacaacaactatggaagtggttggctcatgaaaggaatctgcttgtatatttagaagtccatatggagactgtcctaaaacaaatttatcgcttcattttcgctatttttctcttttaaaaaatattcggtctgtgctttttttttgggatgcaaatttgccttgtggatttttgtttcttaaatattgaatggagatggagaaatggccttaatgaatgaatctctgctttctaatatatttatccttgatcatattatttaagttttatgtatctctgtgttatattgacggatgggaaagtcgtaacaaataatatgagatttcttataatcgaacgctaatgagacaaagatgaaccgacggaaggtgccttcctcaatcgccgaacattaaaaatcattgtaatcatctacgtcattagctatagtccaccagaaccgtaatagtttctgcttaggaccaatgtcttatattttaagccgtttttctgttgtatgatgatctgaaatattattgggatacaaagacgggtatgttaaggttaataacaattttgaacgggttaatggtggagctggtggattatattacttgattccaatgtgcttttttctttcttttttgggttaatatgaattatgaacggatcatcaaagacgatatttggagcctacacagagaatgatatatacgacatggagaaattctgttcatatatgttttgaggtgcggagtcattttactccatcgagcaaatgtttctcactttttatttgcttgagattctgttaaacaaacaaagaatcatgccattgcactatgatgaaaaagctgcgaggagatgtgcaaattataagaatcagcaaattccaacgggcttcaagtattacatgtatgggcctttaattaataaaatgggcctttaaagctactcgtatgtatcagtcctaaaccaaaagtaatagaccaataatgaattaaagtcaggcttattttagcaggcccatagaggctatagtcaatcctgcgccaggtgatagtgagataccgagtctagctccttggtttctctgcttctccttctctctcagatcaaaaaaaaccttcgtgtgcgtctctcgtcctctaaattgtcgaaaatg

SEQ ID NO: 20532 - DNA, 3003 bp, Unknown
  misc_feature (1)..( 3003): 2750-1469P.txt file - cDNA_ID_1826809; gDNA_ID_2926183; Annot_ID_140674
agtttatggaaacatattttaggctttgaaagaggcatttgagattttttgtaacaaaacggttgctggaagttcaagtgcagaactacttgcaacattttgcgacaatattctcaaaaaggggggaagtgaaaagctgagtgatgaagctatcgaagatacgcttgagaaggtacttttgtcaaactgttttttctttttcaagtctccaaagagtggtcctgaattttataatgttgttacaggttgtcaaattgcttgcatacataagtgacaaggatcttttcgctgagttctacaggtttatctccaacttcaatctttctttatctgtggatcgactctttttgcttctactctttgtttttcttgtaatgttttgtttttactagctttttgtggagatgccttgcaacaatatacaatttgattgacataagttggattactgagttgcaagccattttgtttatggttttgattgcaggaagaagctggcccgtaggctcttatttgatcgcagtgctaatgatgatcatgagagaagtatcctgacaaagctcaagcaacaatgtggtggacagtttacttctaagatggagggcatggttagtttgagtgtccctgtgtttcttattttaaagcggtgcgtgctctgatgacttatgttttctatataattttaatccgctggtgacaggtgacggatttgacactggcaagagaaaaccaaaacagtttcgaggattatctaggcagtaaccctgctgcaaacccagggattgacttgaccgtcactgttcttaccactggtttctggccaagttacaaatcatttgacataaatctacccagtgaaatggtaaaaactctattgattttcttacatacctgaaaaggagattgtttgcttctgatagatctaattcgttgattctttgtttcagatcaagtgtgttgaagtcttcaaagggttttatgaaacgaaaacgaaacacaggaagcttacgtggatctattcactgggaacttgtcacataaacgggaagtttgatcaaaaggccatcgagttaatagtgtctacttaccaggtactgtatgtttctcagaaaatactgatatatattttctatctgtaaacggactctgatgccacgttctctgtctctataggctgctgtgcttctactctttaacacaactgacaagttaagttacactgagatcttggctcaactgaacctaagccatgaagatctagttaggttgcttcattccttgtcatgtgctaagtacaagatactccttaaggagccaaacaccaagactgtctcccagaatgatgcctttgagttcaactccaaattcaccgatagaatgcgcagaatcaaggtttgtgacgttaatagtaatactcaaaagtctgcaagtttatgtcatgttttacatattgttaataactaacatcaacttgggtgatttgcgtcacagatccctcttcccccagttgatgaaaggaagaaagtcgttgaagatgtcgataaagacagaagatatgcaattgatgctgccattgtcaggatcatgaagagcaggaaagtattgggacatcaacaacttgtttctgagtgtgttgagcaacttagccgaatgttcaaggtaaattatacatataattatatttatacagagacatttgaagatgcacgtggtgatgaaactcattggatttgtgatgtttgttgcagcctgatatcaaagcgatcaagaagcgtatggaggatttaataaccagagattatttggagagggacaaggagaatcctaacatgtttaggtacttggcttagggcaaaaaaacaacaactatggaagtggttggctcatgaaaggaatctgcttgtatatttagaagtccatatggagactgtcctaaaacaaatttatcgcttcattttcgctatttttctcttttaaaaaatattcggtctgtgctttttttttgggatgcaaatttgccttgtggatttttgtttcttaaatattgaatggagatggagaaatggccttaatgaatgaatctctgctttctaatatatttatccttgatcatattatttaagttttatgtatctctgtgttatattgacggatgggaaagtcgtaacaaataatatgagatttcttataatcgaacgctaatgagacaaagatgaaccgacggaaggtgccttcctcaatcgccgaacattaaaaatcattgtaatcatctacgtcattagctatagtccaccagaaccgtaatagtttctgcttaggaccaatgtcttatattttaagccgtttttctgttgtatgatgatctgaaatattattgggatacaaagacgggtatgttaaggttaataacaattttgaacgggttaatggtggagctggtggattatattacttgattccaatgtgcttttttctttcttttttgggttaatatgaattatgaacggatcatcaaagacgatatttggagcctacacagagaatgatatatacgacatggagaaattctgttcatatatgttttgaggtgcggagtcattttactccatcgagcaaatgtttctcactttttatttgcttgagattctgttaaacaaacaaagaatcatgccattgcactatgatgaaaaagctgcgaggagatgtgcaaattataagaatcagcaaattccaacgggcttcaagtattacatgtatgggcctttaattaataaaatgggcctttaaagctactcgtatgtatcagtcctaaaccaaaagtaatagaccaataatgaattaaagtcaggcttattttagcaggcccatagaggctatagtcaatcctgcgccaggtgatagtgagataccgagtctagctccttggtttctctgcttctccttctctctcagatcaaaaaaaaccttcgtgtgcgtctctcgtcctctaaattgtcgaaaatg

SEQ ID NO: 20533 - DNA, 3000 bp, Unknown; identical to SEQ ID NO: 4980
  misc_feature (1)..( 3000): 2750-1469P.txt file - cDNA_ID_1826813; gDNA_ID_1620751; Annot_ID_49817

SEQ ID NO: 20534 - DNA, 3000 bp, Unknown; identical to SEQ ID NO: 4980
  misc_feature (1)..( 3000): 2750-1469P.txt file - cDNA_ID_1826813; gDNA_ID_1620751; Annot_ID_166795

SEQ ID NO: 20535 - DNA, 3003 bp, Unknown
  misc_feature (1)..( 3003): 2750-1469P.txt file - cDNA_ID_1826813; gDNA_ID_2926183; Annot_ID_140676
gcctctaatagcttctggttctttccgttctcatatatctagcagatccactacctatctaccatgacgccaagtagtgacggtactgtccgtcgtacttattgctctctatttttagaacatgacgaatgaattgtagttatctattattgtatccctcctaattctaattaatgtattcaactattagaatgtattgaaaaaatcgcttatttttctgtttgtaagttaaattttcctatatcacttattgagatgtttacataattcaaaaacgtcacataattatcttgcgagatataatcaaattcgagatatgcgctaagcaaacaagctccaaataaagtatttcaaattcaaaagagacaatttagtttcctagaaaatgttttctctcttctatcacaattcaggttgattcccaagcttgtcgatatggaagattctgtttgctagcttatcaatctcagcgactcctctctctaatttgagtctacaccaacaaaaactaaagggttcacatcattatgcctaaatggagctcatttataaaggaacaacttgtgcttaaggaggtaattctcagaccaaacacgaacatccaacataagaagtaataaaagctaagaaaaacagttatttacaaaaatcaataaataaaacaagttttgttttggatgaaaaaaaaaaaaaaaaaaaaacaagttttgttttgataatatattaacacaaaaaaaatcagttaatcaacttaatagtttaatatattaattattatccctttaagaatttttttttctaatgcccttttcatgatgccctttttcaactttacccttttgttttatccaattttatttctaccctctttaaatttttaatgaccattttacccttatttggaaattgttttaggttaacaaaatgaaaaattaatattttttcgccaaaaatattccaaaataaatttcccgccaaaatttgttttcaaacatatttttcccgccaattttttttttttggcgggaaatagatttacaagggattttaaaagagttttaaaagatttacaagggattttataggggttttataagatttacaagggattttaaaagggtaatttacaatagattttaaagggatttcaaaaatttacaaaagtcttttaaagatttttaaaggctttaaaattgttttaaaaaattttaaaatatttacaagggattttaaaagggttttacaatatttacaatggattttaaagggctttaaaagatttacaaaggatttgtaaagatttttaaagagtttaaaagtattttgaaagatttacaagggattttaaaaccttttaaaattacttgtaaattttttaaaacccttttaaaatccattgtaaatcttttcaaactcttttaaaatcttttgtaaatcttttaaaacctttttaaaatctcttgtaaatcttttaaaacccttttaaaattctttgtaaatctatttgccgccaaaaaatatttacaaggatttttaaaatcatttttttggctgaggaaaaatttgttacgaaaaaaatttttgccgggaatgtttttttttgtcgggaaaaaagtttggcagaaacttttctttttggcgggaaaaaaaaaatttggcgccaaaaaattggcgggaaaagttcagttttcaattacatgtttctattagatgagggtaatttggtcattttgttcaagagaaggggtatttttaaaaatggacaacataaaagggtattgttgcaaaagagtagtaaaaaaagtgtaattttataaatctcccttattttaatatacaaacaaatattatttttacttgtgtataattttgtcttttgataattttcattttttgataatgttaacaattttctagttttgttttaaatatattgtttaatttagatttgacatgtaatatatataaacagatattattttttacttgtataaatctaatattttaattgacacatgttccggtcattttaaaaaccaaactttatataataagataaaaatgataaatcttattctatttataaatacattttattaatttataaagaatacaacacatatacattcgttctaaccgtatcaattttaaagacacaaatacaaactaaaaccaaattaagttcaaccgaaccaaacgagataaaccgatctattctaaaaaaaaaaaaaaatacttcctttgtagccttttgattgttcgagcatcatcaagtttacattgttcgagcattatccaatccagtataaaatattattcacaccggagaacggtacaattcttcaataaaagatgagtcgacagcgaccgctctaatcagtggaactctgaagtttctgtatttttatctttcttacatgatctcattttttttattttttattttttcacaatcttacatgatctcctagtatcacttaattatatacaacgaaacatgtgaactggaacatagttgatagaaaggaaaaagagggaaaatgtgatttgattatagatttaactcattaacaatgtgtgattgtgtgtggatgctttaagtaaacacggaatagaaacgaataatatggaaactggaaagttgaaaacgcgtttcctaatttgtctcacagatttttaatactaaaaaaaagtggaatatataaactctataataaggtcgtaatcaaattacatgaagataatagagatcatttaccataattaatctaatcaaaagcaattagtattattgacaatgacaacaaatcatcaacacaaagaggaaaataaataaataaaaaaactcagaagaatctgtctcactgatttcttcatcttcttctcttcctggacccgacattccagtgttggtacataaaagactcttcctttgtctgttttttgttcccagattcatctttacttattgactaaattctctctggtgtgagaagtaaaatg

SEQ ID NO: 20536 - DNA, 3003 bp, Unknown; identical to SEQ ID NO: 20535
  misc_feature (1)..( 3003): 2750-1469P.txt file - cDNA_ID_1826813; gDNA_ID_2926183; Annot_ID_200437

SEQ ID NO: 20537 - DNA, 3000 bp, Unknown; identical to SEQ ID NO: 4979
  misc_feature (1)..( 3000): 2750-1469P.txt file - cDNA_ID_1826817; gDNA_ID_1620751; Annot_ID_49816

SEQ ID NO: 20538 - DNA, 3003 bp, Unknown
  misc_feature (1)..( 3003): 2750-1469P.txt file - cDNA_ID_1826817; gDNA_ID_2926183; Annot_ID_140677
aattgtttctttaaagcttaagtgagatgtgactgtgtctgattataagcagcgctttgagtatttaaagttcaaatctttcactttttttttttctttgtgttgctttagtgcaaatttgtggatgtatgatgaatcattttggtgaattgcagagctgatgttgttagggtttatatcgctgttactgacggtattccaagggctcatttccaaattctgtgtgaaagaaaatgtgcttatgcatatgcttccatgttctctcgattcaagacgagaagctggggcaagtgaacataaaaacgttacagcaaaagaacattttcagacttttttacctattgttggaaccactaggcgtctacttgctgaacatgctgctgtgcaagttggttactgtagcgaaaaggtaaattcaaataccttcagggcctcactatagtcatattaggtgttgctcttgctattacttgattgaatcagtacttacttctctccctcttgttttcagggtaaagtaccattgctttcgcttgaggcattgcaccatctacatattttcatcttcgtcctcgccatatcccatgtgacattctgtgtccttaccgtgatttttggaagcacaagggtgagcacaaaccaatatagaaattttctacattcaatgtatatataaattaagttctcaggtgtgaaacctctggtttatctatgttaatgcagattcaccaatggaagaaatgggaggattcgatcgcagatgagaagtttgaccccgaaacaggtactaaatcgattatatgctagcggaacattatgcatattgtttgattatttattgtgctttgttgcagctctcaggaaaagaagggtcactcatgtacacaaccatgcttttattaaagagcattttcttggtattggcaaagattcagtcatcctcggatggacggtatggtatctttaaattacattactagttttatattggttatttgtcctttggaactacccgatgttgagagtatgttgtttgcatgacagcaatcctttctcaagcaattctatgattctgtgacgaaatcagattacgtgactttacgtcttggtttcattatggtaaaatcttgattacttacaaaaattgagatttggtaatcaagaacatttgctttgatcttttagtctaacaatctatatggtttaaatacagacacattgtaagggaaaccccaagcttaatttccacaagtatatgatgcgcgctctagaggatgatttcaaacaagttgttggtattagttggtatctttggatctttgtcgtcatctttttgctgctaaatgttaacggtatgcttttcacaaaactcaaatctttttcttatgtctagtttcaatagaaatgaaaagaaattgttattacgtttcctttgatatcgaagctacaattatgtatcttgcaggatggcacacatatttctggatagcatttattccctttgctgtgagtcatttgtttttgtcctcattttacttcgttggaatgtgcttaaatcttctttcagttgagctgaatttgttttttttaatgtaaaatttgaagttgcttcttgctgtgggaacaaagttggagcatgtgattgcacagttagctcatgaagttgcagagaaacatgtagccattgaaggagacttagtggtgaaaccctcagatgagcatttctggttcagcaaacctcaaattgttctctacttgatccattttatcctcttccagaatgcttttgagattgcgtttttcttttggatttgggtaagtctggttctttaagaaaagaaaaaacaaaattttaagattcacctaaaatggttaagactgatgactttattttaggttacatacggcttcgactcgtgcattatgggacaggtgagatacattgttccaagattggttatcgggtaagcataaagattcgacattttttcttttgttctttctcatattgtttcgttgagtataactcattgtagactggtatctttcttcttctctttagggtcttcattcaagtgctttgcagttacagtacactgcctctttacgccatcgtctcacaggtaacaagctaatttttactaaaaagcttgagaatcttttggtttggttttttggattctttctgaaaagttgacccttttcttatattacaacagatgggaagtagcttcaagaaagctatattcgaggagaatgtgcaggttggtcttgttggttgggcacagaaagtgaaacaaaagagagacctaaaagctgcagctagtaatggagacgaaggaagctctcaggctggtcctggtcctgattctggttctggttctgctcctgctgctggtcctggtgcaggttttgcaggaattcagctcagcagagtaacaagaaacaacgcaggggacacaaacaatgagattacacctgatcataacaactgagcagagatattatcttttccatttagaggatcatcatcagattttagcttcaaggtccggttttgtggtttatacataagttatagtgacttgatttttttgttttgttacaaagttaccatctttggattagaattgggaaattgaatctgtttgtatattgtattatttggaacattgtggatgcccatggatatgtttctgttcaattattttggttttgggtaatgaaatttgaaaccaacgaaaaaccaaaaatattcttcagttggaatttggtttcttacaatgtgttggaaaaagtacatttaaatttcaagactttggatttgttgtacagtaagcaatcaaatatgatttaggttaaaccggttaattttactttggtttggatgattaaaccggctccaaattaatattccttttatctctctgctttttacttttgtacgagagttaaagccacactagtcactcgcgctagtctcttcttcgaacgcttgcaatg

SEQ ID NO: 20539 - DNA, 3000 bp, Unknown; identical to SEQ ID NO: 4978
  misc_feature (1)..( 3000): 2750-1469P.txt file - cDNA_ID_1826825; gDNA_ID_1620751; Annot_ID_49812

SEQ ID NO: 20540 - DNA, 3003 bp, Unknown
  misc_feature (1)..( 3003): 2750-1469P.txt file - cDNA_ID_1826825; gDNA_ID_2926183; Annot_ID_140681
agctttttgtggtaaatttagatttttaaaaaactccatatattttttttttataatttaggcttgtctattgtaaatttgtaatatagcttagtgatttatttgtttagcttctggtgacattttataaatttttaatgaccagtataatatagtatttttttataaattaaaatataatctaatgttttatgtcaacttcgttgttcattgaataaatcaaactttgaagaataattaaataacaatgtttgcaaaaactgttacgttttttcatgtaaacattagtggacgttatacaatagatatttaaattataaaaactattcaaagaatattgtaaagaaataaaacagaaatgtgtaagaaaaaatgtttattttattgtacgtaataaaaaaagagaatatacttgtgtgggtggacctaaatgcaaataggcaaagtaccgacaaaaaaagaagaatcagaaagtgaaaaagagagcgagcgatgaacagtatcttctccattgacgatttctccgatcctttctgggaaactcctccgattcctctcaatcccgactcttctaagcctgttacggcggatgaagttagccagagtcaaccggaatggactttcgagatgtttctcgaagagatttcttcgtcggcggtgagctctgagccacttggtaacaacaacaacgcgatcgtcggtgtttcttcggcgcaatctcttccttctgtttccggacagaatgatttcgaggatgatagtcgatttcgtgatcgcgattcgggaaatttggattgtgctgctcccatgacgacgaagacggtgattgttgattccgatgattatcgtcgtgttcttaagaacaagcttgagactgagtgcgctactgttgtttctcttcgggtgtgttgttaatcttctatttttcttatctatatgtgtaatttgtgcgttttgatctaaatctgaagctctgatgttctcttcttaggttgggtctgtgaagcctgaagattcgactagttctccagaaactcaacttcaaccagttcaatccagtcctcttactcaaggtaagagtctcttcttagtttcaccaggatagatgagcgatgataaacctgcagattcgtttctctgttctgtgtttgttaatttagatgcctaggttaaggaattagaaatagaaaatggtacttttgttggatcaagcgcctagttttatccgtcaagtttcaatctttttgtgactgactttctcattgaaattaaactgctttctggaagaacaataagcttgggattgagatgagttctggtggttagttcaatatatgggaaatcattatttcagcgctcgtctttctctttcagatatctcttctgagtcttagacatagtaagttttaatcgtggtaggttctttgatgaccccaggagaacttggtgttacttcttccttaccagctgaggtgaaaaaaactggtgtatcaatgaagcaggttactagtggatcgtcgagagaatattctgatgacgaggaccttgatgaagagaatgaaaccaccggttccttgaagccagaggacgttaaaaaatctagaaggtaatcattactttttctccaatttcttgtcgtttgaagattacatttatagagccttgttcttccttttaatatttgtaggatgctgtcaaatcgtgagtcagctaggcgatctagaaggagaaagcaggagcaaacaagtgacctcgaaacacaggttttgtgttgtatcctctcaacacctcatttttgtgttgaaggatattaatgagacctaatttgtattttgataggttaatgatctaaaaggtgagcattcatcacttcttaaacaactgagcaacatgaatcacaagtatgacgaggctgctgttggcaatagaatactaaaggctgacattgagacattaagagctaaggtaagaagacttaagtattatcctcctctcctttttctgaactaccctttttttgtatacagttttagtaactcccatgttatgttaaggtgaaaatggcggaagaaaccgtgaagagagtaacaggaatgaatccgatgcttctcggaagatcaagtggacataacaacaacaacagaatgccaataactggtaacaacaggatggattcttctagcattattccagcttatcaaccacactcaaacctaaaccatatgtcaaaccaaaacatcgggatcccaaccattctacctccaagactcggaaacaatttcgctgctcctccatcccaaaccagctctcccttgcagagaattagaaatgggcaaaatcaccatgttactccaagcgccaacccgtatggctggaataccgaacctcagaacgattcagcatggtaagctaaaacatggctctttcttttaagaccattgaacaatttaaaaccatttgaagtactatgatccctgtttatacatatcagattcctgtctcccctttttttgctcattttacaggccgaaaaaatgcgtggactgatcaaacaagaagcgggtttcgcactatattaatgtctatgcatctgtaatttgtaagtgttattaagttacgaatcatgagaaaacatcttgtgaaaatacagtctcatggcttatatatatatataagctctgtcttataacattacaagattcttatttgagaatcgtctttctatttatagctaataacagagtgtatatctgtttttatccaattttaaaaaagatagctcacatggctttactaatttcccctatcattaaattccgacaacctcggcgatttccatggtagatcgatcaagcattcacattttctcgtcagaaaacacaaaaaaaaaaaacagaggagaaaaagagacgacgacaaacaagtgaaagaaaaaagtcgtcgttcttccaatttttttctcctctctcttcctctgtttaacggcgtacgtaagtcaaaatg

SEQ ID NO: 20541 - DNA, 3003 bp, Unknown
  misc_feature (1)..( 3003): 2750-1469P.txt file - cDNA_ID_1826835; gDNA_ID_1620751; Annot_ID_49809
tctgcacaacataccccaaattaagttacgaaacctggttatgcaatcaaaaagctaccacatttaaaatcaagtttcaagtttctcattttatgcaatgcttatagtgatatcaagtgtcaaattctagcctaaagattactataaagagcaccacattcaaaaagttaaaagctctcattctctgtactgcctttagcagtgacaaatcaagcctttctaatttctaagtgtaaaacaatgctgccaaaactaacacatttcataggctaaatcccttatctgtaatgtctaatgtgaaatctcacttcttagtctcgtaaaaatgctaccatatccgatacgcttaaatcttgtgctctctaatgtctaatataaaatgaagttgttaactgtttagcctaaagaatgataccaaaactaccacatttcataagctaaagactacaactctcactctctccaatggaaattggaataagtagctttacttgtattaaggcgaagaaaataagcacggtgagagcgccaaacaagaagggtccaaggaaattaaagtcatatcctttcctagcagcccaaaaagtatataatgtgagcgaaagcaccactaccgatgtcaagatcactgactcgagaatcactttccctgtgtccaacacagaataagctttaaacatatacacaatcagaatcatagaaaaaactgagagatgaaatttgctaagagctagttccccaatagcaaaaacagaactttgttgcctaatggatccttaacaggtaaccaaaagtggttgatcaagtcataccattggtgaaggcacatgttaatccaacaacaaaagccagagccaaagtgaaaatccccaagagcaagtaattcaccggatgtttctgatggtaatagtacaacggacacaacactatacatcggagagaaacacaaatccaagtttcagcttttgagattattaccaaacttcgaaaaagattgaaacttttgatttgtaaaacaagtgtgcgtgatgattgtacctatgagaggtgtgatgatgatgactatgtaaagagctaatccaagtccggtggtggcgaagaacagagcgattggacggacggtgaccaccgtggcagcgacagcgacggtggctagaagctgaaaggcgattatagagtagaccttgcgtataaatccccaccggagctcgggattttcatgcatcgctgggtatagtaaaggccttcttgagctaacgcctgtttccacgtcatctttccggtacggtaagttccactgatacattatttacgatagcagagtctttataaagtgaaggaacgcgcgggaaaattcgaatcctttcgattactactgtatcacgatctacagagagagaaccacaagcgagagagaaaagttgatgcggtgctttgcttgagcttcttcggattttcctgggagaagcggtgatgccaagaggaagaagaaagttcatgaaagctctcggctaaaccgtagatgacgcgtggcaaccggagatgtcgcataagcggtgacaaggatttgatgtgtccaaagggaaagtgttcttttttttggctcaacacaatacttgcttaaccaaacttcacagtacatttcaaatagtaacgaaattttttatatatatatatatatatatatatttttattactatttaaaccgtacaatattttatctataattaatttgcatttttccaattagaacttaactaaaaaaaattagttgatcaatagtatcattcttgcatttaatatagagggttttcaatcaatatatgtaagatatttttaatcaattatttaaactgaaataattaaaagtaaaaattgatttgaaatttggataaaaagtaaacaaaaataaatttttagagaaattaatttgggatatattttcatcgttgataaataatattgaaactgaaattacttaaaatgatgcagttttaaattttaacgctagtttttataaactttttttttggttttggtggtgttaaatgattgagttgatagtttaacttgttaaatgaaaatataattataatgtagattcttgactaatcatagtttatatttttaatcgtaattgagacacaaaaggctgttatgcttgatcatttttgtatacattattgtagaatgtaaaaacttataattaatagaaaaaataataatttagttcaaaaaatagaatttttcacaatctcttgaagagtggcctaagaatccgatagtggtggttactgtttgtgttgagatatagcatatgagcaaaaacaattgaaaagaagaaaaactttcccttttaccaatgaaacaaaagagctctcagataattagaaaagtgtcaatttgtataacatttcccactctctctctcacttcgattcacttttgctcaaacttgacaacttgtccgaatctgtccatagcacacctctctctctgttttagggttttctcttcactggtgctttcttccttgtctcgctggttcaaagattcttactttttgatgtctaagacatcttagatttgttagactctctttaatttttctgggtttagccactagattatgttatactgctagaaggttagggtttggtcgagaaagctctaattttggtgatttatcctcttaatttcgcaaagggttatcttttcaatggcaattgcgagtgagttttgttattctcacttatgtatttagtaattgttccgtcagctgtacataagtggttggtttcatagagaaatgcttttagctttaggtgttgtaagatctcataataccaaagttcagatttttttgtataggattccattaagtagcccatctccacttagtttctggtctgggtagtgtgtaaccgacaagaaaatagtgttttgactatcctctggctatcctggagatctgggatttgtttcatctgttatgtcagatg

SEQ ID NO: 20542 - DNA, 3003 bp, Unknown; identical to SEQ ID NO: 20541
  misc_feature (1)..( 3003): 2750-1469P.txt file - cDNA_ID_1826835; gDNA_ID_1620751; Annot_ID_166787

SEQ ID NO: 20543 - DNA, 3000 bp, Unknown
  misc_feature (1)..( 3000): 2750-1469P.txt file - cDNA_ID_1826835; gDNA_ID_2926194; Annot_ID_141172
gcacaacataccccaaattaagttacgaaacctggttatgcaatcaaaaagctaccacatttaaaatcaagtttcaagtttctcattttatgcaatgcttatagtgatatcaagtgtcaaattctagcctaaagattactataaagagcaccacattcaaaaagttaaaagctctcattctctgtactgcctttagcagtgacaaatcaagcctttctaatttctaagtgtaaaacaatgctgccaaaactaacacatttcataggctaaatcccttatctgtaatgtctaatgtgaaatctcacttcttagtctcgtaaaaatgctaccatatccgatacgcttaaatcttgtgctctctaatgtctaatataaaatgaagttgttaactgtttagcctaaagaatgataccaaaactaccacatttcataagctaaagactacaactctcactctctccaatggaaattggaataagtagctttacttgtattaaggcgaagaaaataagcacggtgagagcgccaaacaagaagggtccaaggaaattaaagtcatatcctttcctagcagcccaaaaagtatataatgtgagcgaaagcaccactaccgatgtcaagatcactgactcgagaatcactttccctgtgtccaacacagaataagctttaaacatatacacaatcagaatcatagaaaaaactgagagatgaaatttgctaagagctagttccccaatagcaaaaacagaactttgttgcctaatggatccttaacaggtaaccaaaagtggttgatcaagtcataccattggtgaaggcacatgttaatccaacaacaaaagccagagccaaagtgaaaatccccaagagcaagtaattcaccggatgtttctgatggtaatagtacaacggacacaacactatacatcggagagaaacacaaatccaagtttcagcttttgagattattaccaaacttcgaaaaagattgaaacttttgatttgtaaaacaagtgtgcgtgatgattgtacctatgagaggtgtgatgatgatgactatgtaaagagctaatccaagtccggtggtggcgaagaacagagcgattggacggacggtgaccaccgtggcagcgacagcgacggtggctagaagctgaaaggcgattatagagtagaccttgcgtataaatccccaccggagctcgggattttcatgcatcgctgggtatagtaaaggccttcttgagctaacgcctgtttccacgtcatctttccggtacggtaagttccactgatacattatttacgatagcagagtctttataaagtgaaggaacgcgcgggaaaattcgaatcctttcgattactactgtatcacgatctacagagagagaaccacaagcgagagagaaaagttgatgcggtgctttgcttgagcttcttcggattttcctgggagaagcggtgatgccaagaggaagaagaaagttcatgaaagctctcggctaaaccgtagatgacgcgtggcaaccggagatgtcgcataagcggtgacaaggatttgatgtgtccaaagggaaagtgttcttttttttggctcaacacaatacttgcttaaccaaacttcacagtacatttcaaatagtaacgaaattttttatatatatatatatatatatatatttttattactatttaaaccgtacaatattttatctataattaatttgcatttttccaattagaacttaactaaaaaaaattagttgatcaatagtatcattcttgcatttaatatagagggttttcaatcaatatatgtaagatatttttaatcaattatttaaactgaaataattaaaagtaaaaattgatttgaaatttggataaaaagtaaacaaaaataaatttttagagaaattaatttgggatatattttcatcgttgataaataatattgaaactgaaattacttaaaatgatgcagttttaaattttaacgctagtttttataaactttttttttggttttggtggtgttaaatgattgagttgatagtttaacttgttaaatgaaaatataattataatgtagattcttgactaatcatagtttatatttttaatcgtaattgagacacaaaaggctgttatgcttgatcatttttgtatacattattgtagaatgtaaaaacttataattaatagaaaaaataataatttagttcaaaaaatagaatttttcacaatctcttgaagagtggcctaagaatccgatagtggtggttactgtttgtgttgagatatagcatatgagcaaaaacaattgaaaagaagaaaaactttcccttttaccaatgaaacaaaagagctctcagataattagaaaagtgtcaatttgtataacatttcccactctctctctcacttcgattcacttttgctcaaacttgacaacttgtccgaatctgtccatagcacacctctctctctgttttagggttttctcttcactggtgctttcttccttgtctcgctggttcaaagattcttactttttgatgtctaagacatcttagatttgttagactctctttaatttttctgggtttagccactagattatgttatactgctagaaggttagggtttggtcgagaaagctctaattttggtgatttatcctcttaatttcgcaaagggttatcttttcaatggcaattgcgagtgagttttgttattctcacttatgtatttagtaattgttccgtcagctgtacataagtggttggtttcatagagaaatgcttttagctttaggtgttgtaagatctcataataccaaagttcagatttttttgtataggattccattaagtagcccatctccacttagtttctggtctgggtagtgtgtaaccgacaagaaaatagtgttttgactatcctctggctatcctggagatctgggatttgtttcatctgttatgtcagatg

SEQ ID NO: 20544 - DNA, 3000 bp, Unknown; identical to SEQ ID NO: 20543
  misc_feature (1)..( 3000): 2750-1469P.txt file - cDNA_ID_1826835; gDNA_ID_2926194; Annot_ID_201273

SEQ ID NO: 20545 - DNA, 3000 bp, Unknown; identical to SEQ ID NO: 4992
  misc_feature (1)..( 3000): 2750-1469P.txt file - cDNA_ID_1826854; gDNA_ID_1620751; Annot_ID_49827

SEQ ID NO: 20546 - DNA, 3003 bp, Unknown; identical to SEQ ID NO: 17516
  misc_feature (1)..( 3003): 2750-1469P.txt file - cDNA_ID_1826854; gDNA_ID_2926183; Annot_ID_140666

SEQ ID NO: 20547 - DNA, 3003 bp, Unknown
  misc_feature (1)..( 3003): 2750-1469P.txt file - cDNA_ID_1826878; gDNA_ID_1620753; Annot_ID_49864
tgctgggtaaaatgcagttacatggagatatgtgcaaggaactatctgcagtttattgcaaggtattgtccatcttcccttcgttggaagaagcaagacctcggagtaaatcagggattcaaaccttgtgttcgttacatattgcacttgagaaggcaaagaacattcttcaacactgttctgagtgtagcaaactttatttggttagttgctctttctttctttggatacattattctcttttgtgtgtttggtctctctcttgaattcctccacttttatatgttgagcaggccattactggggatgctgtactgttaaaatttgagaaagcaaaatctgcacttatcgatagtcttagacgtgtggaggacattgttcctagttcaattgggtctcaggtaatgtatatatcagtgcacacaaaatctttccttttgcaagttaataagtgtccagggcttatgtgctagatattggctttttttgtttattgattttagaattctagttgataaaatggtttatgctaatgttatttgacttcttcagattttggacattgttggtgaactagagcacaccaagttcctacttgatccatcagagaaggaagttggtgataggataattgcactattacaacaagggaagaaatttgacaacggcagtgacagtaccgaacttgaaatttttcaccaggcagctactagactcagtataacttcttctagatcagctctggcggagcggcgtgctttaaagaaagtcattgacagggcacgtgtggaagaagacaagcggaaggagtcaattgtggcttatctgttgcatctcatgagaaaatactccaagctatttagaagtgagatgatggatgagaatgactctccttgttcaacaccgtgttcccctactggtcaaggtcctaacgaagatcgtgttaatgcgtttgggcgacaactatccaagtttggttctattaactataagcctatgaacagtaggaaatcaggacagatgcctattccaccagaagaacttaggtgtcccatatctttgcagcttatgtatgatcctgtcatcattgcttctggacagacttatgaacgggtctgtattgagaaatggtttagtgatggacataactcttgtcccaagactcagcagcaactcccacatctttccctgactcccaattactgtgttaaaggtttgattgcgagctggtgtgaacagaatggaatcacagtccctactggaccaccagaatctcttgacctcaattactggagattagccatgtctgactctgaatcccccaattcaaagtcagttgatagtgtaggattgtgcacaccgaaggatatcagagtcgttcctttggaggagagtagtactattgaatctgaacgacaacaaaaagaaaaaaacaatgctcctgatgaggtggattctgaaatcaatgttctagaggggtatcaggatatattggcaatcgtggacaaagaggaggacttagctaaaaagtgcaaagtagtagaaaatgtcaggatattgctaaaggataatgaagaggccaggatcctcatgggagccaatgggttcgtggaagcgtttttgcagtttctagaatcagctgttcatgataacaatgcagccgcacaggaaaccggagctatggctctatttaacttagcagtcaacaataacaggttagttattatcacatccttcctgtctttgttaccaatcaaattccttagcaatgtcactttctaacatcccattcatggtgctcttcatttgcaaaccttgtcataatctcttctgtttcgttcttttggatgcactgcaggaacaaagagctgatgctgacttcaggggtcatcccactgctagagaaaatgatttcttgttcccaatcccaagggccagcaactgcgttatatctaaacctctcttgcctcgagaaagccaagcccgtgattggctcaagtcaagcagtttcctttttcgtgaatcttcttcttcaggatacgaaaacccaatgcaagctggacgcccttcacgccctctacaacctctccacctactctcccaatattcccactctcctttcatcaaacataatcaaaagcctccaagtccttgcatcaacaggtaaccacttgtggatagagaagtcattagccgtattactaaatctagcctctagccgggaaggaaaagaagagatgataacaacacaaggaatgatcagtacacttgcaacggtgttagacaccggtgacacagtcgaacaagagcaagcagtttcttgcctagtgatcctatgtacgggaagcgagtcgtgtatccagatggtgctacaagaaggagtgattccgtctctggtgtcgatctcagtgaacggaagtccccgaggaagagacaagtctcagaagcttctgatgctgttcagggaacaaaggcatagagatcagccatcaccaaacaaagaagaagctcccaggaaaaccgtatcggcaccaatggctatacctgcgccagtttcagctccagagtcagaagtaaaacctttgactaaatcaatctccagaagaaagacaatgacaagaccattcagtttcctctggaagaaaagccactcgatccatcattgacactcctatgtaaagttgcgttttcttctgtcgtccttaacttcttacaagtcatccgcatagagaaaaaaaatatttgtacaggtcacattgtgatcacaccattttttgctaacgaatcctctctcgcgagaggtatccatgtagatagtctactgatgtatcaggttatatatatgaaacctcacttttcagtacaaaaacagagtcgacaattcttgaaaactctgtttgacatctgtttattttgacggtcgattcacaggtggaccaattctagtggataaaactagtgccacgtagtatgaataaatactatataataatacttaaaatg

SEQ ID NO: 20548 - DNA, 3000 bp, Unknown; identical to SEQ ID NO: 5005
  misc_feature (1)..( 3000): 2750-1469P.txt file - cDNA_ID_1826890; gDNA_ID_1620753; Annot_ID_49860

SEQ ID NO: 20549 - DNA, 3000 bp, Unknown
  misc_feature (1)..( 3000): 2750-1469P.txt file - cDNA_ID_1826902; gDNA_ID_1620753; Annot_ID_49857
agaaaaggtacaccatcccatcttgcattgtcgatgaagagtgcagcagctgcaaatgtcggggtcagactaccttttggcacagttttatcatcagtatagcttggataagtgactcctcctatgctgtggctcttgtactgtcctatcaccacatcttcaagttttattggtctcattgaacgtagtacctttacctgaattaatgcgaggacctcaaaatactgccttgaaatcaacaaaattataagaaagggaacaataggagaccttttcatttctgatatcctctgcatccaaactcacaggtgtttccatggcgaaaagagctaatatctgaagcagatgattctgcattatatctcttattattccgtaattgtcgaagtacctggatttgaagagtagaaaagtgtcaaaacataggcttcaacacacatgagaaataaaatattagacagaggacaacaaggattaccctccgcgtccttcagtgccgaaatcctcagaaaaaatgaattgcacgttccttatatactgccttgaccatagcggttcaaatataagatttgagaatcgaagaaccgacaagttctcaaccagctccttccctaagtaatggtctatcctgtaaaaatcaacttttcgtatcagcaaggtatcttaaaccatcatcactaaaatttacaataacataaacacgatctctccacctaaatatttggtcttcctccaggtactgcttaagagactttgttaatgcagccgaggttttggagtcccggccaaaaggtttctcgacaatgaccctagtccatccattgacagatgaagcagatgagcttgcacatttcaccgcgtcaacaaagatatttggagggattgaaagatagaaaagacggttcgaaagtcttccaccctgcaaatagttatgtgatggataagggcaaataagaaagaaaaaatgtaagaagaccaaagttttctagtttttactaatttttcagaaacaacaatagttttcctaattctgtattcaggccataatctacagcatatcaccttacacctaccaaggtaactcatgacctcaattagccttcagaaaaatgaggcaatgatgcaatgtggttgcaaggaattcatgaggaatgcagaaaaaaacaataagctgaggaaaacatcaatacctcatgctccttgagcttctcgtccaatgcaacaaaatgttcctgagaatcatactgacccgaatggtaaaaacatctcttgagaaactcttccatcttttcaccgcagtttgccctgaaccatcacagttaaatgttaaacaacccatctctgacaaagtaccaagggaaagaaaccataaggactaatgtcttggtggttttaaaagctacaataattattcacctcttatcaattctacatgtcaatgttttgctgaccataactctaagttcagcatctgtcatcttactccttgcatagccaaaaatggtaaaatgctgcgaccaaaaacagcttaccacatcaatcaatataacaatcaatcatcagaaagagagaaagatagaagaagttatttatacctcaggaagacagccttcatagtaaagtgcgaaaagagctgggaatattttcttcttggcaagatcaccagaagctcccaccaccgtgatactaactgttgaaagttgttcaccgccatcagactctgctacaaccttgtcagcttcaagtgaaggaatcgttaacacccctacatctttcgcctcctcggacgagcttgactcggtggctactgatcctaaacacacaattgtaagcgcattagagaacattcattacatgcaatgttttgtctaaagtcggatactttctataagaaaatctatctaaaaccaagctgaactacaggattcaatcctatatatacaagctttcaagttaccggcaaagcaaggcataaagaagaaaacccaattgagaatccaattaaagttaccatcttgcacgacaacagaactctgaacggacctcctctgcgatctaacaacacagagctcagctagattaagcccctgaggagaagcgtagtggaaggagagtgagcggcgtgggtcaacaacattgatcagcgaagaatgatgatgattcgacaagaaaggagacgaagacgaagtgcgggagcggtaggtagggcaggagagagacgacatttttcgaatttgagacgagtgtgagttatgaattggatttggatgcaaacaaatctcacaattgcactaatgagcgaatttgtaaggacaattgtcaaattttgagccttttcacgtctcccaaaggttatgtctttgccaaatctgtgtggttttgttggtatggtttagtgaaaggttatttgcaaatattattattattcaattcacaagtggccctttgatttctcttgaaacaaggatttgcaactactatattgttgcattttcatgagctcttaaaattgataagcaatactagtagtggccctaagcaaaaaaaaaaaaatatatattggaagaattagattcgaaatttggctataatgtccaagaccaaacatagataaccctatcggcttaggcatgcatttctaataacacacattccgatcaatgactatgtatgtgtttaaaacattgctttcatcatatcacatctaacattcattgatacattgcacaaaagccttgatcttaaacttaataagtttataataattatttatacttgtctcatgtaagtttataatctatttgctaaatatttttccattacaataaaactatatcattgaaagaagcattttaaaaatcatgcattttcgctggagctattgtgatttagctcatttgtgaattgattgaatttgttaaaaaaaaaaaaaaaatcatgcatgtatatgatgagcgagagacataataatgattaatgagggtgaaatacataaacatg

SEQ ID NO: 20550 - DNA, 3000 bp, Unknown; identical to SEQ ID NO: 5003
  misc_feature (1)..( 3000): 2750-1469P.txt file - cDNA_ID_1826925; gDNA_ID_1620753; Annot_ID_49849

SEQ ID NO: 20551 - DNA, 3000 bp, Unknown; identical to SEQ ID NO: 5002
  misc_feature (1)..( 3000): 2750-1469P.txt file - cDNA_ID_1826929; gDNA_ID_1620753; Annot_ID_49848

SEQ ID NO: 20552 - DNA, 3000 bp, Unknown; identical to SEQ ID NO: 5000
  misc_feature (1)..( 3000): 2750-1469P.txt file - cDNA_ID_1826937; gDNA_ID_1620753; Annot_ID_49845

SEQ ID NO: 20553 - DNA, 3000 bp, Unknown; identical to SEQ ID NO: 5000
  misc_feature (1)..( 3000): 2750-1469P.txt file - cDNA_ID_1826937; gDNA_ID_1620753; Annot_ID_166834

SEQ ID NO: 20554 - DNA, 3003 bp, Unknown
  misc_feature (1)..( 3003): 2750-1469P.txt file - cDNA_ID_1826941; gDNA_ID_1620753; Annot_ID_49844
tcgtcgtacgtactatagaaactgattgaaaatgatatcgaggaaacataatttgtcgatcggtgttggaaccttccatgcatgactccaattagagttctggaacttttggtttctcattagtcatgactctgattggacaagttctagtttttaacgactcatgactcttcacatgctccgaaagttcatcaaaacatttatcaaagttttacatgtttttgtgaacaataattatcttataaaaacatcaaaacatttatcaaagttctataagataattattgttcacaaaaacatgtaaaacatcatatcattttgtgggtttatattcaggtttaaagagtgtatatactatatatatatatatatatatatgtcataaaaactatgaaaaaagatccggcgacaaagacgaggaacgcttgtctttaggaaaataacaaaagtgatttgttttgatgatatattttcgtaaattcaaaacagaaagaatacgttatgtaagggagctaaatgagctcttaagatgcttaagaaaatggaattgtgatcgattgcgtacaaaacgtaaattcctatctaccatttctagtggtcggtttagccatagaatggccaatgtgattaagacaattgttgaaaactggtcacatgtatgttacaatttccggtactatgttcaaacagagaaaccagaatggattggttacctacgtatacatacttttaattttaaaagtttagagagcgttagatctaaacagttaatataacttaaacgtaatttggaatgtaacatcaggagtcacaaatgaaatgagtaaatagatagtataattaaataagaagcaagatttatttagtagacttaatagccagatcgattacaataggacataataactcataaatccatataggaatgaagaggtaaacattattaacctcctaaatatcctaaagcagtagccatagcaatggcagcctgagccatcattgaaaaacatgatacgatcaccaagaaacatccccatttcaacattttcacgatatttataaactcagcttaaatatgaaattattacaaaatatctttctggtttttaggtggggctgaaatgcttctagcatgatagatcaatttatagttgaaccatgcataaatgattaaatgatactatcagactcttcaaaattctttctcttctcgtaagttggaaattaataaaggacagtcaaagataaagaataaatgatttggaaattggaacattttgtcatgaaagtgcgtcgaaccaatttaggcttaagctcaaattgtatatgagcttattatagaggcccattcattttgtcaaaaagaaatttttttaaatatattttttacttcctcctctgcaaacatgtaaacgtgggacgagtagtcttacttgccgtgtaaacttaaatattggccatgtttggtccgtatcaatacaagaagtcaagaagaagacgtgttaagaaagaaattgaggaaacaaagcggtcgatgtggaaccttccgtgactccaattagggttctgaaacttttggtctctcatgcatgactccagttatcattagttcaataccaattctagttcttgacgactcaagtcaagatcattcagacggccttttaaaatctctttaacgttcgagacaaagataaaatccttttattttttcatagagaaaattgtaaaagaggataacaaaatagagagaatttgcttttaggaatttccgattgaatatgtagttggtaaagcctagttttatataattatatgtggacggaaaaagattcattatctcgcttatataaaaacataccaattaattatagtctatagtcacaattcatcatatattctagactttaaaagttgattttagaatttctgagaatcgagaggcaacaaaaaaagtctacaaatttgactaagaagaagcaggcacatccgccttgacgaagaaaacggtttggttgggaatgatggagttgaccggtagacaagtttcgtcgaagaaaacaaaaaaaaatagaaacacaaaatcgggtttaattttgcaatttcgcttcagtagaagacttgttgaattcaataacaatttagtttcgttcgacgagtgtaataacgcgttgagcattaataactatcgaggggccattaagcattaaattaccatttaattacgaattttaggggttgtttccttcatcgtagcttatcaaattacacacactcatacgttcacaccttcccatttttccaagaaaaaacttggttcatatttcttctaattcatacgttttgtgatagtattttcaacttttgttttaaagtttttcaacatgtattaccaattcaatttggtaatccaccatcatatatttatatattgctcgaaagatccggtagcagttgagtctgtctgacaaattaaaacactattcacgatttttttctacagttttactttaatcttaaaaaccaatattattacaaataaccaagtcaaagataaggtcaaccccaccagacaaaacttagttcacggcacaacaagactaagcactgaagtctttgagaggaagattttgaaaatctcgtgcaaagactaaaacatccttctttactatatatatctttcgctccactacgaaggttattttcgtaattcgacacaattccttacagagaataagcgaacagatcaacaactactctgctcttacaggcgacgacgtcaacaacaacccaaaataccaaaaaccctcaaaagtctcaaacaaaactcaaaacccaacaattaaagaaacaacatttcaatatacagatttacttccttttacagattttcctaaaaaaccgaaattgaaacaaacaaaaccaaaagacgttaccttttttccattgattcctcaattctctaaacaaatgagttaatcttccatggctgccatgttgatg

SEQ ID NO: 20555 - DNA, 3003 bp, Unknown
  misc_feature (1)..( 3003): 2750-1469P.txt file - cDNA_ID_1826945; gDNA_ID_1620753; Annot_ID_49843
tgacatccagtgaaattcaagaatgagttccaggggttcccggtggcgtttcggagaagctgcggcggaatggctgaggagtttgtatagaaaccagcggagactggagaaggagcgaagaacaacaagaaaaccatgaaaacacaaatcctcaccatccaaaagagaaatattaaaaagattaagtgaagaggtattattgagatttacaagagaattagagagatgacatagataaaactaaacaagtttgacgttggagaaagcagaggtcatttctgcgttgcgtttggagaattttctatgttgaaaatgctgcattattcaaaggaaacttcctccgtcctcgtttcaaagggtctcacgaagaaaaagactaatgaagcttctgccaatagatagtgtcgttttatggataattaaagttgattggtggcttggtgcaatagattaggcccgatttagtcttggatgactagaaattgtgattgaccggtggtaaaggaccggttaaatgcaaagttggaaaaagaaccatgcaacaaaaatggttgaaggcggcagaatcaactaaattggttgaaagtgtttttgttttttttgggtcgttgaatgtttgaattggtcttttttctttttgtgataatttttccggaggttgttgttattggttgaaaaaatcaacgtaaaatctccaccttacacgagtaacgccatgacttgtttgttaggctatctaattttttcctgtaatgggtataacatgcaagtctccatcggtaaaattaattgatatatcatacatgcatataaagttttgggccaaaagtttgaagccctttctaaacagaattaggatacatataaacagaaaaatgtagattttcatgttagatccatttaggctaaaaattgttttcagaattagttcaaccacgtttgcaccaacattattaaaacttagaagcctgtaaacgcatagctttattaaccaaaatctaaactaagggacgtttgatagtgtttagtgtacatttatttcgtagttatgatatttttgactgactaattcattttagttacagattttaattacattttttttttggtgtgctttgggttaataatacttaattatattctaccaccaagtgataggttttctttgcatacggttagtgtatgactaatggagtcataagagcaccttcactagaggactctttagagcatcctcaatggacaatttaattgggtgtctttctctattataaaatattaagaaaatttcgtttgcccccaaaaaaaaaaaatattaagaaaatcaaaatataattattaaaatatgatagtgtctttaaatgagagacattcagttaaaatgtctatgaaaagacattatgggaaggagaatttttatttaaagacattttcatattttaataattatattttagttcttttaatagtttattgtggaggaagacatccaatataaatgtgcaatgtggatggtgtaagatgatcttaagaagataaagtctttttatatcacatgaaaagtctattttgttaataaaaaaaagtatatggaaaaacagaaaatacatatatttatgaaaagacagtgttgccctacagagccaatagaacccatttgactgagtaaaatgctgtaaacgaatgccccacatactattaaatagtgagattctaactcaaaaacaattgacaatgaatagaaaactttatatattatatatctatatatatatttttgtagttattttaacaaataaatcttagagttggacttatttacaacccaatgccattagcattaaatatttttttcaaaataattaattttactttaaattcttaatttaaattgtcaatcacattatcaatcaaatttaatccaaacaaacttcacatcaatcccttaaaattagcataaacgtatttgttaacaatattttaaaacaaagttttttgtttaaataaatattattcttactaaacgttttttgtttaaataaataaattctgtatttgaacttatttacaatgtcatgctactggcattaattatttagaaatgaaaatatttaattaacgatttaaatcttctaaatctttgcttttagagttattatgtcattacctaaaagggaaaaaatatatttttttaaatattattatttatatatttaaactttataaaacattattaatatttaaacttataaaaagtttaatatataaaaaaatttaacatcattatataatatatagtttaaaaaaatctcaaaaacatttccgtcatattttgtgattcaaaattttaaaaatgaacatatattgaccaaattggcgaaaaatgtgtgggttcaacatcccgcatcgactaaaatatttagacaataattcataaataagatcaatattaataaaataaatggtttttttgcaggacgggttttgcgggacgggtttggcaggacgttacttaataacagttgtaaactataaaataaaaatattttatagatagatacaatttacaaatttttatatatactaactttaaaaaatcatttgtctccgcggtgtaccgcgggttaaaatctagtaccacttaatttcatacttaattttcaatgtgatatattgttatccttaatacataccaacatgtcgtcttccctctcatttcctctcctcaattttgtttatatagatgcgtaatctaaaatagtgtcgaagtgaactttaattattaagatctcttcattcatttgcctttttcttctcatgtttttgctttttatagatgaacaagcccttgcaacccaagcagaacaccgcaaactcaatgagtcacttacttacatatactttcgttattttatttatgttattgttttgttgattttcatggtttaatacatcatgtcatatgtatattatgctggtgttgtagaagagacgataaccatg

SEQ ID NO: 20556 - DNA, 3000 bp, Unknown; identical to SEQ ID NO: 4996
  misc_feature (1)..( 3000): 2750-1469P.txt file - cDNA_ID_1826956; gDNA_ID_1620753; Annot_ID_49838

SEQ ID NO: 20557 - DNA, 3000 bp, Unknown; identical to SEQ ID NO: 5025
  misc_feature (1)..( 3000): 2750-1469P.txt file - cDNA_ID_1826968; gDNA_ID_1620755; Annot_ID_49875

SEQ ID NO: 20558 - DNA, 3000 bp, Unknown
  misc_feature (1)..( 3000): 2750-1469P.txt file - cDNA_ID_1826976; gDNA_ID_1620755; Annot_ID_49873
gtttttgggaattgctaactttgcaaccacgtatatgtgtacaattgaaaagtcacatagaatgacgactgcatagacctatattattaaaaaaataaaaattgtccattttgatcaagaatgatggatcataatttgatgtatatatacgtatgatgattataaaatcacatattttgggagactcacgtacgccttgaggagaccaagaccaaccctaaccccaaagcttaatcgctttagcaacgacaaggacaagacaccacttacttctatggaatctttaccacaatgtgtgtaataatctaacagctgagtagaatttgctcacactgatactacatacaaaatctaattgtatcagtcattcacatgtgaaataatgtatgatttaaacgaaaattatgtgtataataattaacgtaactgaagataaaaaatataaaataaatatttgcttattttatgtgtgttaattggagataagaaaaaattggtattttatttgaaatcgtggtagaaaatttctcaaaagtcgtactaatgccttgagttttgatcagttttgagtttttttagtttttttttttctttttctaattgtgtgccatttgtagtgtttaggtgtcttttatgtgtacatagttgtctatcgattcattcaagttccaaactgcttttagagaaaaaaaaaaggggggcattaattggggatgttatcgacataagtatgtgtatatgggatgtgatgagagatttttcattgctggatggagctcaaatttggcatatactagaaaactgagagagttttatttggaggtggtttgagatcattcgaatggttgaatacttttttagaaaacagattacttttgcgaaatttgtttgaaaacaaatttggcatatactagaaaacagattttgaaccttttctctagtttaatctaatcatgaattactttacagtttcttttgtgtttagagattgacaccatattcttcttgatgctcacgtttctctttagggtacatacgtaaaactctacttcccctttggtttccaagattgctttcatctccatagcttattgctcattcatcgcctaacaaaacattacacgaagcatgttgtttaatgtaaaccaacatcatgagacaaagaaatatgtcagtaaaacaatagatttcagtcactctatatctaaagatttaacgacatgcttttgatttcccttgaatgcaagaaccagttctttcttcacaggagtaatcacaagtttctgaaataacagagaacccatattaagaacaagctatagagacagagatgaacatgttgacttgattacctctacttctttaggttctggaaatttctctcagccacagagcaacttttcctacctacgggttttgatcatcaattctctagctgtcaaacgaaatgaagaaaatacaagataaaagtaagtttcttaccgagtgggcacgtaagtcgaatgcagacctatctgctataccaacacattcaatccacccatatgaactctcaaattcagcatccaaacaatctgcagcatagcgggccatttcatttgcaaaatgctggcggaaacgcaactgttccttgtctgtgccaagacggacaaggaaaagatacactctcgcaatgaagtagcctacagtttctttgttcacagttccctattcaaatacagttgcaggcatcaataagcaattaagaaacaaaaggtctgagggagtgcatactagaagtaagtagacgcagatgattacagatactgaccttggcaacaacttcgccaaggcaaagttttttcgcagattggccagacatttgttcctctcttggaaacataaggaattcaaaatttgctacatcagagaatttcggatgtgacttattcccaggatcaacaaaatgctcaatttctgccagcgtgaattcacaaactctaagaagcccttgacgatgagatatctgcaagtaatatgcgtcacttattaaaagccagacataaaagaaagaaaaaagagtccctgattgagataaacacatccaatctatcaagcaaaggaatagaaaattaaacgataatcacctcatttctaaaggttgaccaatttgagcagcagcaaagggaaatttcctcccattgtagtaatacaagtccttcacaaaaatgccttgttagagtgttcttcgtgtctggagcaataatccttaagcaagtggtccgtccgcactgtaacaagttccagttttctcattcttaaccattagatcagtgaactggtctacatgtccagatgccttgagaacaacctctggtgtcacacatggacaatccacttcatacatattctccttaagaatgaaatgctatctgagaacaaacctaaaacaatctctactcttctctatgaatcatgtcaaatttgtctcaatttctactcaaaagagaaaggtgaatgatgttccgtacttacttgacgccagaagctaagaacattggatttaacagcacaatccttaatcaaatagtccggcgacgtcacggttgattttgaaagaagggatatagaacaaacgccgctcgagagtattaaccacattttgtcgaaatcagcagctccatggctgcatcaatcgtgaagccttgagagcttgaagacattcccctgagcttcgacggaggaagatttcgcctatactgatttccgccgtttgaatttgatcggagcattttgttttttcacaaactttcatatctttaacgacgtcgttagtactgaagaaaaaccctaaagagtaaagaccctaacggcgtcgtattaaaaccctaaaacggcttcgtattaaaaccctctgtcttataaataatctcttaaaaccctttcttcttctcttacattttcagctgctcataaaccctaaaaatcctctctttttctcaaccttgattcttagccatg

SEQ ID NO: 20559 - DNA, 613 bp, Unknown
  misc_feature (1)..( 613): 2750-1469P.txt file - cDNA_ID_1827000; gDNA_ID_1620756; Annot_ID_49910
ttcctttaagattatatcttcttgccttaaaactgtatcggctaacgccaccaacgttgcgtcgtctgttcgttccgctggtgcctccgttgctgcttcaatttccgctgctgaagatgataaggatcaggtcccttgattttgttttgcagttactgtttgatacttgcttttgttctgtgtaccgtgttggattttactattttgttagatcatttaaaatctaagacgtaattgggattctttcctgtttagaaatatttagtggattaatggttggtgtgtttacttcattcttagtctagcttttgctgctgtgtccactaagtttgagatacataggtctagtaacaaatatgcaagtgattcttctgatgtgaaattatgtgttcgaatttgttggttgtggttggttaatttctgaattaggtgtctatttcctttttcctgttgaccctctttgaaatgggaggttttgctatattttcaattctaggttaacaacttctttttctttttttcgagagactactttgtccacaaacatctgaacttcgctttcatgaccaggtgacctgggctggatttggcattcttgaactgggtcaacatg

SEQ ID NO: 20560 - DNA, 613 bp, Unknown; identical to SEQ ID NO: 20559
  misc_feature (1)..( 613): 2750-1469P.txt file - cDNA_ID_1827000; gDNA_ID_1620756; Annot_ID_166996

SEQ ID NO: 20561 - DNA, 3003 bp, Unknown
  misc_feature (1)..( 3003): 2750-1469P.txt file - cDNA_ID_1827008; gDNA_ID_1620756; Annot_ID_49908
actgaaaacccaccaatccacagcgtcttccgccacagctacagcgtctaaccaagtggttgaaccaagaaagacttcaccgatctccaccgacgtccataaccaggaagaaacggaagagaagcctctcatccaccgagaaagggccaccgctgccacgcttaccggaaaaaccacaccactccaatgccggagaagatagcttgccttactcctgctttgtcttgcaaattcataacctaagatgaagaacagaggcagaaaaaactagatctgtaaaaactggaaaaaacttcaaagagagagaaaatgaacagtagcggaacgattgtccaaagtcctccaaacgagatatctttaaatgttgttttgctaattagtggcgtttcgagagctaggcgagcaacaatggcgatgagatttaatatggtaagtgtgtagttaattaacaaaagttcaaaccggatgctattcttacttgtaaagacaaacgaccaattaagaatccaaattttaatataggaattgaaataaactaatggaccttgtttttggcgattcatttctttatttgttatcttaatatgggtcacgattccttttgttatttaattgtattaagatgtgcattaagatgtggaataatagcacttatgcaaatctgtgcattgcaaaaaaaagaaagaagaagcaagatggagtcaagtgatcgttcaagtcaagcaaaagctttcgacgagacaaaaaccggcgtgaaagggcttgtggcttcgggaatcaaagagattccagccatgttccatacacctccggatactctaacaagcctgaaacaaacagcaccaccttcgcagcagctgacgatccccacggtggatctgaaaggaggaagcatggatttgatatcgcggcggagcgtggtggagaagattggagacgctgcggagagatggggattcttccaggtggtgaatcatgggatctcggtggaggtgatggagaggatgaaagaagggattcgcaggtttcacgagcaggacccggaagtgaagaaacggttctactctagggatcacactagagatgtgctttactacagcaacatcgatctccacacttgtaataaggctgcaaattggagagatacgctcgcctgttacatggcccccgatcctcccaagttacaggacttgcccgcggtttgcgggtaacgtttccctttccataccaaacacctagctagctaggattcatttctctttagtttttttttggtttatgatgatagagattatattcttttactttaattatgagaaagaatttccacgtacgaattggcgtatttctcatctacttgcttcgggtctactagatcggatatcttgtgtgttttaactcggttattacaaaatttaaacttgaaaaagcataaaaagtcaataattaataactacataagttagtggattctacacttgattttatcatgagttattgatttctaaatagtaattataaccttttaatgatttcattggtttttaataaattatttatttatttcacattggattttaacagatctttcaatgtatatattaaattaaagataaataaatcaaaaagttaaataccaaagttattttgaatagatttgttatatgtgccttgtgaatagctagacgtacgctaatctcttgcaaatattttgatgtgacagggagattatgatggagtactcaaagcaactaatgactttaggtgaatttctctttgagcttctatctgaggctttgggattaaaccctaatcacctcaaggacatgggctgtgccaagtctcatatcatgtttggccaatactatccaccttgccctcagcctgaccttactttaggcataagcaagcacaccgatttctcgtttatcaccattcttcttcaggacaatatcggagggcttcaagttatccatgaccaatgctgggttgatgtttctcctgtccctggcgcccttgtcattaacatcggagatcttctccaggttaaaaagaaaatattgttgcgcttctagcttcatttcatctatggagtgggtttaaccctctgttttattgtgtgcagcttataagcaatgacaaattcattagcgcggagcatagggtgatagcaaatggatcttctgaaccgcggatttcaatgccatgtttcgtcagcacgttcatgaagccgaatccacgaatatatggacccatcaaagaacttttgtcagaacaaaaccctgccaagtatagagacttaaccatcaccgagttttcaaacaccttcaggtcccaaacgatcagtcaccctgcgttacaccatttcaggatctgaagcaattatattggtggctctgctcggtcttcatctcaaagtaactttcgtgaaaccagcttcttttttctttctcaaaaggcataaggatatttgtaacattcaaataaggtacacaatgaaaactactactacttacttacttcatcttccagccgtgatgtaataaaatttgcgaggaactttcttgttttaagtcctcgtgttaccattttcatctacgaactttggggattagattccccctcttttgaaccttgttttatgttgtatcacgaaaaaagcttattggcctcatttatcatcatcatccaccgatgatatatcgtttaattatatgttcatcagatattcttgtaaacttaaatgattaaccaaaagcatatgattttaggttttttaaaaccttggtggactagtccacgttcggttgactgatttggatatacatatacatatatatatatatatatgaaaataaccaaattaatattagatgtggttgtgatatacgtacatcattttctttatgaggtggcaatttctcttgttatctgaatgatacaaatttagttaaggacgtagaaaagcaaaaaaacaaacaaaaaaaagaccaagaagcaatg

SEQ ID NO: 20562 - DNA, 3003 bp, Unknown; identical to SEQ ID NO: 20561
  misc_feature (1)..( 3003): 2750-1469P.txt file - cDNA_ID_1827008; gDNA_ID_1620756; Annot_ID_166994

SEQ ID NO: 20563 - DNA, 3000 bp, Unknown
  misc_feature (1)..( 3000): 2750-1469P.txt file - cDNA_ID_1827038; gDNA_ID_1620756; Annot_ID_49899
gttgtccaaacaaaagacaacaactttacaatctcactgagactttagcttttttaccctttggagcatctgtctcgaaatagcgataattgaaatgcagggttggggcaaaagggttcttgggatgcaaaacctagaatcacacagaaatccgtaatgataaaacatgagaacctccaagaatcgtaaaattgaagggagagattcattaccgagctgactccagcagcgaagaacggaacaggaccaggtttctgatcagaagctgagccctttgcagctctataagcttcaggaggcataacaccataaaccacagagacattaacaccagctttctcaaagacattcccgtcctgcaacacacgactgattccaccgccaccaccaggtcgagaccaaacatcttctttaaacttaggaccgccttctatagcttcaattgcatcacaaacactgtcttgagcagccctaatcatagtctcgaaacgagccctgacggaagaagaagaagaagatggagtgacgtcatcagaatccctaaggaaagtaaagggtcgttcagtttcgggaacttctttctcaattgagactgaacatcgcaaggcgagattaggtttatttctgattggacgggagaatctgagagtagagggattgggagaataatgaagacgatgagaggagaaaggagcgaaagtaggagaagagaggagagtcgacgagtgagaagccatgtttgatccgaatttggatttgatgctgaagaagaagatgatgatggagagatattaaatgataagaagtcttcgtcgtccactgattttgaccgctctccctttttatttaacagctcaaggtaaaagaaaacacagttccagtcttctcagactaaaccacttctgaattatttagccgaaaccaaaccagacacgaaattaaaattgcggtttaatttggtcgaaccgaagatattgatacacaataggctcttatccttcttaacgggcttaattgcccaaattaggcccaaaacgattagccggtttacggcactatgctattttgatgtggataaatcatggtcatgtaatatatctttatctatcgttagaatctgtgataaacaaaacaaaagtgtattatagattcgaatcctatctaattattatttcaaataaccaaatagatgtaattacaaccgtcttattctttccaaaaaatagttaatcgctgacaaaagaaaatccggttgggcccatcacgttgtctatatattcatgatcatatagagagttcagccgcttgacctgcgaggaattcaagaaaaccctgcttcacagagcagtattacacaagagacgaaagagcacttttaaccttagcaattatataggtaccttagctagttcttcttcgaatctatacgatcgatatgaagattcttccggttggatcacggttttgtccgacggatctagggttggtgaggctttatcttcgaaacaaggtggagagaaatcagagcagtttcataacaactatggacatccaccaagactacccttggcttcttcctcacgtaaacaatcctttgttcaataacaacgagtggtactactttgttccgcttactgaacgaggtggcaagatattaagcgtacaccggaaggtagccgcaagaggaggaagcgaaggcggcacttggagaagcaacgatgggaaaaaagagatcaaggacggacacatgcaaaagggtgatgggttacgagcagtctttcacgtaccacaggagagtgcatggaaagcttgtcaagaccgattgacagaagatggagtattctcttcactagagtgatgacctccaaaaggttgtcttgtgtcggatccgatacaagaaagaggcgaacgtcaacgagtttggactcgttaaccatcaggctcatcagactcaggtggcggagaacaccaacaacatcttacggaaccaagtagtgtaagaagaggatgctttaaccggttttgctgatcagcttgagatgatgctagagggacaagaagaccgtgagcagaaagaagaggctgatttaaccggttttgctgatagccttgagacgatgctagagggacaagaagatcatgagcagccagaagatgctgatttaaccggttttgctgatagccttgagacgatgctagagggacatgaagatcgtgagcagccagaagaggctgaattaaccggttttgctaatgatgaccttgagacgatgatgctagatggagaataatctcgcgaagttactcaacaacaacaacaacaacaacaacaacaacaacgtcaagaagattgtgacgttactcaagagcaagaaaaagatgatgtgatggtactgataaacaatcctaatgatgccctcgcattggggaattatgagattattgatctaactagggttgataaatgatacgacacaaaccagagaggatagaattatattttagtgggttgagttgatatgtgacaaagattactatagacatatggttagtgtatttgtgtaactccggtaaaggagatatcataaaaatagtggattttccggggtaaaattctagtttaacgaactttattttagtttgtacttttgtttttccataactctacaattaatatagagttgcagcagtaatgttaactatttagctatgaatttcaattgtgtacttaaaagtaatgtttttggttttcaaagattataaaattcgaaaatactaattgtgatttgtgagttccattgataaataagcaaacataaaggaccaacaaatgttttgaaaaccaaaaaaaatggtggttgtggaggttggggcacatgagagcgtttttttgaccaaagtacgtaacagaatcaacttcttcacttgcccggtggtttcattttccttttataaaaagacaaatatgaactcatttcctcaaaacttaatcacaccatg

SEQ ID NO: 20564 - DNA, 3003 bp, Unknown
  misc_feature (1)..( 3003): 2750-1469P.txt file - cDNA_ID_1827046; gDNA_ID_1620756; Annot_ID_49897
gtagcagtgaagaagaggagagtgatgaggacgagagcgacaaagaggaaaataagaaggaagaaaagtttgaacacatggttgtggggaaagaggatgatctagcaggggacttgaagagggtgagatagagaatttagatgaggagaatggggatgacgatattgaggatgaggatgatgatgatgatgatgatgatgatgacgatgatgatgtgaatgagatggttgcttggagcaatgatgaggatgatgaccttggtttgcaaacaaaagaacctatcaggtcaaagaatgagctcaaggtacatatccttcagcttttcacatttcatagctattactattagtggttgatattttttccattagtggttgactgcgacaagaaaactatgtactgtcctcaaggtttttagcattactctttgaaggatggaagccttctttttgttgtgtaaattttgaaagatttttcccctttttaaaacttttgcaggagcttcctccagttcctcctgtggatgtcactctggaaccacaccatgccacacttcctgttggagttgttctttcggtatattaaaaattacctctacttgtatgctattgcttctctgtttgatgtcttgacaatccactgctaaaagcatacccgtctcatttgtgattttacaggtaatgagcgcacaagtaatagttgagggaatggaaaagcatagtcctttgactgaaggttctatcctttggataactgaaaaaagaacgccattgggactggtggatgagatctttggacccgtgaagtgcccttattatattgtgaggttcaattcagagagtgaagtgccagaaggggtttgtcaagggacacctgtctcatttgtcgccgatttcgctcaacatattctcaatatcaaggaactgcagaagaaaggttacgatgcatctggggataacgacgaggagataccagacgagctagagttctcagatgatgaaaaagaagccgaatacagaagaatgcagaagttggaaaagagaggaatgatgagtgaccagaaaaccggtaacaccaggaacaagaagaagaaaaaccgagatcccggaaggcctacaagcagttactcaggggaatggacgaagaaccagggatctagttctctatcgtcaaaccgttctgatcctcaaatgggtggtccgcgtcctcaaatggacggttttcctccaaacaatgcagcatggagaccccagagtaatcagcagaacccatatcagcttcctcctatacctaatcagatgggaatgcagatacctttcatggcaatgcaaaatcaaaatcaaatgatgttccaaccgcagttcaatggtggccagatgccaatgccaggtggaccgggaggcttaaacttctttccaggacaggcttcagcgccatggcctgcaatggtaggtcagaattgtttcaaccaacagtttgggatgggtcgtggtattcagcagcagccattaccaaatgagctgagttttaatatgttttctcaaggtcttcaaatgcacccaccacagtcccaaatgcaccggccacagtctcaaatgaatccacagttccaaatgccaccacagttccagccccaccagcaatctccaatgaacccgcagtaccaaatgatgcaccgaccacagtctccagcgaacccgcagttccaaatgcaagcacaatctgatgtgcgaccactacagtcacaaatcccgcagtcaccaagtgatttgcagtccccaatggaaccacaatctcaagggtttagcagcgggcagtcttctgaacggggaaggggcttccatggtcgtggtagaggtagagggcggggtcgcttcggacgtgggcgaggtagaggccggcaacagtctggatgaaactttttttggaagcatactaaactgctaatgtgtgtcatagccaggctatatttagttttgtatgccagtttttgtatgattatgatctttttttttttacacattctctataacagtaaaacgaactttgatttctctgttgttccttctccttgtaccaccaaagtcaaactggctatagagtagaatagactatactcactagcagtgaattaggcagcaacataagaacagtgttttttttttctcgccgttaatttcgttacttatctaacgtattattatgagttgataatgccacgtgtacgtcatcgcttgtaaagggtttgagagtcgtacatgatcattaaattctctactgattgattttgattttgccaacaattattaaagcttacaccacgaaatgtttgatgtttaaattaattgccatgtctctctgtctctctctgtatctctctctctcttcttccccgcgtcgatttcacattttctcttttaagacagctttgaatctacagacaacttcatttttaccaaaatttctgtttcttcaaaggattgaactttcatatttctctcttgcccagttctgagttattgcaatcagaagttgtaaacacttttcctgtctctttctgctacccgaatttatcttctttagcgtctgtctctttcagcggacgtgtcttgtctctttaaggtaatttcaagacttaaacttgaagtatctctggccttcttctgctgtctgtttcatttttgaaatcgatttggagattagatctgactcagcttcgactaaaagccattgctttcgcctttggattgttgattccctagtggatgttctttatctctttaaaaaggtcctctcttttaaatcaatttttgctgaacttgcccaattcggaaactttgttgcaagtctcctcttggtctctggtaatcgttttcgcatcaatccttatattgatttgaatctgtaatcagattcgatctttgatgctaatttggtattctatagaagacaacatatctgaattgggtttcttcgttggataggataagtggttagggaatg

SEQ ID NO: 20565 - DNA, 3003 bp, Unknown; identical to SEQ ID NO: 20564
  misc_feature (1)..( 3003): 2750-1469P.txt file - cDNA_ID_1827046; gDNA_ID_1620756; Annot_ID_166980

SEQ ID NO: 20566 - DNA, 3003 bp, Unknown
  misc_feature (1)..( 3003): 2750-1469P.txt file - cDNA_ID_1827065; gDNA_ID_1620756; Annot_ID_49892
cagccacattcggatctgtcttctgcatcgaaagcgtactccttactttactgatcactgccgacgtatctttgatatactcttcatcttcagcggcggagaccggcgccggagctagaaactgaatcgattgtgttagaagcgtggatgttgccgccagggagaggaaatcgcggcggaggaggtggttgcgacgtggaggaggaagaggcggagatacggaggaggcgatgatggtcggtttatgcggcggaagattgggtttgagaagagtagctgtcgctgatgctgaagccattgtcggaactctggagaaaaggtgtaagaagagaatgaaagagttttgttgtgcgttagtaaatcggggaaaatgtgtttctgtgtgttggatttttgacacgtgtcccttatcttcttatcttagattctatggtttttgaggatgacacatgaagatccactgccaggtcaggatttgcttgtttttatatctgtttggtttaattgtaaagcccgattaagataaggcccatatgtcaaagcccacgcgatgatgagtcattgtgcgtggcctttttagtttagtaatttttgataatgctgcaattggaagatatagcatttggttaaattgacccacaaacacgtgacattcttctcttgctgtcagacacatgggatgatgattatgatgatccctttggatttcacaaaattaagatttttttttttaatttcttcatgtgtcatcctcaaaaaccatacaatctttgatcttgataataagctttctaattaaatcgtctttgattggcccagtgtgaaaaaaggaaagaaaaaacaaacgaaagctaaggcctacgcgggaactccgtgaacgatttgtcaacagaaccaaatgggaaaagaagctttattaaactccaatctaattttacacatttattatattcgtgatctaccaaccaacctatcctttcgtctttttttttttttattgtgaaaactacaaatgcaaaaacaaaactgcatattaataagaaatgttttggatatcatgattctctaaaaacatgaattactccatataactgataataaatttaatcatcgccttcacatctctatttgactatcaaccatataattcgctctcattttctttagtgaaatgttttggtgggtgaatatgcatgaaattcatatggatagactttaatggaacataaaataaataaataacgaagtggggattagtagtagtatgtggagaaaagttggacaactcatctgtttttgcaaactttgcaagtgtcccatttatttctcgtctcttatgtcgtcttgcttttattaggacaccacaaaaaaataagttgactaaataaaaagcaattaagaagttgactaagtaaaaagaagctgaatagtgtttttttccatcatacaattaaccacaatgcaattaagaacaaacaatctttaattatatccacaaaaattgatcttttgattttcatttccctatattctttgtaacaagaaaataaaaaaaaaaagaaggaaatttaggaaagtttttaaaatgattaaatagcaaaagcaagtaagctttgattttgatctttcatgaaagaaagcgaagaccaaaaaagattctgtagggaagctctctctcttttgttttcttcttcttcttctcatcctctctgattcttcgctttcttcaattaatgagatctcacccatctccctctctctctctaccactactacaactactcaatcactaactctctcctttctctttccatagtcagtcattgtctctggatcaattgttcttgatcccctaaaggttccttcttttcctctgattttctctgattccttgcacttttgctttgtttctctctttgtctttgtactctgtaatctcatatttggattggctcgttcgagtttcgtaggatctttcttctgatgattttggtttgttcttttctctcttttgtcactctgcacttgttttgggttacagaggaaactttatcagatccatttttcttatctaaatcgggtttctgaaaagtgaatcgcttttccacttaacaataatcccaccttttttcttttcactattagggtttcgttattcttaaggcctgcttgcagcattactatataaaagccttataagatgaatctaatttgctttcagctctcactgttcagatataagctttggggtttagcattatatgttttgttttcactggaaaatgtaaacaatgattcttgaaaaatctggtcacgttttcttaacgtcaagagttgtatggaaacttgtttcagtagttaatcttgcaatttgcctcataacatgtgtttggatacatgatgtgcttattataagacatttgaggaaactctctgttcttgatttgtatgttattttgttttcctgtcttctgattcttaagtgttttgattaatttattagcaaagattaatgaaaagtgaatatattacaaaacatggagctataagagtcttaaggttggtccaatgccaaacaattaggacaggctgtttagtaatatctacatatattctattgctaaagatcacatgctgggttttcttctttatgacttgtttgcgtctgcttttcttttttgtaactttgcaataaattaatcactaattcatttttctgcaatgttttcagctcacggtccatgcatcatcattgaccaagatttgaagaaaaggttttgcccacaaagagtattttatatagaataaagaaacttgtgtgaaagctctttgatttgaccaaataagttgctaaaagcctttacattgggggatctggttttggtacaacaatagaagtcttctttttctcaaatctctctgcgatcagatccgttgtgtatacttgcattgaccaatgggaggttgtatctctaagactcgtggagcaatgaagagcctatg

SEQ ID NO: 20567 - DNA, 3000 bp, Unknown
  misc_feature (1)..( 3000): 2750-1469P.txt file - cDNA_ID_1827069; gDNA_ID_1620756; Annot_ID_49890
ttttcccatttggttctgttgacaaatcgttcacggagttcccgcgtaggccttagctttcgtttgttttttctttccttttttcacactgggccaatcaaagacgatttaattagaaagcttattatcaagatcaaagattgtatggtttttgaggatgacacatgaagaaattaaaaaaaaaaatcttaattttgtgaaatccaaagggatcatcataatcatcatcccatgtgtctgacagcaagagaagaatgtcacgtgtttgtgggtcaatttaaccaaatgctatatcttccaattgcagcattatcaaaaattactaaactaaaaaggccacgcacaatgactcatcatcgcgtgggctttgacatatgggccttatcttaatcgggctttacaattaaaccaaacagatataaaaacaagcaaatcctgacctggcagtggatcttcatgtgtcatcctcaaaaaccatagaatctaagataagaagataagggacacgtgtcaaaaatccaacacacagaaacacattttccccgatttactaacgcacaacaaaactctttcattctcttcttacaccttttctccagagttccgacaatggcttcagcatcagcgacagctactcttctcaaacccaatcttccgccgcataaaccgaccatcatcgcctcctccgtatctccgcctcttcctcctccacgtcgcaaccacctcctccgccgcgatttcctctccctggcggcaacatccacgcttctaacacaatcgattcagtttctagctccggcgccggtctccgccgctgaagatgaagagtatatcaaagatacgtcggcagtgatcagtaaagtaaggagtacgctttcgatgcagaagacagatccgaatgtggctgatgcggtggcggagctgagagaagcgtcgaattcttgggttgccaagtaccggaaagagaaagctcttctcggaaaagcttctttccgggatatatactcggcgttgaatgctgtttcaggtcattatgtgagttttggtccgacggctccgattccggcgaagaggaaggcgaggattcttgaagagatggaaactgctgagaaagctctcacaagaggaagatgaaaaaactgcagtcaggccttcttctccattttcttgttgatgaaaattttattttcctaaaaatgccaatcgaattatatgagaagagaaacttgaattggctcgcctgcttttttttttcattcctgtaaaatacttaatgttctgcatgataattgcttaattatcattatcagagatacttatataacttatatcgaattccattttctcaatgattggagctgcttcataagttcgattaactctcttctgttgtactatatacttccctagaaaatttgtctacactttctttagtttttgatagaggagaaatgaattacaccattataaaatctccaaaactcctaagtcacatttctgcataattgcattgaatgcttatcaacctaaaatgatttcaagtctatgtaaagactttcctatgggccatcaacaaagcccacaaagtgtgtagtttggtcattttatttgtaggtgacaacaaactccacaagcattccccattccaacatattacgtgcaggtccacacacgtgaacactaacacatggctcgtatttactctatttatatattataataatatattcattcaacgcaattaacaacaacacgtgtgcactagtaatctaccattatactgctgacctttccaatacgttaaaatcaaattgatgggtgtagtaaataatgaccgtgtttgctgctgactagtgtgtttaattacgcctaatttatgtattttggtcaatagttcattagtataatcttgcaccctctttatttaacactaatcttgcaagtcaacattcgctcgcctcaccaaatgcaatatatatcgtactccatacgggttacaagattaggtttcatcggtgagtactaataatatacgttaatgaatctatattacggggacggatacgaattggataacaaattaaaagtggtcaataagttacttaaaccagtaaaccctagcttgtgataccaaatctctaatttctgaatatgattgatgcaaataatatgtaaaaaggattctaaccaataaaatgactaaactaaccaaatttctaagatcaattcacctcaagaaaacaaaaaattcataaattttggataacaacaaaaccaaaaccacgtgaagaaaacaatgagctgtggtgaggtggtggacgaggaaaatcggtcaaacttaattaaagatcttatctatttttctcatttcctttttctgtgtttttattttctttttataaataaactgtttttgctataaaaaaacaaagacaccaattgtaaaaaaaaaaaaaacatctgctgatcgtctctgagtaaaagcaatcgtttcgaatccaaaattgcccgagaaaaagttttgacttccccgggaaaatctctatcctttcttcattcattcaacaaagttctgaatattttctctgttcttctccctcattttatggctttaccttttattcatttaccttgtctcgattgatctgacttcaagattagaaatctcgacgcgtggcttccattttttctcagagaatcacatttaaaaaaaaaaaacagaaaaacaatattcgatctttgcttactactcattgtgcgtcttctcgatttgtaatctccatacaattttttctagagagaatccatctctctctcttttttttctttggttttgcttgtcccttaaattcagcctccttcatacataacgtcaaagctcagatatctgaataactcgcttgcgtgcctctctctctctaaaagcccatctctttctcctcctcctcctccattgaagaagaaacctaccttcgtaatatttcctcaattacgatcatg

SEQ ID NO: 20568 - DNA, 3003 bp, Unknown
  misc_feature (1)..( 3003): 2750-1469P.txt file - cDNA_ID_1827071; gDNA_ID_1620756; Annot_ID_49889
gacctgtgctagtcttttgccagcttcctcttcagatacgtaacctttggtgatatacttttgaaaaggcggaaaaagaagccgaaacagcggtatgtgttctctgaacaaccctgttgtagcgatgcaaccagggtaaagagaagcaaacgtgactcctgtttcctcgtggtaacgtctgtgaagctcctgcattgtcagcatattgcatactttgctgtctttgtaagcctttgctccatcaaactctcctccatctatcattgaactgttttgcccattcaatcctgacgctaagcctcttaggtctccaaggtttgcctttggcggtacattcccagccaaagtatttgtgtttcctgcaagaacatagaaaagaacattcattgtttgatactaggaactatcttggtggaaatggacaagttgtctgtgttatttacctgttatagatcctacgatgatcatacgttttgatggataatcagattttttcaggtcatcaagaagcaatcttgagagaagaaagtgaccgagatggttggttccaacgcttatctcaaagccttcagctgtaaaagaaggctctttagcagttggttggtaaaccgcggcattgcagacaagaacatcgagtggttgttctgttctccggaaattttcaacgaattgcttcacgctttcaagcgaagcaagatcaagatgcatcactgtgtaatcttccttggacattccaacagatctcgctgccttctcggccttgagaaagttcctgcaagccatgatcacatgccatttccctgtgtctgctaaagctttggccgtagctaaacctaaaccagacgaagctccagtgatcactgcagtgccttttctctcagtcttcttttgctccggcgatgcttcgtttgccggcggcgtggctgtaactgtctgtgcacgaataccggtggaaaatcgcggtttctgtcttctctgttcctgcaacgaaacagagtataaacctcaggacgttttcgatatctttttttgagaatttcacatcgtatagggtgattgactttaccttgatggtcaacagggtggatatcttttcagctctaagatggtttgaaaatgaagaaccagtaaaagtcgtctcctttagagaagcattgaatttgccctgcaaaatcaccattgcattgaggtaaattcttcattttatcgaaaacaaatcataacaagatggaaatcattactaatggtgaaaacatacctctttttggattgaaatggtagaaggaagaagagaataggcagcttggagagccattgttgtacggaactgaaggtgctagagtgtcacagtgtcttcgattttccccgaattgaggagcgacagaagataaggtagttttgggttagtgacacgtgtcttccaggctacagctttttccctcaaccaatcagatcactagtttcagattcttcatctctcgtttattgggccttgagatgggctttaatattgttttgttaactctcaactgatctgatcaccgttgataggtgaactgtaatgaatctggaccgtccaaatgtgtcaagaacaatttggtggaagagagaagaaggcggcaacttaacggtcaatggagaggtgggagaaagaaaacaaaaacgaaaaaagagagagaaaaaaaaacacttttggatcacacagctctcttcatcttctacaatttctaaaagttgcaaaattccaatgaaaatttccatttttgcctctattttattttattttcttcttctacttcatctcttttcttttcctcctccgtcgtcacggtttctagaccatctcctcctcctcctccattgtcttgttcatatgcctataacaggtaactttttcccccctcatctttttaatcaatcataacgatttttgcttgtgaaatttgatttgatcatcattgtttgctaattatattttcaagggtaatttcattgtaaagttttaaactttacataaaagttatgaaaagaaaacatcctttaattgcgctattatgttagctacaacttttagagaaacctttttgagcccaattataccaaaatttgactaagtgaaaatggaaatgatgatggaacttttgaatatttagaaatcgaattagaactttagctcatttatatttagtcattttgattctatcatcttcttgtcattctctaaattaactcaaaggagtaaataaaaatacaaatacaaaatttatacagaacaacccacaattctgtctagtttagttaaacgtgttaaaatagtcacgcaatgctttttctatttttaaaaattaataagctctgacctgtacgcaaccaaataaaacactaaaacttatctgtgatcaacttagctctgtataaaaatcttcctcctctttctttctgtccaattctctacagagaagtcttagcttttgcaaaatcattaactaatctctgttttgatgactagataacttggatgtaggattattatacctaaattctttctttccatgcatttatgtcggttttgacatctttgttctcttagtttaaaagatatcaatattagttatcttctattctttgaacatttgtgtccatctcatgaagttcaggaagcgtaggcaatactttcctgcttgttcgtctcatcgccaagtaatgatctcttcgtcatcttcttcttctccaaactcatatcaaatttgaatcttatcatcaaattgagagtaatcaacgacaccactgcaatcttgcatatacattgttcttgtgtattccacccgtttctttaatcttcaatgtaccgtaattgagtgtcgttttggttgtaacttgtaagtgaattaagctcactcaaactttctgatcttcagagttgatctttttttttttttatgttctgcagctaatgttatacgcaaacatatgtctgaaaacgtttgcaggtagaggaggatg

SEQ ID NO: 20569 - DNA, 3000 bp, Unknown
  misc_feature (1)..( 3000): 2750-1469P.txt file - cDNA_ID_1827095; gDNA_ID_1620756; Annot_ID_49878
ccaaaacagcacaaaccgcagcaacagcattgccttctttcaaaagaaccttaaacacaaatccaaacacttctcttgtaatcttacgagcttcaacaaccaatacccttctcgatttcccaaaaaacgcaagcaacacaaccaccgatatccagatcaccataaccgccggaaccgcaaccgcagccgccgcaaccatcgacatggctccaaacacagctcctaacaccacagacgcgtaaaccgccggtaatcttgacggagacggcgatgacgtgtactggagcttgtaccagctaagcacagatgtgagaaagttccatgaggaagccaggagaatcgcgtagacagctacaaagagacaaacccatgtccgtctcttgctcatgattcgcataaagataaggtacgatcttggaggagagccattcgatgttcttggcgatcctgttggatccatcatcggcgatctgattgagattttttattgagggattttttctttctttgtgttggaaattgaaatctccgtgatttgagatttgtgctgaagaactagaagaagaagaagaagaagaagaagaagagagagagcacaaaaaaaaaagtgaaagtcttcagatttggggaaaatagattagttcacgtgagtcccactctcatgttaaagcgcgtgttaatcactcgttggtttagaggcttgtagtggagtacacgcgcttaagtttcgttttatttattgatttcccccaaaagagaccagacatggaaattaggaacaaatgaatatacatggaaactgcgtgaactcactctgatcaaaaatattattatttccattaatatcacttaattactcttttcttcgtttatttctttctcctctcggaattatgaaattaaatactaatgacgaaacgcgatttctgtttataccattttttacttcaacaaatctgtttgagacgtaatgcattatcttcttttttttttttagtttagtcgtatagcaagttagggacaaacaaacaaatgcgatttgtctttccttttcttttttttaatgcgatttggcttgatagtgcgcctctacgcttattatagccgacaaactaaaataaaagaatcgtctatttattctaacctttaatgacattttaccttttttgttttgttttgttttgtctatcttttatgaagaagactctaaaggaacgaaacttcttgacgttcaccgctagcaaattcttgaatgcatgcgattgtctttttcttatggaagtcttagctttttctcttgaatatggattttaatattcttccgtctagtcatcaaatgagattaagcatttatctacaatatatggaacactaatcatataagttgagaatctacaatcaaacatttttaaaattggatatggatgtggtattgtatggtaaaccatcttccaagtaattggacatttggaatactaagatttacttggcatatgaaacaatttaacgtcccttgacatttgtaacaatttcacgtacgaacgattgcaacgactttgttatgtgtcaaacgcttttctaatatggaagttgacacgactttgagaattaatttgtaagaacattaaacaaataatcttccagttttgtagtcttctattgatgtacacttcaaagaatcttctagttcataatcccatgaccggaaacggagtccaattttgccatacaacacggtcgcgatggcaaattggcaacaccgcatggtccgcatgccgatgaaggtgtcggcatcctattgacgatctctatatttaatacactttgatttttttttaaaataagtaaatgaattagttctaaagacatcgggctgtcgtgtgagccaagtaaattaaagtatttcataaattattctattttagttatttacaaacacacgcgtgtgcacatgtatttggcaaattatttgagtcaaacaacatcttcctatcacaattctgaacttctttatactcgtgattaatttcttatatttttgtcttcactgttttagtccacatgttaaattataagaacttcatacacgaaaactaaacaattaaaaaaaaaaaaaaaaactaaacaattagaataatttcaaacgaaataaaaagtcaatacaattagtcttgtaagagcgatgatcaaatagattgaaagactataataatgctctaagtttattttaaaattttcaaccaattttatctaccatttaaaaggttgacaaaaaaaaaatgttgactaaaacaagtcttgatacaattatttgaataggctgaatgatgataccaatcaaacttacatttaataaaatctgaacattttaaaaaataaaaataaatgaaagagaattccatgaatgatgatgagatagagccatagagagactgagagagagagatgtggagaaaaatctaactttggtcgacgaaaggcggctaagttggttattgacatttagctattttttttatgaatccgttcatacatcgatcgatgatagtgactcactctacgtaatcgtttaattagtcaaatctgctacaactaacaaataaaaatctcccctttccttacatattctctccgcaaccctctttgattctattcaacgctttgcctaaagtcaatcttcatcaatttctctccattccttcactcaattccggccaaagttttgatttttccggttcgaatcactctttctggggatttcacagtgtactgtgtgtggtcttccgaagaagaagaagaattcaaaaatacgatcttgttggttttcgtgaattgggtatttcccgctgagccgttgaagttgtgtgtttgttctgagtggattgaaattagggtttagattttagggaagtgaatggattgggttgtgaataataaaggttaagtttttctgtagattggttatgtgtgtagattcatgttctagagagcatacgaatg

SEQ ID NO: 20570 - DNA, 3000 bp, Unknown; identical to SEQ ID NO: 20569
  misc_feature (1)..( 3000): 2750-1469P.txt file - cDNA_ID_1827095; gDNA_ID_1620756; Annot_ID_166956

SEQ ID NO: 20571 - DNA, 954 bp, Unknown; identical to SEQ ID NO: 5049
  misc_feature (1)..( 954): 2750-1469P.txt file - cDNA_ID_1827143; gDNA_ID_1620758; Annot_ID_49954

SEQ ID NO: 20572 - DNA, 3000 bp, Unknown; identical to SEQ ID NO: 5048
  misc_feature (1)..( 3000): 2750-1469P.txt file - cDNA_ID_1827151; gDNA_ID_1620758; Annot_ID_49952

SEQ ID NO: 20573 - DNA, 3003 bp, Unknown
  misc_feature (1)..( 3003): 2750-1469P.txt file - cDNA_ID_1827175; gDNA_ID_1620758; Annot_ID_49944
atgtggtgctatatagatcatactagatattccttcttttgacgttatgttaagacccttcaatgcagcattaagagcatgttttagaaaattttgggtgtggtttgaggttatggagctgtagattaaatatcacttactcttttaggatattacacgatcaatgttgatccttatatgaactgtgtgagtgtatggataagtggaaaaacaagagacaagttacacttgctttcagtagacttaggtagagcaagaaagaacttagtctccattttctttcttaaaggagttgctgtgtttctgatatttttcttgggtgttgcacaggtgaaaattggattaagggttctcacacgtcccatgggtgaccgtttgcctcagatttaccgaacccttggcgagaactacagcgaaagggttcttccttccatcatccatgaaaccctaaaagcagtggtagctcagtacaatgcaagccagctcattacccagagagaagtacgtatctcaacattctttttctacaacttttctgctcttttgtttctaatggtggactctgtttactctctcctctaggctgtgagcagagagatacgcaagattctgacagagcgggcttctaactttgacattgctcttgatgatgtctccatcacgactctgacattcggcaaagagttcaccgcagctatcgaggcaaaacaagttgctgctcaggaagctgaacgggctaagttcattgtggagaaagccgaacaagacaggagaagtgcggttatccgtgcgcaggtatagcattggtgatcttgattgcaaatctaatgacatgagattagtggttttggcctgaagcattagctctttttgaatctttgtgcagggagaagctaaaagtgctcagcttatcggacaagcaattgcgaacaatcaggcattcatcactctgagaaagattgaagctgcgagagagattgcacagaccattgcacaatctgctaacaaggtttacctgagctccaacgatctgttgcttaaccttcaagaaatgaacttggagcctaagaagtaaaagagaaggaacgagtaagtttcttcatttcatattcatttcatttaaaagatctctccgccttggaagtaaaggatgggttggtgtttgaccaaatgaccctttctcgtgactgattctgaaaatagtctttaagaggacatattgagagagacgcagattggctttggtcagtattattcatcattttcaatgaaactttttgttgatattttcctgtgtttccccggacaattgatgaagttgaatttaaaactcaataatattcatatgatctgatctatgccaatagttctttttagtatatgttacatacgacatgcttatataaatatccgaatataagatccgtaccaatcctttcataaaacttaaatataaatatttcttgttagcttgctattcaaattttcttttttccactagttgccaaccttatctacctataaggatttgtattggagagcagagaaaataaaatattgcatacgtataataagattttgtatgagcagagcaacatggaccctttgtatttaatgacgtcttgccggcgccaccatgatagagacgtctttttctttctttcaccggtgaggagttttatgggggtgacgaaactccggcgaattttccggtgacgtcaaattttaaaattttgaccaagtaaactcttatttcaatatttgtatataaccgacggctgctttttatgatgtcatgtataattaaaattagctggaaacgagtgatgaccgttaaccaagataataaaatgttttgagcaataaataattccaaaaaaataaaagcgttgtggattaacaaaagacggaacgacttgctgtttcgtaaagttaaagggagacgtcatgtcgttttgtcaccatgagggtccatttttttttgtcagtttttcgtacttctcagctgtttcttttgacgaaaggagttgttagattttccacagaactgttgacaagtcatcaccttggctttgcggagttcgtgacgtatgtgcaacgtattttcgaccatatcataagtttaactaatcctagacaagatgttcaaaatgtataattcgatggaaaaaatatgcgtttctatagtttatgcgttttatcaaaattctaaatgacagcttaaatccatgataatagacagatgcttaatggaaaagaaataaaatctataggacgtgtactgggtagtgggtacatatatatgtttcaaggtgcaactagaatataaaacacaaattgatatcttaatgttagagaaaacaagtcatcgtcatgacgtaatagagatgatctaaaatctaatggtccatacaaatgatttgcctttatccataaaacgtaaccttacgaagacaattttaattgtgacataagtttctaaacaaataaagatatctcttgacatcagccttgtcgtaagccccttactatgtattcgtcatcatttagtttaatataatctatatataagtcactgattttatgaatgctacaattttctaaattacaatatgtcaaaaatgacattcggttaagataatcatagttatattctttaaaaaattgagttgtcgcatttgagttccgacaatgagttcgaaatttatctttcacacataagttaaatatatttttaagttttggatgatttacactcaacattaataaataatcataagtttagttatagatctttattttggatacggtgacatggcttcggatatcaagagaatacagtttacacatgcttcattgacccccaaagccaaatgctctccaaaatcctctatataaattctttaataatcacatctcttaccaaacgaacccaactacacaagtctctctctcttttcccatttctccctctctctctttgtctctctatcatcaattatg

SEQ ID NO: 20574 - DNA, 3000 bp, Unknown; identical to SEQ ID NO: 5046
  misc_feature (1)..( 3000): 2750-1469P.txt file - cDNA_ID_1827178; gDNA_ID_1620758; Annot_ID_49941

SEQ ID NO: 20575 - DNA, 3000 bp, Unknown; identical to SEQ ID NO: 5046
  misc_feature (1)..( 3000): 2750-1469P.txt file - cDNA_ID_1827178; gDNA_ID_1620758; Annot_ID_167070

SEQ ID NO: 20576 - DNA, 3000 bp, Unknown; identical to SEQ ID NO: 5044
  misc_feature (1)..( 3000): 2750-1469P.txt file - cDNA_ID_1827186; gDNA_ID_1620758; Annot_ID_49938

SEQ ID NO: 20577 - DNA, 3000 bp, Unknown; identical to SEQ ID NO: 5044
  misc_feature (1)..( 3000): 2750-1469P.txt file - cDNA_ID_1827186; gDNA_ID_1620758; Annot_ID_167066

SEQ ID NO: 20578 - DNA, 3000 bp, Unknown; identical to SEQ ID NO: 5043
  misc_feature (1)..( 3000): 2750-1469P.txt file - cDNA_ID_1827190; gDNA_ID_1620758; Annot_ID_49936

SEQ ID NO: 20579 - DNA, 3000 bp, Unknown; identical to SEQ ID NO: 5043
  misc_feature (1)..( 3000): 2750-1469P.txt file - cDNA_ID_1827190; gDNA_ID_1620758; Annot_ID_167062

SEQ ID NO: 20580 - DNA, 3000 bp, Unknown; identical to SEQ ID NO: 5041
  misc_feature (1)..( 3000): 2750-1469P.txt file - cDNA_ID_1827214; gDNA_ID_1620758; Annot_ID_49929

SEQ ID NO: 20581 - DNA, 3000 bp, Unknown
  misc_feature (1)..( 3000): 2750-1469P.txt file - cDNA_ID_1827238; gDNA_ID_1620759; Annot_ID_49971
ttcttcattttaatcaagatctgttaaagaatagaataaataggaagatactttcacgtccgaattaacggacctgaatgaagcaatcgtcggaagactccatcccagcattgcagtcttataattcgctgattcggacgccgggaagtttcgtcgagttatgtcgcaggagctttacgatgtcgtttcatacgactgaacattattttttttggtgtaagattcattcgactaaacatagttttcaatgtttcattcactttttttgttttttaatttttttttttgtcaaccaaaaatataaatttatttgactcgaatgctacactaatgaagtttagttttgtaaaactgtgggaaaattgatttttttttacagaaactagaaataaggtgtatttttttcttagacagagacataaagtgtatttttaaatccaacttattgaaaattggaatgcgtaaattaacctccaactaccaaaattaaatgactaacgttgataaactctttataatattttagaattatctttactagagacaatcttaaaagggaattgggaattagtttatgattatttttttatattaaagaaaaacactaataacagaattatgtattaatgctcagtcagattatttaatttttcttttctcaagccagattatttaatcaaaatatttcctactaaaacagattttataatatttgggagacaatttatcgaattaaacaggccgagacaggtaaggcccatgtgccctgagaccatttggttcctttctctttttatttttctataaactaaaagagctacaaaaatgtgagcaaaatattcgatattcgtttcatttttcaaagaatatcactaaactaaaagataatatttaatatttgacatgtgtacaaattgccaagtgaatgaatttctcaacaaatgttagagaagatgtttgtttccctttcatttcgagctggaatctttattgtgggtcatgttaataatgttttttcgaagactactgtttcgattttgagaaaaatggcatagaactgataaagaatgacgtactttcttattgattagcatgcattctctaattttcatttaacaaaaaaaaatgcattctccaattttctaaactatgcaaattgcttagaaaccggtttagttgtttttgggttctcttatttctcacgatttcaattttataatatatataacttttttatgggtgtatgtcctatatctttaggagtttattaggtaaatgacaattgaaaataatctacattggtaaagtgataatggaacttatttaattagaaatcaaatcctacatgttggcgggagagtggtctctgattaagctttagcctaacgattggtagatctctttaaaactacgaaatcttggtgaagattgtatgctataagtgtgtgtactgtgtactatttcgaacaaagtgagaatgtctaattgtagccaagccgccaagtagctgccttaaatgtttgaagacacattcatcatttaaaagggactttacaatgaaattgaatatgtatacctccttttttttttttttttcaacgtatacatacctcaaataaatggcattttcaaaggaaatcactcagtcgatgagatatgtttttgtggcgctacgtgaaaacataggtaaatgaactttgtgcatcattgttggaacgaaggatatggctatacaaaaaaatatttggtttccgcgatggatatgatatacaattcaaagttttgaagttgaatattacacatttttcttcaacatatatgttttcttttcagtaacttctgaaacctaaattgtgatatggaattatataaaacgagttgcaactttttaaagatatcaaagataatgtcaacgttattttttgtaacttttaaatgtatacatcacaaattcataatctcttttttttttttttgataaaccgtaggaattccaaacatttgttccgttgataatactaaggcgtataatcatctcttccaagtggggttgagctagtgatctacttcttgagcactcacgcagacacgcagtcactctcttgaccactaggccaaaaacccatcagataaattcatacataatcttatacactttatatgttttattattacaacatagaatataatcatacacacctaacagaaaaccttaaaagcttaaaacctttaaagagtaaacaaatggttgaagtagtagacccaaaatcattaatcataggtatgttacttcctatgtcaaaagaagaaatatgaaatcttcttcttttagttataggaataagccaaatatactaacagcaactagaatatcaaaagtgtgaccaaaaaaaaaaaaaatcaccaaaaacaatataattaaaatatctatttaatcctcgtgcttgctctctcttccagagaaaggggaaaaaaaaaaaaaacagattcctgatattttctgcttcgcttcgctttgctttggcctttgggtttgctttgccttttatctccacaataataatattcgttaacctctcctcgttctcgtcgctgtttcttcccgatctttgctatagttctggattcaaaatctttcttccccaataggtatacgcgaaaaaaaaaatccaacattttcttcttacttaaatcctcaaattttgtcacttgttcatgcttttaagtaatcaatttcttaatttcagtgttaagtttgtcacgaatcttatttcttttctgttgggttaatgaatagtcgattaaaaatcccagctttttcaatctgttattgctaagtgattaggaatctcagatgttgacgttcactgatagggttttagtcaaaattcctaatttcttcaagctttatagtaagaatcttaagttgtttgttttgggtacagatgtttgtctcttaatttttgatttttctgcaaaatcaaatttttaagagctatg

SEQ ID NO: 20582 - DNA, 3000 bp, Unknown; identical to SEQ ID NO: 5068
  misc_feature (1)..( 3000): 2750-1469P.txt file - cDNA_ID_1827242; gDNA_ID_1620759; Annot_ID_49970

SEQ ID NO: 20583 - DNA, 3000 bp, Unknown
  misc_feature (1)..( 3000): 2750-1469P.txt file - cDNA_ID_1827246; gDNA_ID_1620759; Annot_ID_49969
gagaatactgtcagcgacgatggaggttgctggaacgttcgtcggagatattagttcttctaagcgtcacttaatggcgtttctacgtaacaagggttttgatgcaggtacatatatatagtctataatcatctctttctatataatatactgaaatttacattttttatattgaaatgggaattaacggagatgattttactagtttgtgactaatatatgggattatatttaacctacggaataattttcgtatcttatgtaaacttgtaattttgtttaactatttcgtgattttacaagtgtaattagtggctaaaatgaatcaaagttttgattttatttgtgtttttcttttaaaagttaactagaagatttattttcatcatactgtagttccattccaccattttataatttaaatcacgattccacaatttatttttatcatctagagcgtacgtaaggttccttaacttgagtattttcttcattcgttttatgattcagtagtgtcttaaaaaattagttttttgagttaataaaatagtgttttggatattggaaatttagaaccataaaatattcagacgaaatggctgcgaagattttttttcttggggggtcgaatagctaagtagattaaaaaaaatcctccttttcaccgcaagtagccaaatttgtttttcctactgatatctatgatttgtgcaattgcttaccaatcatattaaacagaagttacctaaataaagtacttagaaataattaagttgtactaaaagttatataaatatgtactttatattgcagccaaaaaaagttgtactttctgtagtattatgatgtactcgtggtacttggaataagtttctactatatgtaagaaaaatgacaataatcatcgccatgtatgtgtataggtctttgcaagtcgagttgggaaagattcggcaaaaacaccggcggaaaatacgagtacgtcgacgttcgttgtggcggagattataataatcggtatttcgtcgagacaaaccttgccggagagtttgagatagctagaccaacgaaaaggtacctctcaatactaagccaagtgccacgcgtcttcgtgggaacttcagaggaactgaaactgctcgtgagaatcatgtgccatgagatgagacggtcgatgaagcacgtagggatccacgtgccaccgtggaggagaaacggttacatgcaagctaagtggttcggtttctataaacgaacttcgacgaccaataactacgaaatggttaatacttatgatacgactgcgtttaagggttgcaaggaagagttttgggaagctaaaggtcttaaggttatggttggtcagctttcgattgctttcaacattagtgcggttgaagtgtaataataatcagaaaacaaaagagggatccttttccagtttgagctaatatgtaagctaattcttgggttttgtttgtaaatactaaaatagtgaaatttttgttgatttagttacgcagattaatacgtaaaatgtattttaaataacatgcatttcggagcggttttaactctactgaccaagtcagatttgttttggtttattttcatttttcaacacaaatctagtcaaagacgagtgtcataaattgaatggtattttagcgttattccttccccgaaaaagaaatttgtgtccgagtgtttttgacggcaaagtgtgtgtttcattaattgtactaactagtcaaaaaagtataaagaaactcacaaaatatttatttttcatttataagctaaatggtttattactaattttgttatccttctaccataattagttgccactgttaaaatcggatgaattatttttgttctatgtgattgttgatgatacagtgcactaaaaaaagttcttcatcttagtgttgtgattatatcaaacagatttccattactgtctcctcaggtttcataagtttataagcataatgtttgctttcgatgtgaaatgaccaatagactcttgactctttaggcccattatataacccgatcatgggccagtaacatgtggaaggcttttcatgtggaaggcttgtcttcattaacacatgtaaagacaaggatcaaactctttttttacaaatctgtttagtttagttatgaggttgcaacaggtagcataataaataaaaattttaccaaatgtttcatttgtattaacaatcttttagtaatatgtaaaatgggaaaaataggaaaaattggaaatagactttacaaatggataacactggatttcttgtaattgataaaataatttttttgagatatcatatgtttcctcttttcacatttacaacaactacaggtcctaaaatttgtccaaattatcgtttatgtactcaattattcatctgcaagttctcacaaaaatgttggtgtaaaccattaggttaaattctccggtctcctctgtaagattttgaattttccgcaatagaattaaacctcaaaacgaaaattaaaaaaaaattatccgaaaaatgcagataacgcatgtagaaaaaaaattacaatttacgaaaataataataatagcaaaatatttataatttttagtacttttgtttcgtttaccaaacgtagaggcatgctcctaggctctttaaacatccatacaccattttaactgtcttcaaatataattagctagtattataaatcctggaaaaaaaaacccagccattatcgtagaactctaaaacaaattacaaaggaaactttaattatgtgaaaagcaaaaattatatcaaatagtattgcatatgaagtattttgaaaacactactaatcagatcttatcaacaaaaagaacataagataaacatttataagaaacttaccatttagacaaaaaaaaaaaaaaaaaacttaccatttccatttttttttcttcgagtaatatttttaattttctatatatactacatg

SEQ ID NO: 20584 - DNA, 3003 bp, Unknown
  misc_feature (1)..( 3003): 2750-1469P.txt file - cDNA_ID_1827254; gDNA_ID_1620759; Annot_ID_49967
aaaactagaaaccctagctcaaaggggaatcatcaacttgttgtctctccactattttaccaagtcgtgagataaattttgggccgaagatggaagataatgggcctagagattttcagcccaatggctgaaaacattttatgcatgaatggatttgtaactagtatcggaaaccatccaaacatgtgatgttgtagactagatcatctataaaattgtatggtctaaactatacaagctatgtaaatggtgtctgtttctaatactatgtaaactagttaacaagatttcgttaaaataaactataataaccaatgaatcaaatcggtaattggaactaattgagtgtccaacgctcacaaagccaacccctaaatctcataaacctacaaaaggacaaaatgtattagaagattgtgaatcgcaattttgacaaaaaaaaaagagtgagaaaagaagaagtatagttatctttctaagtctagttaaatgatctacttgttggaacttcaattctaaaccaatgacttctggtgaagttcattaccaaaatgatcggatcttgaagtcattagattctctgcaatgaacattataaactaatgtaactacatgtaaaaattgaagtcatattacataagaaattgaggtcttagtttgaaagcttataatagcaatgaacaaatataaacatttatttcacattggaaaatgaaatattttcctctatatatattatacacttactacaagtttcactagctttgtgaagaggacattatggtataagtgatgaatagacatgcaaaacaaacatcgggttttggtgaatgtgcccacaaaagatttatgaaacatttgttttttgaatttaatgctaaattatattcaaaataaaaaaaaacgttttttacacaaaactggaaactgattgaaactttttatgaaaaaaaaacttctcttctctaagctctcgatgcaaaccaaactctcatttcatccttatacttcaaaacaccacaaccactcatcgtacttaaacgatttctgacgtttttgtctatcatttttataagtctctccggcagggatgggctcttcccgtgtcttctttggttcctttcattccaaattgagtgtatgaaacattcgtcacatatttttggtccaagatcaaactgttttctcttcggatttttattcaacatttgtcacatatttttggtccaagatcaaacagttttctctaacggaacaagattctacagcttctcagcttccacgtggtcccgatcatggattgccacgtgtacgattccacttggtaaacatgatttttttttggaaagacaagttgtatctgtaagattaaataattcagtacgaaaaggcatcgaatcctcactcacggattgttcacaaatgttgtctccaagtagtgtaaaatatttcgctttttacacattgccaaagatcatctccatccattaacgttacgtttatctccgaatatactttatgaaacagtttgttaattaattaagttctagatatcaggtagaaagagagtttatgacactttctgtcatttttagtcatattttaagggaaggtttttgcagagactagaaaactgcaaatcatatagtgtttctaactttgatatattgaagatttttttttgttgatatattgaaattttgatgtaatattaacatgtcttatttatgtttctttatctcattcggatgtatatattttttatgccacaaggttttctgtgacctaatatcttatatgatcaaatcaatagtttctatatccaaatataacatgatctaatggtacaccaataaaaatgctccaacgatgatcgtgaaaaccaataagaatgtgatctgaatttggtttattattacggtgtaattttgttattttactagccagtgttgtatatggatgaatcaaagtgtaattttttgtgtaactaattattcgtcgatcgcgacaattcccttttaagataggatagtttattgatatataaaataatcctaatactaaaatagaaaaagacggtcagataacaaatattttcgcagtcgcgtctaatggtttttacgaagttgaatacagtgtgatctttggattatttttgaagtcaatcttcatctataatttttttttaaataatattaggataataataggttgaagagaaataattatatccataattttctgtaaataaatacagctttactttatatttattatcatcatcgaaccaatgatatgaagcaattttagtcggtaacttggcgagtcgttaattcagttcgaattataaaaagacttctaaacacgaaccgaacacgatttgatttgttctcaagagaaaatatataaatagatttataactctttacttctcaaaaggctaacttttgaaccaagcaatcacgagaaacctttgaaaatctcttactttggatccgttcccttattcacttggtttcttctttaacttccaaaactcaacttgtaaccaaaactttctggtgcttttctttcttctcgtgtcctttatttccccggaaaatttaagctcctcttcgttagtttccccggaaagtttcatcattgttatacactaggaaaaaagaagaagatgaaacccatttgtttccttctctgtttctgcttccttcctgtgaaagtctcttccttttgacacaagtctcttctgtttcaaattttctctgttggcttatttcttcttttccctgattctgttttgttttccctagaaaattaatgaaacgacggttagattctcgggagatcctatcgaacccatgtttttgaatcagttcatgcacttcctgaaatctattcatactttcagaaggaaaaacctagtttaacatatctttaaccctaatttctctgctttcaaaccctaccttgtgaaccaagcaaaactctcctttgatcaatatg

SEQ ID NO: 20585 - DNA, 3003 bp, Unknown
  misc_feature (1)..( 3003): 2750-1469P.txt file - cDNA_ID_1827264; gDNA_ID_1620759; Annot_ID_49961
cgaggtcgaatatcccgagtaccgtgggcttatccaccggtggttcgtctggtccaaccgatagcgtcaacacatctacgccgtccataattgcctatgacaaaattaaataagtaaacaaataaaattggttaaagatcactaagagaaatataggccctaattagtattgtttacttggtcgatggctgcaattacgtcaacaagagttccgattgatggataaatcgccttgtagacggctattctgccacacaaaccaataaaataactcgtcattttttttccaaaactataaagtatcatttagtctttgaactttcaatatatgagctaatgaatatgcgtgaggtgacaaaccgtgaacgtggggccataccgctagcacggccgtagaagaatccgtcgacgatcaccggaactccagcgttcccggctgcgatggatgccacgtggctgaaccaacccgaccaaatagtaaacacttatgcaacacatacaatgcacaacaaacttacaaagcaaatgtatagaccattttacaaacacaaacaatataaagacatataatctacccccataatatggccgtaaagagactttagcaaaacttattgtcattaccgccaataatttaaaaccattatatagagtcaagtctacaacctcatttccatattctcaaaaaataatatgaacatatcattacagtttaccaaaaaaagatagatttatagttttttttctaagatatatagttgactacaaaataaagacatgtatttataatacaatggctaagtgatttatcaaattcaaaaatggtatttcacaaaatctcttcaaaaaagagagagacatttataccttccgtggccggacgcatcgaacggagagagtatatccaaggaggagttaagagcgcctgaagctcgagctccggcggaaaagaaccttgcggagataatttttccgttacaagatccgggtggaaaaaagggaccgatctcacagtcaccggagaaatgcaaacgtgagagatttgatgagtaagggtttgtgagatcaagtgcggcgaagctaggatgagtagggttaattccggtgtccacgaaaccgatcacgatgtcttctccagcacgtctgtctccttcgtttgagatcttttgccagacttgttgaggaagttccaagaaatcgggagtgtatgttgtcattagtttcactcctttgtcttcttctactgccttcactccttttgttttcccgagtttcttggcctgcaagtatcagacaaccaaaattaaccagtgattgaactaaacctaattaaaaatggaaattatcaagagattcaaaactcggcgatcctggttggtttagtttcaattgtttttgatattttcttaatatatcggattcatagtagttgatatcaagtaaaaaaattgggaattcatttagttatgcacttgcgatataaagtgggttcaatttcttaaaaatatgactttttatccaaaaaaaaatgaagtccttaaacttgactaacgaaatgaaccaaaacagaaaagtgaaccgagttatattcattttgggtaagcggagaacctgagaagcagtggtacggactgcaatagcattgatgacatgtttgaagctataaagctttgtataacttcccttttcaagtgtgcttccaagtatttcgtcatgaatctcttctatcttctttgcttctaacgccatagctttgctaattaattgtcgaacatcaaaaaagtattcctcaataaataaatgaattatataatgattaatttagatattggccaagtcaaagacatattgttaatgaacatggaagatgagaaaataagaacttatagatgaatttaaaccaagtatatgaaaaaataataatgtgataaattctttaaatttcgaagaaaaatgtattgatgtggacctgttgatattagtagaagctcgaaaggccaatggttcaccttcaaccaaaatagagtaaatctttggtatatgatcatcgttttcgccttttccttctttttcttctgctctggacaatattgcacaaacaaccaatacaaatatacatactattaaacatatgtaggaatatgatcttagttttcttggattggtttccattagatctttattaggattctccatttgcgttaatgaagataatttatatcatgtagagggcaatgagagtcatgttcttggacaatgcacattaccaacgtgaccattttattctatcagaggtttatatatatgcgttacaatttgtaatatttggtattatggtgtgagccttgcttataaggaagttattttcttagttcaaaccataaagaaaaagtaaaaaggaagcttatttagaaaaagttatatcttaaacaatctgtcattcctttttttcccatttaatgttatttttcaacttatataaaataggtacacaatttatcgtatgccacatggcatgttttgattcgttttctaggtttttgctgacccagattgataagattgtgaactacatttttcaagagtaatttcagttataatgagaaatatggaaaattaattaaaatatagcaatgtaaagataacaagattgtttgaatattccttaagacaagtttaaaccattttacccttcatttaaactgttacagaaaagaaaattagattttttcattagacattttatttctgaaacatgtgaatatttgcattctcaatctcatattctcatatagccacaatattcgaaatataattcatgtaacaatattatcgtccaaatcccttatggaattgtacacaaaccacttcatttctcgactcatttattattgggccaagatgggccggactattgtcttaagaaaatataatctcaaaacccaaatctgctaacatatatcgaacaaaaaacctcaggaactcttgaaaacttgttaaatg

SEQ ID NO: 20586 - DNA, 3003 bp, Unknown
  misc_feature (1)..( 3003): 2750-1469P.txt file - cDNA_ID_1827274; gDNA_ID_1620759; Annot_ID_49958
aacctgtcaaatgcatacaatatcctaaaaattggaaactatctcttcagaccaaatagcaaagagagattctatattaatgaaaacaataatctttacagtgaattgatcagcacgtcgcttctctgattggagaaaagataaccgcattgcagcaattttctcatattccttcattagtacatagcaagtccaaaatgtgaatgcataagccatcacaagatgtgcccaaaacctttttaccaaattaagaaaaattctaatcattataaagtttttaacaaaaatcagaagtagcaactacataattttctttcactaacaaacctgtctgatccacgttcgacattcgaaatcgaaagcttatcgatattactcgatgttacattacgaagttttgctagctgcaatccatcacttgtccaatttacaggtactaaaattgaccatgaaagtaatgcaatcggaccaaagatcttaagcctataaaatagtaaacaaaaaaaaaaaccattagaaaaaaaaaacaaagctataattagtaactgtatgcaagaacaaaacattttttgattacccaatcaagtaaatcctcaagtaaacagcagaatccaaaccagcatgatcaataagttcaggctctggcatcttaagagcatcaggcatccagtttaaaaaccgaacgtatgatcgaaagtccaaattcataatcttgctaacgaaagcacccgaattcacagggctgcttctaacaccttttaagtaccatttagggaaataaaccctatcattgaatggttgaatcctcaagattgcaaatagcaatagaaatatcaatgcacttagaatattaatcgctgctgctagtccaatatctgctaatgtcgccatctcctcaaactaatttataataaaccctcacaaattctttcttcacctgcaaatatataagagccctaaaaattgtcataagagtttagacacaaagatcaagttttagatttgtataatagtcaaagacgcttatactaatctcacctttagaaactcattactcaaaaaaatttggccctttcgttgactcttttttttcacaatgttcttgcgatcagattgaagaagaaaataatatgagatgaatcaagaaatcatattggtgaagtggagatttgtgtggtttgtataaaagcttcttcgaatataatctttaaattttcttcaaggaaaagtattgcacaagtttctttagttttctcttctccttcctctgaaaacagaaacagagagagggaagaaaaaacagagtatggaaaaaacagagagattggttctgttaacagcacaaaaatggggaagagaagaaaagaaacttcgtgccgtttttgttgatacaaaacgctgaaaatacacggagaaatagaagaagaagaagatgatgaaaaagttggatctttttaaaatctttgaatctagttgttgttggtcggccgtctaactcaagagactattattattccttgaaaaagtttcatttcaaaaaaatgtcccaattgggtttattcctaaattaaacttaaaccagctctaactttttattattattacacatctatcttatttgttttagatatacccatgcttattttggagataaagttagattaaaataactaaaataataactttgttgctaaaataagataatgacttcatagttgactaaagtaaaaaatcatgaaattagcttaattaaattgttactaatactactcaagtaagaaaataatgaaaataggcaaataccgtgccatcacgttgaagtctataattttttttgtttttttttaataatcatattcttcagtataaatcacctttttgtctattttattcccaatacgaattacttttcttacgtccaaatcaatgtgaataatctagctacatttttcttcattttctttttttaataaccacctttcatcagtgtcacagaaatttatctaaggacgtgcgttaagactatctgggattacatcaaaactgcaattgttttttaatactctcattatattagtccttgtagacgtgtagtactagtaccatgtcgaaaaagtaaacatttgtatcaattgctatatacatatattaaaatggttgtaaatacaattttaaattcttaacttaattatcttgaaaaagtaagttaataagtgtctgcatgtgctatatttcctttaacaaaaaaaaaaggcctgacaaaaggaaattaataagttctctaactcttgtctaattaatataacaccaaaaacagatgtctaggccccaattaaaatcatattactctgatatgcagaaagcgtatttgaaaccctccacacaaaaagcccaatataccaaacacatgcttgcaactatttttgtttttgacagctagtttagctacttgtttatgttatgaaacacaatgaaaaattattcaaatttcatagatatagcttcaacaagctgtagatagtagtaataaactagttttcaattttattatttacgtagttggtaggagctaatccaactttacacatcgctaaatgaaaaattattattcatcttaaatactcaacaaaattattaattctgtcttaccaaaatgttattaattctaagaaatgataacaactactaagaacagtctacttgatcaatttcttataactttgaaaccacaacggacatacgtagggttatatttcgtattagataaaataataggtaaagattaaaatgattttaaaggacagggaccttaaattaataccagcgtcaatctcaaggtttaaaaaaaactttaataattacgttcagacaaagaagaaaaatcctcactgaaattcgagcaaaaaacactcacttcgctctttcttcgctagcttcgttaaattcagcaaatctatctctcacgatcgaacagaactgagagagagtgtgagcttagccatg

SEQ ID NO: 20587 - DNA, 3000 bp, Unknown; identical to SEQ ID NO: 5060
  misc_feature (1)..( 3000): 2750-1469P.txt file - cDNA_ID_1827282; gDNA_ID_1620759; Annot_ID_49956

SEQ ID NO: 20588 - DNA, 3000 bp, Unknown; identical to SEQ ID NO: 5059
  misc_feature (1)..( 3000): 2750-1469P.txt file - cDNA_ID_1827286; gDNA_ID_1620759; Annot_ID_49955

SEQ ID NO: 20589 - DNA, 3000 bp, Unknown; identical to SEQ ID NO: 5059
  misc_feature (1)..( 3000): 2750-1469P.txt file - cDNA_ID_1827286; gDNA_ID_1620759; Annot_ID_167098

SEQ ID NO: 20590 - DNA, 3003 bp, Unknown
  misc_feature (1)..( 3003): 2750-1469P.txt file - cDNA_ID_1827326; gDNA_ID_1620761; Annot_ID_50016
aatgttagcatcaacattgactggagaactggaatcgctgctaaggattgggcctctattgctaagaaagagaagatcgaggttagctttcaagagattttacagttcagagagtggtattgcttataattttgcttcaaaatatttctaaaatttgttactctatgacaattgcttaagggtgtggagctggagatcaggaaactcgaaggcgcagtcgaagccatccatgaaaatatactctacctaagaaacaggtaaagtcatcttcagctgcatgaactgctcttgccttctttgctgactctcattatcaaaatggtaattgcagagaagcagacatgaggacaatgagtgagaaaacgaactcgcgggtggcttggtacagtataatgtcactaggtgtttgcattgctgtctctggtttccaggtactctacttgaagcagtactttgagaagaagaagcttatatagagattccctgatattcaggtcctttaatgagagtttcttcttaaagaataatattcaattcatctcctttctttcctctttacacgcctcctttttactgacgctgtaaaatttttgttcatggattgtttatgtagcttctctctgataagaagtcattatttctgattctgaaataataatattaacttcttgtcatctccaaagtccaaacgaaagagattctagaaccattgatattgggttgtaactgatactttatgttagtttggggctataacacgtaagtttgacagtacaagggttaagattacaagaaaaaactaatcaaatgggtattacatacaaatcagcccaaatttctgacccaacaggcccgttaagagcaaaccctaatttcaaagagaatatatataaaccctaatcacatttcgcaaccaccaaagcggaggaaaaatgccggctggacatggagttcgagcgagaacgagggatctgttcgcgaggcctttcaggaagaagggttacattcctctatcgacttacctgaggaccttcaaggtcggcgattacgtcgatgtgaaggtgaatggtgcgatccacaagggtatgcctcacaagttctaccatggtcgtactggtcgtatctggaacgtcaccaagcgcgccgtcggtgttgaagtcaacaaacaggtctgatgatctctcacttcccttaaacttttgtgtccttgaattaggatttgagcttgttgtgctatttggattgttgatctgttgatttgatgttgaaatatgtgattgagtattaggtttgtagaatgtaaaccttctactgtgctccaatttagctcagattgttagttttggctcaaagatcttatcttctattatgcagtagtgtggttcttgatcctgtttcagatttgaagtttgattgcttaggtctcgtttagtctttagccttagcatgcattgcgttgtatcaatttggccctttttgcatcacagttctagctaagcatctagttttacttctccattgaactgctagtatgtttggtttcatgactatcgcattgctctagttttgctttaaatgaccaccaacattcgtatattaatcttgtttctataagtgtcttagagatgttattgtgtaatgctgattagcctatgaccagaacacaaacatttttgctagtactacttatattgggtattatgactgacatatgatggtggggttgtttcagattgggaacaggatcataaggaagaggattcatgttcgtgtggagcatgtgcagcagtcaagatgtgccgaggagttcaagctgaggaagaagaaaaacgatgagctcaaggctgcagccaaagccaatggtgagaccatcagcaccaagagacagcctaaaggacccaaaccaggattcatggtcgaaggaatgaccttggagactgtcactccaatcccctacgatgtcgtcaacgatctcaaaggaggctattagttctatcttcttgtgctttagaactctttttcatttgttttgtagcagacttaaaactaagaattatgatttactatataacaggagtttgcaatccagattttgtaaggatggtttatttttattattggtatttttgatcttccaactattgttcacttttgtcaacggtgtcttacgaattttaaatatgtctgaaattgatttaattatgagcctcattttaagatacgtttgacttggagcccatggaactccagcacgatgccacgtagcgtctgagcaacagaacctaattttgaacactgaactcaaaagagaagaagaaaagagtcaagtcttgggtgtccattaatgggagatctctgttatgttcaacacttgctcgagagacagatagaaaccaggctgcttcgtcattgtttctcctctgaagcattttcgttatttctgtttgctgtattaaaatttcctaaaatagaaagactatgaaacctcatttccctaaaatctctcatattcttgataggctcttcgtaatttcaggaatcactcacaattccaaatctctctctctctctctctctctctctccattaatctcagcatatctctttctctctaacccacaagtcttcctttgattctttgatttcaattcgttttcttcatacaaaaacattgagacacatatttaatccatatttcgagatcagtcttgctgacctcaaattttccagtttcgttacatctacagaaaaagctcctctcttttttttttgtctcccatttgattttaagattagcgtctaatccaacaagttccaacaaggtctaaagatcaaaagctcaaatctttgttctttgttggtggtgtgggtgggaagatttcattttcagtggagaagaagaaaaaaggaaagattaggaagctaatcaaaacatacagtttcctgattccggtcaggaaactgtggagcattgacggaatcacgaagccgtggagaattatg

SEQ ID NO: 20591 - DNA, 3000 bp, Unknown; identical to SEQ ID NO: 5083
  misc_feature (1)..( 3000): 2750-1469P.txt file - cDNA_ID_1827334; gDNA_ID_1620761; Annot_ID_50013

SEQ ID NO: 20592 - DNA, 3000 bp, Unknown; identical to SEQ ID NO: 5096
  misc_feature (1)..( 3000): 2750-1469P.txt file - cDNA_ID_1827338; gDNA_ID_1620761; Annot_ID_50011

SEQ ID NO: 20593 - DNA, 3003 bp, Unknown
  misc_feature (1)..( 3003): 2750-1469P.txt file - cDNA_ID_1827342; gDNA_ID_1620761; Annot_ID_50009
tataaattttaaaataatatgtatgaaattgaatataaatattcaaattatgacacagtactcagtaattttttttcttaaatctacttttgacccgttatagtatttttttcatgtactgaacaatttatattcgtttttaaaaattcaaattgtggcatatgcgaaaaaactctaattatttttttataacgatgatattattttttcgcaaaaatagaatcatataaagatgagaggtgaattataataattaataaaaaattaatatgataatattgatatcaaatctaatttgttgattttaattggttacttttttggaaattaataatgtatttcgtttttgagttaaatttaattaattaaattagtatttgactttttaatttttaaagaaatgaattaatttactctttaaaattttatttctaatggcatacgtatgtaattacttacaaaaaataaggttacattttaaaaattaatatgataatttagatatcaaatctaatttgttgattttaattggttacttttctggaaattaataatgtatttcgtttttgagttaaatttaattaattaaattagtatttgactctttaatttttaaagaaatgaattaatttactctttaaaattttatttctaatggcatacctatataattacttacaaaaaagaagattatatttcaaatgtacttcccaaataatatagtaggatcacttccattccgagttttcttctttctttgatatatatatctacttatttatttactcggtttgattttataataaatttgtttataattattttctgaacaagagatggccataaaatacagtgatgaaatcaataatggtccatgcaaatgtactcaaattatccacttggaaagtttatagtatacaatgggttgttacgtattttagaatctaatttgcatggcgatttaattgacatttcatcatcaaccgagctataacgagagataaaccagaagatgcaacgttcgtgaacaaactcgactgatattctagatggttttatttattttttacttatagaaaggaacaaattagatttaaagataatatgctctaatctaagagtttggaaccactataccacatactatatcccatgattaaaaaaaatctcaattattatagcgcaaatgattggttttcatcagttaatagaacttgctgagtgagtccccaaatttgaggatgattagtaatttagtatcgtaaagactaaaaaagacttaagaaaaatagtaatgattagagaagtcaaacctttaataattaagatagataaagagagacaaggttgctcaaccccacttggagtgtgatgcttttttggcagtgttcctttatgataacacatctcttcacacacaactttagtgtatcacaggcccatgtcactttaagataagataacatattctagtatatgattattttcatatttgtaagtgtattaaattattcatagacacaccatgaattaattgtaataatgcgaaggacctgtatcatgtaacagagacagacgaagtgtgcagaggtcggtgagaagcaatttggtcaccatgctccaactctcttctctaggtcccttttgctttaattttctcgtttaataacaatatcttatgaaagcagttaccatatcaattgaaggattgtataataccgtaatttatttatatatagtacatctaattaaacattaattatttctactaatagcctaaaaccactactaatacaacaactagtacttgtttacgataattattaaacttgtctcgatacctacaacatgcccaaaaaagtaatcaatactttgtttaatcacaaagatctcagtgagatggttctatagatagtatttctgatttgttagtatattagagaattgaccatctattaaaataagagaatgaacactatttgataaaacaatacatacgcaattatcattgtctttaatttttatcaaagtaatcatacgatcgactatttgtatgcaaaaattcatcattttatttgcaaaaaaaaacaaacaaacatggtagaattgtatttggtgtgtgttttaacaaattgttgcaatgtttagtgcaacatatataatccactatatataatcattgacataattaatatttgattatatgaagcaatttctctttaattatgtgtttataaatatagggagaaaagaaaaatagagagaaaggtaaagagtagagctaatgattcgggcgacgctaaaaggttgaatgttcgagagaaacggagtctcagagactgtgaaaacaaaaaatcaaaatcctcagttacagacgatttggtcccctctcttctctctctgcgtccgtcttgtgcgtcgatttgtctccatctccttctctctccgcctactttctcaggactactccaattcgccgactttttctcctctgttctctgcatttggattgatgccactttaatactttgaggttctcactctctctttctctcttcgctgacttcgattgcttcagtaccctttttctcaggtcagctacgatgatagctttattcagacaagaagatcaaagttttgatctttttgttttggttttcttaagagatggttaattaggtcttgagtgcgctgttttgaatcgttcttcagtgtgattaaacaattggttttgatttgactaatcatgttgccattaaactaagtgaaaatctctgctttttttatattgcatattgatgattgagacattgatttcttttctatttctttatttcccagtttctaatttgggaactgaaaagttttctaatttaagcattacaaagtgtacaatttttgtttctggcaagtttttcttggcctaattcgtctattttatgaattcacctttttaggatcaagacttcgtaaaagattgtttctgtaaaacgcaacaccatg

SEQ ID NO: 20594 - DNA, 3003 bp, Unknown; identical to SEQ ID NO: 20593
  misc_feature (1)..( 3003): 2750-1469P.txt file - cDNA_ID_1827342; gDNA_ID_1620761; Annot_ID_167157

SEQ ID NO: 20595 - DNA, 3003 bp, Unknown
  misc_feature (1)..( 3003): 2750-1469P.txt file - cDNA_ID_1827352; gDNA_ID_1620761; Annot_ID_50006
caatatattgaaatatttatacatttaaaataaaatctataaaactgaaagaaaataattaatattctgaacttcattttttgcattttgtgtataaattaaaaaaaaaaaaaattactgctacgtgatttgttgaaaaaattaacacgtggggtgttttatttttgattacatgaacttgtgaaccttgtttctgcttacaaaaactgaagagcccatttcaaacaaggcccatattctgattgagcggccctattttaccaaaccacctactaatgaacactctcaagtcacctcattcgagttggaagttccctttaaaacaattattttcagacacagagagactcagacaggagatatgaactgcggaggaaaggtggtctgcgttaccggagcttccggctacatagcgtcttggattgtcaagcttttgctcctccgtggctacaccgtcaatgccactgttcgagatccaagtttgttcccaactctctctctcttctttattttaaaaaacaaacgactgcaattattagggacgattatgagtagcacaaatagaatcaaaatcggaatctggctgaaaaatctgacggaatcaaaccaattatgtctttacttaaattacatacataacatccaaatcgttcttttttttttttttgagacaaccaaattgaaatttgggactttgattagctgttgtgttttgaatgatgacttattaattagacaatatttttccgacctttataattaaattaccaaatacggaaagttcagagaactcattcaggttcgtaccaagttttgacttttgagggtacaagtaaaatcattcttttgaactttgaactttgaagtgcatgttgacgttatactcttcttcagaggacaagaagaaaacagaacatcttcttgcactagacggtgcaaaagaaagactcaaattgttcaaagcagatcttttggaagaatcttcttttgatcaagctatcgatggttgtgatgctgtcttccacactgcttctccagttctattcactgtcacagatcctcaggtttgtcagggaattattttaactattaatttgcaaagtcatatgagttaaaatcaaaatttgtgtttcttttcctattagactgagctgattgatccagccttaaagggtactattaacgtccttaatacatgcaaacaagtttcttctgtcaagagggtcattctgacatcttccacggctgcggttctctctcgtcagcctcctattgggccaaacgacctggtggacgagactttcttctccgatccaagtctatgcagggagacaaaggtcctttgattttgttgtggacttatcagtttcaagagttcggattctttcttacacttttcttattttcttcttcagaattggtattcactctccaagattttggccgagaatgcagcgtggcaatttgccaaagacaatggaatcgacatggttgtgttgaatcctggatttatttgcggaccactcttgcaaccaactcttaacatgtcggtagagctaattgtggatttcataaatggtaagaaccctttcaataaaagatactacaggttctcggacgtaagagatgtcgccttggttcatatcaaagcgttggagactccttcagccaatggcagatacatcatcgatggtccaaatatgagtgtaaacgacattatagacattcttcggaagctgttcccagatttgtctattgctgatacgtgagatctctttccctagctctacctttgcttatcatcttatgaagtttataaatttaatgaaagattttgaaaaacttacttgttgatgattttgttaggaatgaagaaagtgagatgaatgagatgatatgccaagtgtgtgtggagaaagtgaaaaatttgggagtagagttcactcctatgaaatcaagccttagagacactattgttagcctcaaggagaaatgtcttttatgattctgttcgtatatttgtaactattatgtgtatttttattttgttagtattactaattcaagtggtttaagttgttgagactctttaaaatctaagcattttataaacaataatatataattattgtttaggctaaatttgtcactaattaaggtttggatacatagtgtctaaactaagctaataatatcacttaacgtttacttgtaacgctaggtgatgatgtcgtcaagtcaattggtacaaggaataaacgagtggtcatatgacattatgaccatatgaattcaaactccagtaatccaatggtaattggattcaatgatcaagacttgaaccacgtaatccacccttatccttagaagctcataaatatcactaaagggacaggcaacacttaaccagtagttgtccaataatttagttttccaaaatgaaaaattattgttgtcatctattttaggtgttttagttcaatgtggattcctcgtcctaacaaatacttgacgaatatatctagactataaaattggttatgagttctacttttttttgtttgtgaaattatcaaaatttgttatatttatttatttattctcattaatttgagtactaatttttaaattatttatactaaaaacaattactaagatacaaaaatggataagagcatggtgtatagatatttaatgggatagaatatttcccataattgtatgtgtgtgagaggttttgttttcgtaaggaaagaaacaaaaaccatttgaccaaagaaaagcaaaagaaggcaaggaatcaaacaacaaatgttgcaaggcagaaataatggacgttatgttaatgtagtgtcgtcacacgtgacttaaaagagacgagtctgcgtgtcaaactaaaaatgtatgcaactataaaaatgggatttgattatctttttagtaccgaagcctaccaaccacatgcacactaattctactcgccaaataaagtgaaaagagatg

SEQ ID NO: 20596 - DNA, 3003 bp, Unknown; identical to SEQ ID NO: 20595
  misc_feature (1)..( 3003): 2750-1469P.txt file - cDNA_ID_1827352; gDNA_ID_1620761; Annot_ID_167152

SEQ ID NO: 20597 - DNA, 3003 bp, Unknown
  misc_feature (1)..( 3003): 2750-1469P.txt file - cDNA_ID_1827363; gDNA_ID_1620761; Annot_ID_49999
tccaggaacatgccggaattgcacatgaatctccactctttcaacattaaggcacaccaatcaattgttatgacagttggatatgtctatgagtaggaataattattcttacctgtgtttaatgaggccagtgccaactcttacaaggaaaggtacaccatcccaacgtgcattatcaatatacaaggctgctgcacaatatgtagggtctacaccgttcaagatcacaccgttcttgtctcgggaactggatttatactggccaaggatgacatcacgcgggtctatcttgcgaattgatcttaaaaccttcacctgcagaagcaggtttgtcaccaagtcacttgacagaacaagagtacacaacttacatatataccataagacgattttgttctttacagtacaggttgaccttttcatttcggatatcttcaccatcgagacttatcggaggttccatggcaagtaatgcgattgtctgaagtatatggctgtgcactatgtcccgtattattccatatccatcagaaaaccttaaaaaaagcagtaggaaattagaaaataacattactgatttgtctaagaatgctgaaacaacacaatttactctcacatgcaaagaaatggtgaaaatagaactattgtgccttacttttctgtttgcgcaattgattctgatataataacctggaaacatcatttatacacaaagtgaacaaaccagaatgtggaagaggaaagttcaggcactatacacaactacaaacaatcagaaggaaacactacctgtatattgcgtatgtatgttctgttccatagtggttcaaaaactagatttgaaaaccttaacactgtcagattttcaatgaggtttcttcctaacatgtgatctatcctgtaacgggcacagaagtgtgaagaaatatgaacttgagagctgtgcatgcagaaagcaactagatttaaaagaaggacctgtagatttgcttctcttcaaacttagagagaagtgactttgttaactgatgagacgaatgtgagttaaaaccaaaaggtttctcaactattattcgagtccagcctcgtggtgcctgagcgttatctccaatggtgcatgccacatccaccagagcttcttgaggtactgagaggtaaaagattctatttgcttctgattctccctgaagaagaaaagctgttaatgtcttattctatcttgcttgtctgttcaaaatgttgtaaactcagaaagaggactacttctgggacaaaatgtaatcattgaaagaaagaaaaaaaggtacttaggaacctcaatctgtttcattctctcggcaagtcgggacatcccatccctgttattataacctccattgatatagtatgttctactctgaaatgcatccatcttgcccccacaattctccctgaacatttagcatcattctttagctagcacggccgtatatcagagataccaaatttaaggtagtaccaagaattatacatactgatgatcaacacggcaagtcagcgttgatgcaatgatggatctgaggtcttcatctgtcagattctttcttgaaaccccaaatatagcaacatcctgtgacaatgaagaccaatcaagaagacaaccgaaaaaaactatccaactgttttgctgcttactttgtaattgttcatgagcacaaaagtcatacctcaggaaggtagccgctataatacaacgcaaacaatgccgggaaaatcttccctcttgctagctcaccagtggctcctacaacagcaatgcaaagtgaggcccttcttcgaacatctgaaagatcatccgagagttgttttgacacaggtggtaagtctccaacattgtgaaacccatcattcaaatccgttcccagaatattctcttctggtcgtaaatcttcagctctagtttcttcagcaaaacctgcatcacattctacctcaggaagtgctaaagaatgatcaagtgaagacatgagatgtaaattgactcatatcttagaactagacctcgttcatcatcgctgaggaaagtgtgctttgagtgtgttgtaagctcgtttacaggctgatgttttctgttgttgccttgtctacgattcaagctcttaagtatccacagtttcaaaccacagaatctccggcagagattcgagcctcctccgttgagaacaaggcttccacttctggagaaactatagtctcttgacgaaacctattcacacaaaatagagaaatttcaacaactagaaatcaagttgatttcgaaggtcaataatatactaaagcttagattcagagggcatgtaacacgaatttgagatctttggtgagattgcagaaaacattagcataatccaagaaaaataataatctttgtttctcaaagtaatgaccttttgataaaacgaaagcatgcatgaaaggtagagcgaatacatgtgcttaccggaaaattagaaaaagaggcggcgagatggcaagagcagacggaggaagacggagccgtcgctgattgagaaaagggaagcaagcaactggagagagacatgaggatagttcctcagggattatagctaaacatgttcaaagctttaaagctgctttaagtggatcaaagtggaagacgagtgcaagtttaagttttctgattgacgcctccattaatggttccaactttcagataatcgtcgggttcttctaaaccgaaccgtaccggttggttctcgaggaaagagaattgaatttgtggtttaggcgggggtgggtaggttgactttcgatatctcaacgtcaacgtctcttctggtcccgccgagtcggcgtcatcgttgagttggtgagatcatcttcttctcaacttcatcgatcttatcgtctcgaaaattgtcaccttttcttctcagctacttcaggcggagaaacactttccgtggtttagtgttgaggacgatcactgtttgtaattcgatg

SEQ ID NO: 20598 - DNA, 3003 bp, Unknown; identical to SEQ ID NO: 20597
  misc_feature (1)..( 3003): 2750-1469P.txt file - cDNA_ID_1827363; gDNA_ID_1620761; Annot_ID_167141

SEQ ID NO: 20599 - DNA, 3000 bp, Unknown; identical to SEQ ID NO: 5077
  misc_feature (1)..( 3000): 2750-1469P.txt file - cDNA_ID_1827367; gDNA_ID_1620761; Annot_ID_49998

SEQ ID NO: 20600 - DNA, 3003 bp, Unknown
  misc_feature (1)..( 3003): 2750-1469P.txt file - cDNA_ID_1827379; gDNA_ID_1620761; Annot_ID_49995
ttcaactaattaatcagcgtcactttaccacttttttgtcttttttttctttaccacatttttcttcacattctgaattaatattattcatcaagaaacttatagcttaccatataccattatatgcgtattctatcgtaatctccggaaaataagacgatgtcgtgctaaactttttttcttaattattagtttagtgtttttaatttttagtcttctaaatggaggttcatttgttgccaaaattgtaaaataataagaagtaaattaatgaatttaaatctattcaacgtatagtactgatgaattaagttattaacatatatcaaaaaaaatcttgaccacaaaaaaaaaagactttaagcatgcagtacttctatgtcaataaattaaaaagcttgatttttgaaacttttggaaagtaataaatttaggtgacgcaagaaagttcaaagacgtaaaaacgttctacatgagactcacaaagccatttagtaaatggtttttcgtcgttaatattttaatatacgcactcaccattttgacgtttatgttgatgaatatgatttcatcattttctactttcgcagttaagacaaacttgaaaacacaaaaaaacaatgctaaaagaaaaatttagctaatcaaagtttagcatttcttgctgatctttgtaaaacatagactcaccacctaaaacctaattacttttaaccccaaaaaagtaataaaaacacccatatgctttattcaagaattaaaacaaattcaacatttcatcgatgcaattgttttaatcgtgtaattcatacatgtctaaaatcgttagttgatcaaataagatgtatatgggcagatattagtatggttttttttttaccgttcgagaaaaaatgcgaccggaaaagtggcgatagtggcaaatatctgacgataagcgaccaggatgagtggcttcataccggcctccatagccatcttcgacgtaatgttcatgcctgcgtagccgatttgcaccaacaccatcgccaagaacggcaacatatctgatttagccatctctcactctcttttattttattcttccaatttatgtgtttatgtgtatctccaaaatatgcctctctcactattactaatcaataataataggtcaagaaaccaagaaaaaaaaataagggagagaggtggattctctatatcatttattagtttccccaaatctatattttattttggttcgaccttatatttatagccaaagatgtatatatacacacatttatatatacatgcacatacatatatttatttatatacatacatatatatagagagagatgttttaaacagaaaggtgagaaacggttcgagaatgaagtttgcttgtaacacttggactctctttagggcataagaacacgaaacaataggtgatatgaatcatttgatatttttggcaatttatttaaattttctccttgctgattactaatacaatccaaattggcgttttgtcaaaaaaaaatctaacttattttcctcgttttaatccatttttttggtttccgttttttcatgggtttggtggagcttgtgaatgtctttctcaagcttcaagcaatcaatttgcctttgctaaaactcgtttctgtgatattaaaccaagggcttggtttatcgcttgattaacaatatcgaattagtattatcttacgtattttgaattgattttcattatatcactcttgctttttgtcaaacttttgtgtgtgtaatatatatcataaatggtaaattaactatttatatcccaaaagggttggaagttgggcatggattatcgaatatatattgaatggcatgcatcttatgcaatataaatataactaggtaagtatccgcaaaatgtatgcatctaattatttctaaaatttaatatataattaaattcatgattatattattacatgtttcagttcgactgcatactgtatatatactatatatttttaatgtatgaactaggtaatcatttacacaatgggttggacatacgtaatttaagaatatctttgaaaataactggaatttatatcattaaaaagtaggatataactagagtggctagtataattttcagaaaactaattaatttttaattaaaaactatactgaaacataatgatttatatataaaactttagtaaactaaagtaaaatgcataatgaaaacttgtataatataagaaaatctcatatacaaaacaacatatattgttgggccaattattggtcttaaaaggcctcatttattcttaaaaggcctttccttaggtgtacagtgacttccttgagcaagaatgtcatttcatatggatagagataaaacattggtctgtagtcagcacataggtataccaaacacgttaaacttttttgttggctgaaatttgagaaagtaagtgatgcttaacattttgctggatatcagtggttaatttttatacgaaatgcttttggagttgaagatgaataaattatgagtaatgctccatttgcataagtcaaacaagctagcgttggcgtccagatgattaatttccgcgtcctctttggcttccaagttccaacgtaaattttcgccgcatattttttcgatcttatcttttcgttgttacgtacaaaaggaaaattccattgtacattcgttttggatatatactttaggatgcatatgcatatttatgtatgaacaattagcatctacattggagctggagccaacagtaagcttgagttatgtgtctgtcactgtcaaccaccaacatacaaagtcttaggctttgtttttaaattcactaaagaatcacactcacacactatagcttaaaataagagaaataaggcccacacacttaaggcttaccattattacaatttattacaaagctttcgatcttcactctatcttgatcaaatctctactagcaagttacaatg

SEQ ID NO: 20601 - DNA, 3003 bp, Unknown; identical to SEQ ID NO: 20600
  misc_feature (1)..( 3003): 2750-1469P.txt file - cDNA_ID_1827379; gDNA_ID_1620761; Annot_ID_167137

SEQ ID NO: 20602 - DNA, 3000 bp, Unknown; identical to SEQ ID NO: 5075
  misc_feature (1)..( 3000): 2750-1469P.txt file - cDNA_ID_1827383; gDNA_ID_1620761; Annot_ID_49994

SEQ ID NO: 20603 - DNA, 450 bp, Unknown
  misc_feature (1)..( 450): 2750-1469P.txt file - cDNA_ID_1827398; gDNA_ID_1620762; Annot_ID_50051
ttctattggaaaatgagtgtttttgtttgatttttttgcaatgtactgatctgtgctatccatttcctttgttttccaggctggtctctcgcaagaatctccatctgtagatggtttgcaagaatatgcaagcacagtgattgagaaaagtattgagagcttatatgcatgcggaggttgattactacattatgtgttcctattatttgaaggttcatgcagttatcatatagctaggatacctcctattcatatcagaattttgagttaatatagctaggacacctcttattaatattagaattttaaattgaaatagatatgatacctgtttgttctatgtgcttttaagattcacattacttcagaattttgttttgcttttaataccaaaatgctacgagttgacccaatgaaatacacttaatcattttcttatttgatcatatg

SEQ ID NO: 20604 - DNA, 3003 bp, Unknown
  misc_feature (1)..( 3003): 2750-1469P.txt file - cDNA_ID_1827402; gDNA_ID_1620762; Annot_ID_50050
ctcccattgggaacatgacgaaatctaaccaaacagtcaacaatcagaaaagtttctctgttacactctttcgagtccggattctcgtcttccgtcaccataaacaaaccaccgcactaactcgtcgacgacgcgttctcaaatctgacgatacgaactcgcccgaagactcaaacgtgactatattttaccttaatgcgctcgttttttctcagcgatccgaccgacacaattttttgggcaacgcgctttcgactagccggaaaaccaaatcgtcctagtcccccagtgtgatctagttacgccaccacaggcctgatagtattaaaacaaaagggcgaaataaaacgacgacgtttacgaggagcgactcctcgggatccggtagccaatagtaaactcagatcacatagatcttcccgagccctagcgatttcgatttctaaagcagattctaaagacaaaaatcaggaaactcgaggaagaggaacctagtttcgaaacaaaaacaaaaaccagagaagaagatgatcaacgagaatgatgaaatcggaaggaaaccttaccgtctctccgacgaagaactaacggaacggagcttgagattgagcgacgaagaagcagcgatcgagagaaagagagaagtgcaaaaactaatcttagtgaaggccaagtatggaaatgtattaatgtgttcaaacacattaaaattgaatttttttttaagaaaaagtatggtactgagattcagagatggtgaatatctgttgtacctaacagcaatttagtaaactataatttctgacgactatttttcgatacttttgtaacaattatcgtaaaaaacaaaaaattaagtgagattacattcgacgttagatgccagaaataatatatatatgtgattgtgaatatgtacctttttttcttttttcaatgagtgtaatatgaatgctttgagaggattacacgcgtgattctgattcggatcaccaacttcttttgcttcccttttaatttctttcctatcttttgcttttcccattcatctctctcgctttccacaaaggcgagatttgaatacgtaatcctaattatactctcatagagatttggtaatttggcccaaaatatctttctactttgtaatatgtcgatgcatagaaaacataatcttattctaacattcacaaatctcctatatttccatattgaatctctcagtctggatcggtttgtaatctctgtccagctacctcttacgtttcaggtgtttctatgatttatccattggcttcattggctgcctataacttatatatcatgttgcaatctttgtgtgtgttgtgttggggagagcttatagccggccgctcctccattagcttccaaatggttgaatcagtctgtatcagatttaaactcagtgatagcacccacgttatgcatgatttttaagatttgataagcagactgtttttaacttcaattcaagagcatcatccactttcggcttaatatcctatattaatttctttaacaagctaaaatgaacataatgaaaataactacactcactgattggcaattactaatatctcaaaacattaagaagtattttttttttttttgggtgaaaagtcactgtctttttcttaaagccaaaatttatacggaacgacaaaacaaaaaatatgactaaaaacttcttaagcgcaatcactgaccatgcagcctattttagtttttaagtcttttatatacattggctgttatagtcgtaaaacaatcaggtatttgttatggagataacaatttgggaacgcataaatagtgcctctgatggttggaagtggaacaaaatcacaatatttttttctagtgtataaacaacatacaaatatcatgtcacctgcaaagagaataatatgccaaaattttgatataatacgcataacagagtttatatatcaacgttctagacttataggtgatcatccattatctttaacctcttgtagctagctaggttaattaggagatgcatgcatctagataggcatatatagtctaacattacaaatccatcaaaggttcccttcttcttctccaaagaaattagctacatacaaatttgacagactctcataaatatatatatatatgtttatagattatattattaaaaatacaaatgatattttctgtattttgttaaaattagttcttaagattttatgaaatttataattgagccaacgtcttagaaataattatacgacatacgtaatttaaattcaatgacgatgacttaaacttaatgttttacagtatttatccaatcaaattttaccacatcagcagagaagagtcaaacttaggaaaagtctatcttggattatcctgacgtggcttttttcaagtaagaaataaattaatgctaatcacgtacgtacctacccagcttttggacctcgtgggctatatagaaaacaagtaaccaaagagagacgaagcaaaaacattcagagagaaaattcagcatttttgatagctcaagcacttgattctttccaaaggggtttcctgaggtatgtttgctttcctttttggttttaatttgtttcaaatcttagatcgattcttcactttggattcttaaatcgattcttgtcctcgtctgtgctgatttcgaacttttccgattccaactccgccgaatctacgtatagatctttgaggaaatgtttttttcgatttatgatcggcggatctaccgattcctttgcttgttttctttggatgtatcacactcttctgaagatgccttgacctttttatgtgaactagtaagagttattatggcttagatcgttgaatatctggtatatgtgttcttataatgggattaggatctatgttttggtgcgtattaaagcttagttgagattgatgtttttgggttttcaaattctgtttcttgtctgttgagctaatttaatg

SEQ ID NO: 20605 - DNA, 3000 bp, Unknown
  misc_feature (1)..( 3000): 2750-1469P.txt file - cDNA_ID_1827406; gDNA_ID_1620762; Annot_ID_50049
gatacatccaaagaaaacaagcaaaggaatcggtagatccgccgatcataaatcgaaaaaaacatttcctcaaagatctatacgtagattcggcggagttggaatcggaaaagttcgaaatcagcacagacgaggacaagaatcgatttaagaatccaaagtgaagaatcgatctaagatttgaaacaaattaaaaccaaaaaggaaagcaaacatacctcaggaaacccctttggaaagaatcaagtgcttgagctatcaaaaatgctgaattttctctctgaatgtttttgcttcgtctctctttggttacttgttttctatatagcccacgaggtccaaaagctgggtaggtacgtacgtgattagcattaatttatttcttacttgaaaaaagccacgtcaggataatccaagatagacttttcctaagtttgactcttctctgctgatgtggtaaaatttgattggataaatactgtaaaacattaagtttaagtcatcgtcattgaatttaaattacgtatgtcgtataattatttctaagacgttggctcaattataaatttcataaaatcttaagaactaattttaacaaaatacagaaaatatcatttgtatttttaataatataatctataaacatatatatatatatttatgagagtctgtcaaatttgtatgtagctaatttctttggagaagaagaagggaacctttgatggatttgtaatgttagactatatatgcctatctagatgcatgcatctcctaattaacctagctagctacaagaggttaaagataatggatgatcacctataagtctagaacgttgatatataaactctgttatgcgtattatatcaaaattttggcatattattctctttgcaggtgacatgatatttgtatgttgtttatacactagaaaaaaatattgtgattttgttccacttccaaccatcagaggcactatttatgcgttcccaaattgttatctccataacaaatacctgattgttttacgactataacagccaatgtatataaaagacttaaaaactaaaataggctgcatggtcagtgattgcgcttaagaagtttttagtcatattttttgttttgtcgttccgtataaattttggctttaagaaaaagacagtgacttttcacccaaaaaaaaaaaaaatacttcttaatgttttgagatattagtaattgccaatcagtgagtgtagttattttcattatgttcattttagcttgttaaagaaattaatataggatattaagccgaaagtggatgatgctcttgaattgaagttaaaaacagtctgcttatcaaatcttaaaaatcatgcataacgtgggtgctatcactgagtttaaatctgatacagactgattcaaccatttggaagctaatggaggagcggccggctataagctctccccaacacaacacacacaaagattgcaacatgatatataagttataggcagccaatgaagccaatggataaatcatagaaacacctgaaacgtaagaggtagctggacagagattacaaaccgatccagactgagagattcaatatggaaatataggagatttgtgaatgttagaataagattatgttttctatgcatcgacatattacaaagtagaaagatattttgggccaaattaccaaatctctatgagagtataattaggattacgtattcaaatctcgcctttgtggaaagcgagagagatgaatgggaaaagcaaaagataggaaagaaattaaaagggaagcaaaagaagttggtgatccgaatcagaatcacgcgtgtaatcctctcaaagcattcatattacactcattgaaaaaagaaaaaaaggtacatattcacaatcacatatatatattatttctggcatctaacgtcgaatgtaatctcacttaattttttgttttttacgataattgttacaaaagtatcgaaaaatagtcgtcagaaattatagtttactaaattgctgttaggtacaacagatattcaccatctctgaatctcagtaccatactttttcttaaaaaaaaattcaattttaatgtgtttgaacacattaatacatttccatacttggccttcactaagattagtttttgcacttctctctttctctcgatcgctgcttcttcgtcgctcaatctcaagctccgttccgttagttcttcgtcggagagacggtaaggtttccttccgatttcatcattctcgttgatcatcttcttctctggtttttgtttttgtttcgaaactaggttcctcttcctcgagtttcctgatttttgtctttagaatctgctttagaaatcgaaatcgctagggctcgggaagatctatgtgatctgagtttactattggctaccggatcccgaggagtcgctcctcgtaaacgtcgtcgttttatttcgcccttttgttttaatactatcaggcctgtggtggcgtaactagatcacactgggggactaggacgatttggttttccggctagtcgaaagcgcgttgcccaaaaaattgtgtcggtcggatcgctgagaaaaaacgagcgcattaaggtaaaatatagtcacgtttgagtcttcgggcgagttcgtatcgtcagatttgagaacgcgtcgtcgacgagttagtgcggtggtttgtttatggtgacggaagacgagaatccggactcgaaagagtgtaacagagaaacttttctgattgttgactgtttggttagatttcgtcatgttcccaatgggagagcgggtttatgattgtcccaaatagagtatagatctgagtttgtttttcgctctagtgtcgacagtttcatacttgaatggttctgggctgatctttctcttattatttttttgttgaaataggggtggagagaatcctgctgcaagtggtagctgtttgatacttgagtcattttgtcacagcaacatg

SEQ ID NO: 20606 - DNA, 3000 bp, Unknown
  misc_feature (1)..( 3000): 2750-1469P.txt file - cDNA_ID_1827410; gDNA_ID_1620762; Annot_ID_50048
ttgtttgagcattcaaaattttaaactggttgatgatgaatgggttcttgaaattcaaattcagtcaatgctttgggttattgagttgtatatgttatttatgcagtcattatgcaagcttttaaagaaccacctccagatatggtttgcaaagacaaattcttaatccagagtactgctgtatctgcggaaacaactgatgaagacatcacagctagcatggtaagcattccaacacttgttgaccttctttatcattaatttcagttatttggtctgtcaagtatatatgtacactcatttattcttggcagttttcgaaagccgaaggcaaacacatagaggagaacaaactcagggtcacgctcgtaccgccctctgactcacctgaactatctccaatcaatacaccgaagcagggagcagtatttgaagattccatcctcaaggatcgtttatatagccagtcagagaccctagctccgccacaatatgtaagaagagtatttaccccttttcgcaacaacttttatgatttgttagtaagatgaagagtaatttgccaagcagtgagtgtagttatgttccagcaagttcattttagcttagcttataatcacagttattgggtgcaatagggattttcttgtagttatttgtttattctcaaaatttatttttctaggagggtgagattgtaaaagagcctaggatggttggacatgatgagttaaaggcagccgacaatgcaaaggagttaaagacaccaaaaatggccacagtggattttgtggaagatcgatatactgctaatgacttgaaggcaactaaagatagctacgattcatcgaggatggcaaaagaaactggattcgatccaattaggtctcataaggatgcggatgatggaagggcgattaaggcaacaactaatttggacgctcccatgaagaaggccatggatctacctagggatcaagggtttactaatggaatagctgttgacagtgaaccaaagatatctaaggagagagatgttgtccagctgcagaaaacagatggccagaatgtcagaggattggatgaacttaagttggttaaagacattgaggagatgaagctgaaagtggatgctcttgaatccaagttaaaacaggtctgcttatcaaattttaaaatccataacttccgtgctatatgtaactgtgctaaagagtttaaatctggtgcaggctgattcaaccatttcgaagctaatggaggagcgatctataagctcccaacatagacaaagcttgcaacatgagctggtgagaatgctagtgagaaaacatagctgtttctttctcctacaatcaaaacagtttcataataacgaagcttgtattttgatgatgatgcaggcggaactgagaacgaagaagatagtgaaagaagtgcacaatgggttccctctgctgtatgtatgcgttgtggcattcattgcctatgttatcgggcactttctgcgcacttgactgctcgctcggtgtctatatcatatcaagtgtgcagtaagggatatatagacaaagaaggtaaaaggattagatttcgtctgtttgggtttgctttgtgggagaggatgaatgatttctccgacacatttaagatggaatatgatagactgtatagcattggtgttagttaacacaaggacacaaggacatatggtatgatgatatgctttgtttctctgcttctcttactaatttgaagctgttggattgatttgtctcttcttacgttcccttcttttttttttcgttttcttttgtcgtatagaccaggcaggggctagggcctagtgatgggtattggcccaatactattgggttatttgcctggtttattatttcgattttaggttaattcaattttaagaatacgtagatttgtttggtttagtttggtttggttgcactaagttcggttttacataaatagaatctaacactactaattgttatacgtaaaatacaacaacaataacagatttttcgtttcaattttcgtttaagagggtagacattttggtttggtttggttcattttttttttccctttcaaattcacatccttcacgtagatgacaaaataaagaaaaacatgaatgaaagttgtaacttgtaagcatcaacatggaaatcatatcacaaagaacacaaatctaactaatgggtcttttcacatattggtataattataagttgtaagaatattagttaaacagaggcaacgagagatgcgtgatatatgaaaagttgaaaacaaaagacatggatctaaagagtcaagcaaaatgtaatatctttttttcttctaaacttgaggatgtccaagttgcagtgaatgattccctttaatcatggagaaattcaatgaaataattgtgtttcttcccacactttatctttatttattttcttaccacaattacaactattatcacaaaaatgtaagtaacatagcttgtgactcttcttccatttatgagttgattatcactatatttataagtaattaccaacgaatgttccaaattaagcaaaatattgtaatcgatacactatgtattcatctacaatatgttaacgagctccttttatggaaatatttcgattgaaaaaacatttgatggatcgttcactaaataaataatccagtaacgttttcttaagggagatatacatattcgtgtggagatcaacatatcttcgttaattgactacgcaaaatagttaatggaaaaggcagagtgactcgtgagcttggcagatccaaaagaggttgtcaagaaaaagcagatttaaaagttcttccctcttctttaagtcacccattaatttcacatatatgtacatacatgttgcatttaactcatatacatacatattctcacatctataaagagagcataagactcagagagatctagaggaagagagagagagaaagatg

SEQ ID NO: 20607 - DNA, 3000 bp, Unknown; identical to SEQ ID NO: 20606
  misc_feature (1)..( 3000): 2750-1469P.txt file - cDNA_ID_1827410; gDNA_ID_1620762; Annot_ID_167206

SEQ ID NO: 20608 - DNA, 3000 bp, Unknown
  misc_feature (1)..( 3000): 2750-1469P.txt file - cDNA_ID_1827413; gDNA_ID_1620762; Annot_ID_50047
gtagactgagatggacaaattatctgagacctggaattaaacgtggaaactttactcctcatgaagaaggaatgatcattcacttgcaagccttattgggtaacaagtaatctcagacaaaaggatctacatctctttatacttgaatgttttgtgtatatattttgatgatgtgaaccctaaactggcttatttgtttacatatggttgtggtaagatgggcgtccatagcttcatacctaccacaaagaacggacaatgatatcaagaactactggaacacacatttaaagaagaagctcaacaagtctgacagtgatgagaggagcagatcagagaacattgcgctgcaaacttcttcgacaagaaacaccattaatcatagatctacctatgcttcaagcaccgaaaacatttcccgccttcttgagggttggatgagagcgtctccaaagagtagtacaagtactactttcttggaacacaaaatgcagaaccggacaaacaatttcatcgatcatcacagcgatcagtttccatacgagcagcttcaaggttcttgggaagagggtcatagcaaaggaatcaacggggatgatgaccagggtataaagaattcagagaataacaacggtgatgatgttcatcatgaagatggtgatcatgaggatgatgatgatcataatgctacaccaccattgacatttattgagaaatggcttttggaggaaacaagtactactgggggtcaaatggaagagatgagccacttgatggagctctctaatatgctttaattgtgacattttctcctttattttttctttatccttgtgaatcttataaatgagactactaattttatatacacaaataaagaaaccagaaagacataatatcatgtgttgttttttggtttctctaagatataagtagctaaaatgctcactgcataagttgtaactaatctaaagttgtctacccatttacatgaataaaatccaatttaagacttgtaatactattcaaatttcttttacaaatacatgatatctatacttcatctttagaatctaccaagtcgaatctacaaattcaggaaaatatcaattcaaagctaatatgcattaaaccctcatgcttaagaatggtgtaggtctaagagagtttttgctcgcaaatcacatcaattcgagaaacgttaatgggatgcgttaatatatttgggaactcgtgttgccttttagtccataaaaacaagatgaatgagagaagtattaaaagctttattcatacacaaaaatgtgtgatctttatattttaagaaatgagaaacaataatgaatggagaaatgtaggacctccataactaattaaggattgataagtgtaaatgaaagagatgaagccaaacgtaacgatcacttgaaaatggcgttaatataataaatatacacattatccttgttccgtttatcattcttcatgcaaagttattaaatacatccatggcccttaattatgacgtttgagctcttggtaatgtaagcagtggacaaccaaataaagctattgtttacggttcctaatctaaataataattaacaatcaaatgcaagtcaaatatgagcaacaagagaagatggaagcacacaacacagccaaaacttttggtgggttctactatttttttccgtccaaaaaggcaaaaacagatacaaaaattgaatacaaatcaaaaacagttaattaaaaactcaaatctgattatattcattcaactactctaataaaaaaaatataatttttgtattttattttatttttctttttgaaataaaaaaaatagttcccacactcaaattgcaactttcggcagccgtttttgtaatcagtagccgactttcctgtctctctccacatctcaccatcttagttttcaatcttttgcctaacattttataattattcggaaaggaaaataaaactaagtgatttaattgtgaagactaataattataaaatgttatttaaggactagtagtaccaatattaagacttttttttaagtctgttatgttaatctttttgttttccctggtttggtcaataaaatagatctctctcattcaatgtctctcacaaagaattttattaattttaaaattaagtgattttagttgtgaagactacgtgcagtccttgctgggtctgccttttgagttttttaaaaatatataaatgggatcaatgttctctgtgaagctctccctcaaaaatcacaactttgctagattttggattttcactttctactctgtaattgagacttactctggcgatcatcatgatcaaaaggttagatttttctataacagcgcttatatttagttggatcatataaaatattgtgggtcttgatcgtatgattgatccatttagtatttcttctacacacaattctaattctgattttgttgagctgtcaattgttctttttagatctcttttcctttttgtggcaaacttttgatttagagtggtttaaaatctttgttggaatttatttttgcttcaattgctgacttgagataaatatttgatcttcctgtactctggagataaacactattaagaaggctaaataaaaacgtaagctttatcttgttttggtcaacttttctgttcttgcttctgtttgtcccaaatctgcaaatatcatttgtaaatcggattggattctggatattagttgtcttttctgcacgaatcaagtttgtttcattatctcaaatctctttatcaactttagtctcattatattttctgagtagaatcttgatgttattgattcaatatttttctcatatttttgtactctttactaattgtttgatgtgtatctacattgatgcagatttgaagcctgattgattcttgatcttatgtttctgcaaagagttggctactagacaaacgtctgcagtaaaattacagatg

SEQ ID NO: 20609 - DNA, 3000 bp, Unknown; identical to SEQ ID NO: 20608
  misc_feature (1)..( 3000): 2750-1469P.txt file - cDNA_ID_1827413; gDNA_ID_1620762; Annot_ID_167204

SEQ ID NO: 20610 - DNA, 3003 bp, Unknown
  misc_feature (1)..( 3003): 2750-1469P.txt file - cDNA_ID_1827421; gDNA_ID_1620762; Annot_ID_50043
ctcctcagtgatgagggtagccatatactactgtacatgactgggcatggaggtgatgaatttttgaagtttcaagatgcagaagaactccagagtcacgatttagcagatgctgtaaaacaaatgaaagagaagcgtaggtttgtttcacatttatggtgtttctcgagtcatattgactccatttcctccattagttcagtgctttttatctgtcttttgaaatctggcttgtcctgcatatagcttttccacagggcatttcttggtggaacgaaaattattcattcaatgtctcatcttaattcaattttgactatctaatgacattatttcgcttgcctagattcaaggagctgatgataatggttgatacttgccaagctgccactctctttaatcaggtacatcttcgcacactttttcagggttgttttgtctttatatttaagtaagccataattttagttttgctctgccttttggagctagtatgttaatttgacgttgttagttttgtgaaataatttttttggtagcttcaatctcctggtgttttggctattggtagcagtctaaaaggagagaactcatattcccatcacctggattcagatgtaagttcccttcaccatttcatgaatggaaagtaccattacgatattaaggggaaaattattcaatgaagttgtcattgtttggggattgtttcttctttttatcattgtattgatctccaaatctaatgttgtttttgcttcagattggtgtatctgttgtagatcggtttacatattacactcttgcattctttgagaggctcaatatatatgacaatgcatcacttaacaggtacaataactatgcaactctcgtcaccaacattctgcaaaccttttatatgatattcgttttcactttgattatatatgacggcattgtgattgtcaaattgactaaggagacgattaaatagttggctgtttgaactaatacgcctttttagcctgaactatctgagctagaaacatttgttcacctccccttgctgctgtgcagtttatttaggtcctacgatccgagactgctaatgtctactgcctactaccggactgatctttaccaaccacatctggtggaggtatggactaaattgatgcaatgtgacgtttaattgattgtcagcttaaattactattctgttgcaaccaatcaagactaagtaacctaggttctagttgcttgttatgtgcactgaacagtctaggattatccataagttcactgtaacatgatcagggaaatgatattgatttaaataaaaaacttgcaccttccgcatatttttccttgatgattaattactcattctccaagtttactcgttctgggaactaggtaccggtcacaaatttcttcggttcagttatggagaccattcatactgattcagcttacaaagctttctcaagtaaaatctccgaaagaaagatcaattctgagatgccattcaatcaactttccgaacacgatcttaaagaagagcttgagaatacaaacataccaaacgatgagttgatagctgaggttactgtctatactctcttccctggtttatcatactttggattgagtacattacttagatatatgaatttaagcagggttagggttttgagcatgatagatgatgtatttgctttctggcttgtgttcgtactcttactggattcgactaacagaattgagattccatgttatgttgttgttgcagaagcaaaaatgcccatattcacaaatgcgggcagacctccacgagaaagtggagaagcttgaaaatgtcgatacagtggttaacctcagcatagcagtgatggtactcgctgtaatggtctcatcatctttactacgatgaagaactgatataatcatctgcacttcacttaatctatgtagtctgattcactgttgcagcttcacacccattttgtaattttttgcacaatgctataaaaaaaaatcaccaaaatcaagaaaatatcaactctcatgctcgaacctcagaaattgtagccagttatgctgcagtccacagattaattggctacttttcaagcctagatctaaggttcatgttcattcggcaatagttaaatctgcataaaacaagggaaacacaagatttaaggttcagaaattatgctcaccgtagctctcagatcgggtttggtgagctgcttggtatggcctagtaataatgtaatatcataaatgttaacaaataaaacaatattctttacttaatctgattaggatactgcaactttatccttgggtacttgaaaaagcaatagtttgttactatgctaattattgttaattttgtttcttactcaaaataactatcttctactattaatgtttttaattttaaaaattgttcaactttatattattaaagtataataaataaaaccacaagaaaatttacaaaatgtaataaaaaaccaagtaaatggaaggatgcattggtgtagccacataagtaggggcggaaggcaacaaagaaggagccatctttatcgcaactcctgaaactgagtctgaccctctacttacttcttttattgctgctctctctcattcttaattccaatctaataagtacgggctctgctagtacagatagagagagagagagagtgtagaccaagacacacaacacaacacaacagagaaagagaattacattagttttttttctttcacattcctcttgcttattgctcttcaaaatctacctgtacactcttctcttttattgtcttgtttgtataaatcatctcctacaaaaataattaatataagttgtcccctttctctttgcttctctgtttttcgcaattttctctttttgattctcttccttccttggaatccaccacactccatttgcttcttctgagatctgatctctctcctaggtgatgcgctgcggagatg

SEQ ID NO: 20611 - DNA, 3003 bp, Unknown; identical to SEQ ID NO: 20610
  misc_feature (1)..( 3003): 2750-1469P.txt file - cDNA_ID_1827421; gDNA_ID_1620762; Annot_ID_167200

SEQ ID NO: 20612 - DNA, 3003 bp, Unknown
  misc_feature (1)..( 3003): 2750-1469P.txt file - cDNA_ID_1827437; gDNA_ID_1620762; Annot_ID_50038
atagctgtgcaataaactttaggtagcatatagcttttggagatcatatgtcctaatgcttatcttgttttggttagggtcctatggagaggtctatcatgctgactggcatggcacggttagtttttcagaaccttacatttgatttcattagagctattgtagcaacttgtatctgttattctcttccagaacttgccgctttagttgcgttcacattttttagggcttcaattgtgtcaaggagcatgtatctggcggttatctggaacttcaaacattattaacctgtcaaatttgttaatgagtgcaaagagataaaatgcagcgcttaaatgcatgttttgtcattaaatattcaaagcagtgtttgtgttcttaaagtgaaacagttttaaaaagcacttttatatacgcttgtttcagtcactagccacaaaaatgcattagtgccctccatggtattgtctcacattctctcatcaatattagctgttgtctttttagtttatttagtgatagattatttttggtgatttaaactagccttctgtgtctgcccgtgctgtttatcttcacagaagtggaaggtttcaagtttatatttctgcatttttgttatgattggatttaggaagttgctgtcaagaaatttttggaccaggacttctcaggtgctgctttagccgagttcagaagcgaagtaagccataagttcacttgcgtttatttactagtatacttagctacccatttatttttttggttgaacccaatggcttacgttgcagcttatttgcttgcctttgaattcccactctattaatatttccctatctgaaggtacggattatgcgaagattgcgtcatccaaatgttgtattcttccttggggctgttactcgtcctccaaatctttccatcgtcacagagtttctgcctaggtttgtcccatcttcttcttgtgaaagttaattgcatatgagatttttgagtcctaaaagattctaatgtttttttgctgttttattatagaggaagcttgtatcgaatccttcatcggcccaaatctcacattgacgagcggcgccggattaaaatggcccttgacgtggtagaaaaatagattcatatatcaacttccatgtcccccaggcttatttcttcagaatagtcactaaattccagactattgttactttcaggcaatggggatgaactgcttacacaccagtacaccgacaattgttcatcgtgatctcaaaacaccaaaccttttggttgataacaactggaatgttaaggtaggaagacttttttcttaagttgtccaacgaatatacttgtttactctaatggtaaataaatagattttgtttttatcttactaaccttgtaggtcggtgattttgggttgtctcgcttaaagcacaatacttttttatcctccaaatcaactgctggaacggtgagaacgcagaacccttaaatctctttactttttgatagaaatgcaactttcctactggcatgcttgttataatctggggtacggcttcttctctaatcacatgcattgttaattttaccagcctgaatggatggctccagaagttctacgcaatgagccctcaaatgaaaagtgagtagcttattagaagctcagttctgttcttggttctactagaaaatgttaaggcagatactactctttactttccctttccctttttttccaaggagattaaaaaaaatgttggctgtttttcgtcaggtgtgatgtgtacagtttcggggtaatactttgggaactagcaacattgagattaccatggagaggaatgaacccaatgcaagtagttggagcagttgggttccagaatcggcggcttgagatccccaaggaacttgatcctgtggtgggaaggatcatcctggaatgttggcaaacgtaagtgtcatgaaacaaactcaaaacacttttagaatctgcgctggttgaaaatatgtttggttttatgtttgggcagggatccgaatctgcggccgtcatttgctcagctgacggaagtgctgaagcctttgaaccggcttgtacttcctacaccacaatagatgtcatctgtgtgaatatgtgaaagaaaatttggttaatgtatactatttgacctctggtgctgcgcagagttattatacataagccagcctagaattgaggaatgtaaatgaaatcaatgtacactatactacgttttgatgtattatttgttataggaaaagccgctatgctgtgcttattttatcagaaataatgctaataagttaaacgtctgtcaccaatcatagttataatcaaatccaagctccatagagttacttgaatctccaaattaatcctttaacttaattattttgggacgaaattacatatactgcgaaaataataatagagtgtgttggagggagagagggtacgtgcgtgggtgtcgagaggagagtgagtgattaaggtccacgaattggcgcgaattccatgggaagaagaaacctaccgaagtccgaggatgattgtttcctctctcgcgcgaacaacaatgtcactctctctctttctctctgtttttctattctacaaattgctgtttcacctcttttctctctttctccttttccgatctcgatttttcccaatctcatgctttttctggtgactgcatcgttttacttttgttctgggtgacccttatgcctgaggatgtcttcaaattgtggattgattttgaatttttccgaaaaaaatctgtaaccgattgagtttcatccggtttgtctgaatctccggtggtcggtctgtttgtctcgaaaatctacagacttttgtatgtttcttgcgtacaaagtcacctcatcccactatatactgtggaaaaatgtcccaaggattggattcccttcacttgtatctcttgtaaagaaggaaagacagactaacattggataatg

SEQ ID NO: 20613 - DNA, 3003 bp, Unknown
  misc_feature (1)..( 3003): 2750-1469P.txt file - cDNA_ID_1827441; gDNA_ID_1620762; Annot_ID_50037
aagctaaagccaccaagataaaccatgtagtccactcaggtaacttagtgaaccaagctgcaacaactatccccataacaaccatataacactgtctaagcacaattggtatcccaccagcaaacacagacaaagtccccaagatcgtgaaattgaaaagcaatatgaagcaggtgatggaatcaacaggaattgagaaatgctggattatcgataggaaaattgcacctcccatcgtacctgagataaagaatcaacaatgaattcgagtaaaccctaagaagaagaagaagaagaagaagaagaagaagaagaagtgaatgaggaaacaaaaattggtacctaagacaaagaaggcagagaaacgcatgtaatgcttaaggaaattggtgaagttatagtagaagaggagaacaaggatgaaagtgacggcggcaatgaggacgacgaagacgatggcgttggcgagactaccttcgagcttgacggtggtggagtcggagggattctcgatgtaaatgaggttagcggcgctacggatctgagggtcagaagtgacagagagagagtaggtgagaaggacgacgaggaacatgcagatggagacgggagccatcacgccgataatctcaactccgagggaatcgaggatactagactccatcgttatcgatttcggtggattttttggcttacgccatttttgggagttctagaggaagaagacgagaggagagaggtacttctgagtcttcttctgaccagcagctcgtctatgccaatattttattttgtttgtgtcgacctacgatatatcatttaaagcccaaaagggcaaataacggtacaacaataacagcccattaggcccaataactacaaacaaagctacttttttaaaagtatatctatttaatatattaaaaataaaattcggtttcgggatcaaatgtttcgattttcaggtcggaccggagtggattaaactggatttaaaaccaggattttgcctttggcgtaacctttcgaagaggaatgtctgcaaacgagatacccgacgagctatggagaaagatcctagagattggcgtaaagtcttcgactttctcgtacaaagatctttgctgcatctctatctcctctcgccgtctcttccgattgtcctgcgatgattccctctgggatcttctgctcgtccatgatttccctaaccacatcgtctctgcttcttcttcttctgaatctcccaccaagtttatctacatgactaggtaaccttgtttgattgaaatttgtgctttctgagatttcttctgttgttagtgtgagtatttaagctcctatggatgtggttgataggtttgagagggagaaggagaggaaattagctgcccatagaagagctttactcaggaaggagagtgaaatttctgaatggggccggaggattcgtgaattggaggcacgattgtccgacgaggctgagagactacagtcttcttctctgcaattttcagatttgctgaaagtgaggtagtccccaacctggtgaacattttgtcagatttcagaaagtttcgttttttaaagtcgttatagctctctgtctatggctacgaatagcaattataaaggagattgcttgttcagttgtgacagtttagaaagatgattctttgttgatcaagtgaaatgagattggtcctactgttcttgcctcatgcatccttctcatgtaattttttaatggctttctcaggcaagcatcagtagctttgaacgtttggcagccggaggtagtacgtggtagacaaaagcaaatggttgagcaaaacgctgttcctgttgagggtcgattgcgtgcacttgagatggagatgaagttatgcaagcagcaaatcatgggtttgaatagggcacttgtgagtcttagttagggaattccaatcatgttccacacttccactggttgactttttaggtctcttaaattgttatctctgtaattgcagagggaggtaaaacaccgatatgacatagcaataaaagagctagaatccatgaagtatcatcctttacgagattacaagtcgatacgtaatggagaccaaggaagtaatggcaagacgaaaaagttgaaaactagcatcaactatagtggagaccaagtaagtaatggcaagaggaggaagttgaaaacaagcattgattgtaagtttatgaacatttctcacttttcttcatgtagtagtgttaccgaaaaattctattcttactctccaaaaattatacatgagtatattcctgaaaatctgcttgttctttgaagtgtgagacaatgcaatgtagaagagttttatgccgatatggacttgtccgaaactatgacgtgggatgtttaatgtttgaagttatagatttacattgttgatctttgttatcttagttgtgttatcgattgtgggtttttaatatacttatgaacacttgttatcttgattccgcaaaagcagttccagcaaaacccagaaacacggagaagctgttccagtcagaatcagaatgatggttggctgttccagtcagaatcagaatgatggttggctgctccattccacagagagattgaatacttgagagttgttgttgttgtattgtttgtaatatttccaattagatttgcagaagaaagctgaaattttgtcacataatgtggtcgatatagaattctgtaagtttggaatatcatgaataaagatgtatttgtttaaaaggtataaaactccttggttctttggcatgtctgggtcaaatcaagactctgttctgctttactgttcccattggacctttttttgtactcggattttccagttttggtttatagttttttactagtcttttcatgaatgtgatgatgatatggaagaatgctcctaataaggaatggtttcatgatcatcattgaactctagagaaaacgattatagatactaactcatg

SEQ ID NO: 20614 - DNA, 3003 bp, Unknown
  misc_feature (1)..( 3003): 2750-1469P.txt file - cDNA_ID_1827445; gDNA_ID_1620762; Annot_ID_50034
ttactttagacaaaaaaacaaaaacaaaaaggaaacattcttacttgtgcaattgcagcaaatgaaaaatgaaatttgtgaaccaagttaaataaagcatctttagatgcactaagggcatctccaacccacccacatctatagaggtgttaagatattattgtacaagtaatgaagacttctttaagaaattaggctattaacaattagactctatcatcaaccactaaaccatcacattagtttacttttttaccttttccttcggtttagtctaaagtcaaacgtcatttttttcttggtgcgagtatggttagcctcgtagatgatataaccatcataacttactatatcgttaaaatcgaatatagtttttgttcatatattatatgcaatgtaattgctaatgatagaattttttatgattagattgaataattattatgatgtgggtcagcccaaaagcccacagaaaaggagtattaatggaaaacatgtgaatagtttcttcttccccttttctcaaactaaaggataaaaaagctttctttttctctctctctatcatctctgtcaaattcaaaattcgagtattcgaaaaatccagctccaaaatcgttgattagcagcgactaaaacccaaagtttcctccaattttaacgaattacttcgtgggtcaatctcataatctgggaacactctttcggttttgattttgttggcagcatctattctaagcgaaatgatgggaagtaaaagagaagaagagaggaacgagaagattattcgtgggcttatgaagcttccaccgaatcgtcgttgtatcaactgcaatagccttgtaattttatctaactctctctcccttttaccaatttttgtcttccttcaaaggcttaatttgttctctaaattgttcctgtgagtgtatcaactgagttttgaactgatgggtttcagcttctgtgattatgatttctataatcttgtgaaagatatgttttttttggggggcttgtgtttgtctagaaaatgttttgatttatgtccttcgatgggttctatcagtgaagttaatctgcaaagccaagtaatttgtttatttccagatatagaaatggaaagagaagctcgcaaagctacaatttttcgttcatttgtgtgaatttggatttaattccattctggctatattatagtaagacttgcaaatgatgcagggccctcaatatgtttgcacaactttctggaccttcgtatgcatggcttgtagcgggatacagtgagtaccttccccttcctatatactttctttgcaactattcctgacctctcttgtgttccttccttgtcagtatcgtacgctggtttgtgttaccttttctctttccatgatttactttatcatcttacatcttacatttacagttaagttatatgtaatttgtaaagtaggaataagtaacctttttgttaacggtttcctatgttcatcccacgattaagttttctgctatattgtaagctatcgagtctaaattagtttaaatatttgtagacaggactcattgtgatcccccagaagcatggctaatgcattgtcttacaaaatatacatttatatctagtgtttgattgtttttgtgggctttagtttttgtttcatgcacctgatttcgtcgacagattgtgtgagctgatttttttggcatcattgtatttggtggctgacttataccttttattttattactcttgtactgatataacagaattctcaatctattcagtggatccctttttatttatgtctcttgtcttgatttggtaaattttggtgcaactgttatacgagacttgttatcattgaaaaggaaatataggcttatgtgaaatgagcagctgtaatctttcttcgcgttatttttaggtatattcggaagtatttctttctccagctgtgcatcgtttcatatgcggttatagggttcttttgatgcatatttaagtatagggaggtgcagtgtgcattttatttattacgatttcctgtttcctagctaagttacactgccttgatgtagtgaatatgttcctaccttttctttttctcttagtttcagtttttcatggtttattttattttgatgacctgcagccgcgaattcactcatcgtgtgaaatctgtgtcaatgtcaaagtttacttctaaagaagttgaagtacttcaaaatggtggtaatcaggtagtattgatgctaaagtttcaattttctaaattttccttagatagatgtttccgtctgtagcttatgagagttttctatttcagcgcgcccgagaaatatatttgaaaaactgggaccaccaacgacagaggcttccagaaaacaggtttaaataattagttttccttggtgttcatgtttgagcagccagaaacattgcttttttgaaaaaagaaaaaatatgatctgtttaaaatccatgatatgttgttgttgttctttggcagtaatgctgagagagttcgcgaatttatcaaaaatgtgtatgtgcaaaagaaatatgcaggcgcaaatgatgcggacaagccttcgaaagatagtcaggcaagattatcttgtttcttttatgccatctttctaaatttgactcatattttgctgcaatatttaggataaaatcttatatccaaagcagcaatgtatttgagtgaaattttccgtctaagtgtgttctattggtagtacttttctttttctttaggatttattttatacttgaactttctaatctaacaatacaatattatgggttttaagatgatcaatgttgctctgaagctcaaggtagtcatataggtcttctagtgtctgatacttattatttcttttgacttgctctaaattcaaccatgtgcatgcatgcatggaacacttatttatttttcattttccctgtaatgcaatggacaggaccatgtaagttctgaagatatg

SEQ ID NO: 20615 - DNA, 3000 bp, Unknown
  misc_feature (1)..( 3000): 2750-1469P.txt file - cDNA_ID_1827457; gDNA_ID_1620762; Annot_ID_50031
tagcctaatttcttaaagaagtcttcattacttgtacaataatatcttaacacctctatagatgtgggtgggttggagatgcccttagtgcatctaaagatgctttatttaacttggttcacaaatttcatttttcatttgctgcaattgcacaagtaagaatgtttcctttttgtttttgtttttttgtctaaagtaagaatgtttccttatttcatggaatataattatagaattacaagttgatcatatctcaacaacgttatctaggttttcaatcaatcgtttcatttgaatcaatactaattcgtttaagaccaaatccgcgcgatgaaaaattcctcaaccgttttcggaataaatttataatcttaaaatagcttaatcaagaattttttcacgtaggttgtaaaatatttgagaaagaaatagttatagacttaaagatgacatcatctagaagataaatcgaagaaggcaacagaaaactaaaagataaaagcatccgtttctcaatctccgtttcttgtctcttcttgctctcttgatctcttccattgtttattaatttacacctttgacgttcaaagagtgggtgatcttttttttgttctaggtatagtggagttgttgttcttcttacgtactacaattctgataaggtactccaatatatattgaagacaggagaatgatctatatagatgcttattgatcgagcagaatgtctaagcttatgcagaatccggtgttacatgaattgaagaagcaagcttctttcttcatcaaggaaaagatcaagactgctcgtcttgctgtaaccgatgttactgcagaagaactgtgagtaaactttactaaagttataaacctatttcctgctaaacctaaatctctcatattttagaaacctttacaagtattatcaagtgtttttgcaatcaaaacttgtttttgtggtatttttagcatatctctctctctcttgtactaattgagttgaaatataaactgtctaatgtgaagattgacagaagaagttacgggcagcgatcactcatccatagactcacgctccatggcggccataacaagagtttcttttgaggttgatcaattccaaagaatcgtgaagattctacgtcaaaggttattttgcctcactgttatataagcaaaacaacttagaaataaatatcacagattcacagaaccatcaatgatttcatcaacacaatactacaccaaaaataaaaatcaccatatttttttttgacggcaataaaattaccatttaagcatcaaaaatcccgaaaattttatagtaattcatcataatagtcaagaatcagattactgtttagtgtctatataatttattgattggtaatttttttttgtagaatggtagtgtttgatagaaaggaatggcgcggcatgtgcaacacgttgtcaatgttgaaccacttgttgctcaatggcccactaagtgtattcagtgagtttcaacatgagagagctattattgaagatgctataaagatggagtggattgatgagagagggttcgattgtggtctaaaggttcgaaacatagccgagaaagtactaagattgcttgaagacgacatgtttcttaaagatgagcgagaaagaaaccgtaagcaaagcattggtcggatcacaggatttggaaactcgagttttgtcatacattctgaaacgaacaacggacgagacggctcgttaatgttgagtaaccatcaaacttgtgaaaatgattgtatcgcggatgatcatccattcgtcgaaaatgagcacaagactgctcaactcttgctttcttcttcgacttagagttagatttcccttggttgtattattatgtttgctctatagaattacttatgaccaaagaacaaagttttggaaattctgagacgatgaactcacacaaatacgttaatcgcgacgcttacatgcatcggtgattgattatctctgtatggagaaaagaactgcatcacgtattagaaaagaaatagatgatagatttttgtttttaggtttgtttctcgaagaagaaaaaaataatagagattttgatttcttaacaagaagaagagtatttataagccaagggtacacatgctacagtatatgctaacatttatgcttaacctaaaataatatatcactatttttttatttatttttcttacaaaaaaatatatttattagaaacatatgaaaaatatctacataaaatagaaatacagtatacaatagcgaaaaaaacacatgttatgcgagattagatatacgagtaaatgtataaaaactctatttattgaattagatattcacatagaaatatgttacttaagtatgtatttgttttgtattttcagtaaaggtcacgtgggatttattttttgcatatttagtccttgggatttagatctcgtaaacggcgtcgtactaagagtatcctccggcggcatcagttttggagtttcttggatcatcacactcacctgcttcgttactcttcccttggattggattggattggattcgctctttcatggttgaagaatgagatctcaccaagctggccgcaaacttccgcttcttcaacttctcggctgcgtcgctgttttctccgttttcgttttcaccatccaatcttccttcttcgcaggtcatctatcgccgtacctttccctttccattatatatacacttcaattgttcgaatagcaatatgattcttcatctctcgcgcagataataatcgtaaactagatcttcagccggaagatatccagatcttgtcagattttcagtccagcgttcaacagtgcgtggtttgtctcctttcccagtttctttgattctggacttgttacttttctatatggattcttcggatttggatcgatgccacagttttggtttattatggcgcactagttttgattttggataaatcagatg

SEQ ID NO: 20616 - DNA, 3000 bp, Unknown
  misc_feature (1)..( 3000): 2750-1469P.txt file - cDNA_ID_1827463; gDNA_ID_1620762; Annot_ID_50028
aatatatatttggtgcagacaaagaataacatacggagatgctagaaaattgagaggattattcttataatttgactttgcaacaaaagtgctgtagttttgaaattttggaatgtggggaatttttagaaaacagaagaaacgtacctaactagcccaccaccgtacatcgtgtttttccctcaacgtacttgttttcaacatcaaatagtcatgagtgaaaaaagttgatctattacgaaaagtgtgcattaactttaaatcggtggaatgttgttatcaaaagacactacactgaaataggatccgcatgtaaacgaacatttgaattaaaaaggtactatttaaatataagagagtggataacaatcagataataaaaacaaaaaaagatatggtttctccaagtatctgaacgacatttttcattgcttgagaaaattatttcgtttaattatatgtgcaaaggttagattaggtctttatcaacaaagtgttagattagggataacataaactatttttattgattaaaaaaaaaaaaaagcagaaaaaggagtacaactctgctttctcacatccttttactcaccccacatggaaaaaaaaacccgtaaaaggcggaaaaagatttgttatcctctctacattaccgtctctacccctaaaaagacttttcaaaagccaaacaaaattcacataagcaacaaatgcagaaaaaaaaaaaaaactcatcgccaaactcagaagcagccacaacaaacaagcttcttttattattcagctcctttttttttggttaaaagtcttttccagagtcttctcttctactaggttggtaggctggcggaatctaaaatgcccataacccaaatttacatgcccgacactcctccatacttgttagataaaaaaccaccgagagagatgataagctatcacttgacacttatttatttctccgagagaatcttctagatgaatctctcctctgtttctcctgctctttggatccatgggtgccctgcaacaaaacaaaattacaaaataccaaatttagttcactttatcattaaaccaacctactaaaaaatggattagtgtggataagataacattatctgttaaaaatagatgaaatttattgacattaaaaattcaacagagaaacagatctgatggttttagaatcttacttaatgcttgttcggctgagaatcttctagaagcatctttgcatatcaatttccttaggaaatctttagccatagatgaaaccccccggaatatcttcgtcggaaaacggagatttcctctgagtaccgcttcgaatatctcttcagctgtctcgccgtaaaacggtggagttccagcgagcatcgtgtacaaaacgacgccggcgctccatagatcgaccttctctccgtaagaatatcccattaaaacctccggcgccacgtaatacggcgttccgacgactccttcggtggtctctccctcacctaaccaaatccctgaaccgaaatcgcagatcttaaccgtatcgtttcgtagatctaccagaatgttctccggtttaatatccctgtgaacgacgccgtatcggtgacaatgcgaaagcgcctggagaatctgtttagcgaacgacgccgtctgaggctcaaagaaggttccagaagagacgagacggtcgtagatcgaaacagagggatggacgagctccatgaagatggagagagtcgaatcagtgtcgatgagatcatggatttgaacgatgttagggtgataggacaagagagccatgagcttaggctcgttgtcgagacaggcacggtcaaggtcgtcggagagagaggctttgtcgatggttttgcaagcgaagaaatcaccggtggccggagcgtagacgcgagagacggtgccgaaacggccacggccgatctcctcgcagatctggtatttgttggtgttgttgtttccgagtgtttggctgcaagtcataatatcactttcttaatattttttgttttgtgttggttcttgtgtgagttaagaagacctcttgagtcggctctacctttttttatagccaaaactcttgagaatattccttttgatgcctacatgttttttttttctactagtattttccttttccttaacgttatatcttttttgtttttattttgttttaaataggattttagatattatttcccaatccaaatctatttttttgttttgttagaagtttacttggagaaggtttgtactttgtaatgtcttttcttatcttattatatacaattttactttctaacagttctttattatctatttggtttgttctttgaaatgataattacttggtggtagtctaaaattcacatttaagtttattatcaaatgtactacacaattacaatcctctctaaattacagaaaaacattctcaacagatccagatttgttaagataaaatattggatctacaatttaatatgtttccagaaaaagttcataaattgataatgcacaatctagtgaaaaagaggtaggaaatccaaccccaatttatgcaaaaacatttccaaattgaatgtgagtactaaacgatttcttggacgagattgaaatctgaaaaagagataagaaaagtgtggcatgtttggattggaattgggagataatccctgcaagtaagtaaaccagagatcccacgaaaacaaactaataaagacactggattgggccgataaatcagttgggctgaagaaagcaggccgtctttattattacctaattcgttcacgatggaggtcgaaccgagaatatccccctccggaggcgagcgccttatccattgggccacgcgaactattggtcaggcctcagtttttagccttaacaaactattgagtattgaatgattagcttccaaacatcaatcaccaaccttctagtttccttttaaccctactagagctctgctctgccatg

SEQ ID NO: 20617 - DNA, 3003 bp, Unknown
  misc_feature (1)..( 3003): 2750-1469P.txt file - cDNA_ID_1827471; gDNA_ID_1620762; Annot_ID_50026
gtgttgtaagttacagtgttcagttccaatccatgagataagatatgctgaataaccgaagccacctcttccaaattccctcgcctgcagttatagttaaccagagaattatatgtgacaatgtcaggatagcaaccttccactgccatgtcttctaaaacttctatagctcgagcgcttccacagtacctgcacacgagttcgaccaaaaccgtgtatgtaatcataaatggagggcaaccattctgcagttgatccttccaaaacctgatggcttgctcagcattcccataatcaaacatacaccgaatcactgtgttatacgtgatcacatcaggagggctcccactcaaactcatatcttctaagaggaccaaagcagttcttatatgccctttcttgcaaagatttccgatgatcatgttataggtaatagtatctggaaccccaccagacattaccattactctcaagatacacattgctttatccagttgatcaattctggctagaccacggactaagtttgagcaagaaggaaaatgaggaacctgattatgtcgtgccatcacctcgacaagtttgcacgcatctgttaacttcccattgctgcacaggttatgaaggatctcattgttggtctcttcgtcgttctctgtaattggtccatcagatgataaaccaaattgcttcataggtttcactctggctctcaagttagtaccgacaccatagtgatggaactctgagcttctctcagcatgatcatttacattgtcaatgcacacactacttaacaagccgtgacatctaaaaaaaacatcctttttcagcccaatttcttgcttccaatctaaagaagaaaactttctgcaagataaaggattcgcctgcttttgagacagactaggaatatgcaagaactgaacctcaagtagcaaattcgacgaagccatttctcagaatccagaagctattttaacaaaacagagatctttccttttacaaaagcttatcaaactcaatgaagaagaagttagaccaataattatttgctggtatgatgttcagtctctgctgctttatctcataacctattcttgagtgaatggagaaaccaaacctgtgaaaaggaaaggtacaagttatagagacagagaagcagactgaaacagtttccaacaaaagaaaagaagcagaaaaccttcaagttgcggttaagtttgagaaaccctaacaaatctggagaaatgatgagtgtgagaaactcactgttcgttgttcgaagccgacgcgggttttgagatgataagtagggtttatcctaaatttacaatgtgcaccctatatgtctcgacatgtttcatttattcccacaaacttatgaaacatctaacattaacctcctctgtttttattccctttgtttttgtgaatcggtttaattattttgggccaattcagctatcggattgggctttttcaagttttgggttgagttacaaccaaattaaaaatcaaacagagatcaatttctccgcatagaaaaataacatgttacattaccattcgaaaacaagatgaatagtcatttatacacgcctctcttacacattataatgtctaaataattgcattatcatattcaaaatttagatatgttggtcaaaaacagaattaagtattataaattgtgtataccaaattagttgacgctatcattgcatatcatactcacatactacaatatttattacatgaactaagtgattgtattccagtggctattttcatttaactataacaaaaaaatcgaatgcgataaaactacttcgaaaataatcgatggctcttggaatttttataaaatctagttcttgaaataaataaaaatttctatgcaatatttttcggtaaatttttgttctctattacaataaaattttattttaaagaaatgaaattgttatttagcgtatatttgtaaccaaattagcaggcgtaaatacaaatcctttaaataactctgttgttgtgtggatatgcggtaatgtccacccgtgaataaatgtttacgtgttatatgacccaacaaagtgaaccaattatattactcctctctaacgcacttgtttattgcatttttatttatttgatggtcgaaacaaaatagtaagagtagttgttgcataggaaattgcatctgcttgcttttgaagcgttaataacttataaccaagcaagacatatatcatacagagcaaaaaattaggcaaacccagaaaaagccaccacatgttcctcttctcatgatcttaaaattgaaaaaaagaaggtgataagtttaatctaatcttgaccagtgaaatagctttttgttgcttgttgtttttgttcattcttcacagatttaattgtcacatacccaacgtatatggatggacctgtagatttaattccagttttacccttttcttcttcctttcatctgattttgtttgctgctttttttttgttttctggggaatatggaaaaggttaggtttcatatttggacctttttttttggtgttgaatttttcttcttaatttttatgcaaacatggaaaaggacatgcgatgataatcctgaatctactagtgcttagatctgatgaatactggattattaaaaaaaaatattactaaaaatttcaatgatctagggtttcttcagatctttaaatttgttgctgattttactcgatttctcttagtctgggtgcagttgatggagctccagctattttgaccatccaatttcaccagaaaccctaaatcacaagactatgtaagcattttccttatggctcttcttcctgatttttgattcagctaatttggtgatgaaccgtttatatatatctgtaatcgtactttaccctgaaaatatgtacctaccatatgtgtcatgtgtatttttattattttataaatggttgtgatattattgagacatgaatg

SEQ ID NO: 20618 - DNA, 3003 bp, Unknown
  misc_feature (1)..( 3003): 2750-1469P.txt file - cDNA_ID_1827479; gDNA_ID_1620762; Annot_ID_50024
tacacactgaagattgacgaaaagagtgatatatacagtctaggcgttgtgcttctggaattggtgactgggaaaatgccgatagatccttcgtttgaggattcgattgacgtggttgagtggattcggaggaaggtgaagaagaacgagagcttggaagaagtgatcgacgcgagcatcgccggagattgtaaacacgtgatcgaagagatgctcctggcactgcgaatcgctcttctctgcaccgcgaagctaccgaaggatagaccatcgattagagacgtcatcacaatgctcgcggaggcgaagccacgccggaaaagtgtttgccaagtcgccggggatttgccgattttcagaaactcgccagtggtagggctgatttagatgacggaggcgataagggtagttttgtcatttcatcagctggggctaattttaacattgggctaacaagttaactttgggctgaatcaaaaacccatgttttcaaatctgatgggtgcactaaagcccattgaaccaaatgacatgattcaaaattgtaataggccccttgttgatggctgatccagcaaattgtagttaccagaggctaaaaaaataataaataaagattttaattagttttgttttaatggaatattaatctttcaattcacagagaaatattatcttttatgatacaataattataaataaaaaaatttgatttttttctataaatgaatttttatgaacgaaatataagttaaatatattgtatatgttcttgattaatttcttctattctgaatttgtttccatttccggttaaaatttttgattcgcaattgcttacatcaactatagtctatatatgacaaagtcaaatatccaaaaacgagattttgtaattatgagaatcagtctttggcaataatctctgatatactcaaaatagagtgaatacaattattggtttttcatgctaaatatgagtttgctatatataccaaatggttatataaatttttttggggacaaaagataattaaatatacagcaaatggtcaagttaccttcttcttcttttttttttctttttgttatcataaaattttataaaaaatggtaaaactacatatgccaacagagaaaaaataaccctaggctggttaaacatattaaaattttcagtgacaacaatcctaaaaaaaatataactttagaaaataactaataaaatacaaatcaaaattgcaaaattaaacataaattttaattatattctaattctttttcacgattagaaattgtcttgatattgataaaaatcaacttcaccgaaagtttatggtctttacgtgcctacttgctatttggtagatttttgaaattgaaatatatgcttagttaatctggttcgataaacctctcatttgaggttttgtatatgttgttattcgctaacatcgataacgtttattcactaacattggtaacgtcgaaatatactcaactaaagtccgattgagaaagaaaaaaaattaaatatagtcttgaacacgagtagaagaaactggaaatgtcaaacaaccatttcactcgccactgcagaggtggaaagttgtaaatcgattatctaggttttacatataagtaaaatatatccaaaaattgtaaaattgtacctttttctttttctcacgatatgagttaaatataccggaaagttgtaaagttgtaactgttttatgatttttctgaacccacgaaatatgattttaatggattggagagttgtaaaattctaactgtattaccgattttttcagctcgaaatatgagttacatatattgtaaatactaaattttacataattgtttctaaaatcttaatacaatcatatcaactatcttttttttttttttttgacaatcaatcatattaactatctaataaaagtataaaactacaacctctaaacttctttttttaaatttctttttttttaacttcttaaataatacaatcatatcaactatctaataaaactacaacctaaacttcttttctaaaacatcttttttttttaacccaaaatcaatacacaaaaggtgctttctctttgctatgaaatctctattcttctcaaaaaaatatttacatagttttcatcacctacattgtctctaatagtccaagttaggaatataatctgtattttccgaaaccgttgcaactctctctctataagaagttttgaaacatctgaaaccaccaaacactctcgacaggcctcactgcgacgaaccgtttcgatcgcgacccttcagttgtcgtctcccccaaacgaaaccctagcaaattcttccgagtctgctttcgcactaggtaggattctctcgctttggtaagcctattcttcgccgtcgcctaaatttcgagcgcttgatgaaaatgcttagaattaagtagccttgtaattcttaattaatcacgatttgtgctactcctcttttttatgtagaccatgatatatgccgcaaggatgctcgtgatctcggagaactgatgtatgcgtatgctgtaagtcttctcctttcgtgtagcttcaattgattagggtttttcaggtttcagagcaactgggttgggatttgctggtccgctttgtcttctactgttttacacaactaattatggttttgccttccagaacctgcaaaattttggatgcaattctcgtctctttaggtaaacgctattgcttcttctcttattttctaagtcaattgattctgggtaactttaatatcatgcttaaataaagttcgtggttattaattgtcgggatttagagctgagtttagttgtcttgtcgtaagatcttattgtgtgagatattaaataccagattgtttcacagatgcgtctttttagttgtggtaagtctcaggaggtgtgcttaacgtttccattattgacactttttcagtagcaactagcaagtgaagatg

SEQ ID NO: 20619 - DNA, 3003 bp, Unknown
  misc_feature (1)..( 3003): 2750-1469P.txt file - cDNA_ID_1827487; gDNA_ID_2096295; Annot_ID_195536
gaagtccacttgataacttccttgtatttgtaggcgaagtatttagaagctttagcctctgagacacttctcacaagcgatgaagcagtagttgtagcagcagcagctgaagcagtcgcccttgcaagagctgctgtcaaagttgccaaagatgcaacattatttaagaacagtaacaacacgaacctattaacttcgtcaacggccgacaaacgctccaagtgggaccagtttactgagaaggaacgtgctggcatattggggcatctagcggtttcggacaatggaattgtgagtgataaaatcactgcatctgcctctaacaaagagtctattggtgatttagaatcagaaaaacaagaagaagttgagcttctggaggagcaaccttcagtgagtttagctgtgagatctacacgtcaaactgaaaggaaagctcggagggcaaaagggttagagaaaactgcatcaggtattccgtctgtgaagactggttcgagccctaaaaagaaacgtcttgttgcgcaggaagttgatcataatgatcctttgcgttatctaagaatgacaacaagcagttccaagcttctcactgtcagagaagaacatgagctgtcggcaggaatacaggtttgtcaccaatattccaaattctaaactaaccacctccctttttctacatcgcgtctgagacatcacaaacactcacccttcgtaggactctagattctaggcgaaaatgatgtctacaaaatctttagatgtttgagaatgacgaaattagtggttagtggtagaatccaagatcgcttctttgtgctttctagccaatatatcatctgaagttctgtgaaagctaattatcctgacatgcttgtcttaaattgaattgtcaccttttttgttcttattatgtagccattcaccaactgtttagtgttgatagaaaatgggaaacgtatgttcagctttggaagaatcaacattacttgtgaacgttatttcttcttctctgtaatttttcttatctttctttattgtggttttgatcacacactttggtttctttgtttaggaccttctgaagttagaaagacttcaaacagagcttacagagcgtagtggacgtcagccaacctttgcgcagtgggcttctgctgctggagtcgatcagaaatcattaaggcaacgtatacatcatggcacactatgcaaagacaaaatgatcaaaagcaacattcgactcgttatttcgattgcaaagaattatcaaggagctgggatgaacctccaagatcttgtccaggtttgagcttttctctccttatttttttttgtaataacacatctgtaagcagtagtgatgaaagtgatagatattgaacaccttgctcaaatattttcgaaatggtcacaggaagggtgcagagggcttgtgaggggagcagagaagtttgatgctacaaagggttttaaattttcgacttacgcgcattggtggatcaagcaagctgtgcggaagtctctctctgatcagtccagaatgataagattgcctgtaagttatcccaaatgtttttcttttttacttgtttaaacaaaaggtttgggattatgcctcaaattttaagggatgattggcagtttcacatggtggaagcaacatatagggtgaaagaggcacgaaagcaactgtacagtgaaaccggtaagcacccaaagaacgaagaaattgcagaggcaacagggctgtcgatgaagagactcatggcggttctactctctcctaaacctccgaggtcgctagaccagaaaatcggaatgaatcaaaacctcaaaccttcggttggtaccacctgacacaacacacaccatacaacatagacttgttgtttgtctaaaaatagtaaataatatgagatgggtttgtaatgtaaaaatatgcaggaagtgatagcagatccagaagcagtaacgtcagaagatatactgataaaggaattcatgaggcaggacttggacaaagtgttggactcgttgggtacaagggagaaacaagtgatacgttggagatttgggatggaggatgggagaatgaagacgttgcaagagataggagagatgatgggagtgagcagggagagagtaagacagatagagtcatctgcattcaggaaactaaagaacaagaagagaaacaaccatttgcagcaatacttggttgcacaatcataattctttttctcttcaatatggaatgttttgtgcatagaacccacccacctgagcataacaagcagtaaattattactttttagcatttacgattcttgtgacaactactaaatcgaaaaaattattttaaaactaaaaagaaattgttgtctgaaaaacataagtgatatacaacaataaataaatatctcttataagaatttgggaaaaaaaaaatccaaagattagagatatttgggtggagaaaacaaccgcctaggacaaaaaaaaattgtgggtagaggaggaggaggaggctttgttcacacaccacacgacggaacattctcttccgagtcttatccaaagcaaaatcatattttgcttaaatatcttcttctccggctctgtctctgtctctcttcttcccgcggagctttcagtttttgtttggtaacatcgtttctctttctcactaactctgatatcatattatcaatttttccttttcaacacccaaaatcacaatctttcagctttattctgtttttccttgcttgagaattgtgttcgattcatgtctacgaactgaaatcacaaattttgccaacgttttatgattcctggttccgtatttttttttttgtaatcaatagttagctcatttcgaataatcaaactcaattttattgttcatgatttgttatctgggataaaagagagtaatgtgctaattatgtatactcaggtattgcttggtgtggggaagattagatagtgtgaagaatg

SEQ ID NO: 20620 - DNA, 3003 bp, Unknown; identical to SEQ ID NO: 20619
  misc_feature (1)..( 3003): 2750-1469P.txt file - cDNA_ID_1827487; gDNA_ID_1620762; Annot_ID_50019

SEQ ID NO: 20621 - DNA, 3003 bp, Unknown; identical to SEQ ID NO: 20619
  misc_feature (1)..( 3003): 2750-1469P.txt file - cDNA_ID_1827487; gDNA_ID_1620762; Annot_ID_167174

SEQ ID NO: 20622 - DNA, 1386 bp, Unknown
  misc_feature (1)..( 1386): 2750-1469P.txt file - cDNA_ID_1827489; gDNA_ID_1620762; Annot_ID_50018
gaattcacacttgactcttctttatatgtgtcctagatttggttcagctatatgatcatttctatttttggatttggctgaattcaacaaagcttggtggaatttttcagtttaatatgtctgtctctttgttcttggattgatatctattcagtatgtcctatatttacttacacaccttcaggccatgggtagagctgcaacttcctttgcaaagttagctgacacagctcgcaaagaactccctagtacattggcagcggtaaggctctctggcatggaaataagcgatcttactcttgaattgagcgatttaaggttatctctaaagctcttttcttttcttttcttttctggcttttgatcatctcaactctaaaaaaagtgaatgctacatgtttcaaagcaattagttcacaattagttcttccgagtcaccttgttatctgtccggaataagaaactttttctaaatcattattatgcgatgcaaatggtttcagccaagatataacagatgggataaacaaatcagctaaagcggttcaagcagctgaagctggaatcaaacagattggaacacttgcacagcagcaaactctctgtaagcttcttctaagcttttggataatctgtaataaaagctgctgttcatggtggcaacagttcacactggtaaaaaaaaagcggaaaatatgatctgatgatgaacttgatcttgtgattcagcaatgattgaagagagagcaaatttaccagaaatatcactacaacctgttgtggctggtgcagccgaaaagacttctcacgcaatcggcagtgcaaccaagagactaatgaacattataaccggaggaaacaaggatgaagattagacatttagaagttttcacttggagtgtgtttttggtccgtctttgtttgaagggattagtacaaggtaaagtccatttagggaaacagagaatctatgaacaagaagactttttagtaaaatttggtatatttatgaaacctgaagtgtaactgtgtaagacacaaaagaagaaataataacagccacagccattttaagatgtacaacagcagataaaatagtttacataacaagccgacaaaaaaaaaaaactattctattcttacatatgggttgactttgcaaagatggtaatagtgtgattgggattgggccaaagttaataggcccaaaagaagtggaaaattagaagtaatgaatcctttgattgagatagaagctttatcctcttcttcgtcttcatcatccgcgcatcaccagttttttctctctctctacaaatcttcttaacggcctttcatcaatggtcagcagacttagctttcgaatataggctaagaacgagcatg

SEQ ID NO: 20623 - DNA, 3003 bp, Unknown
  misc_feature (1)..( 3003): 2750-1469P.txt file - cDNA_ID_1827500; gDNA_ID_1620763; Annot_ID_50068
ttcgaaagggccacgagtgtttgtgccatatccttcacctaaaccgataaacaaacatataataaactcacaaggaagtcaaaatctgacaagggaagacttttacttaccctgcatttctaaaccctcatagataacataaggaagcttcgaatcttcagtagaatcagcgaacaatgtagctaaatctatgccatcttgttccatgtcaacaccaattagacttccggagttgtgtaacagcctttgcatcacgagcacattaggatctttttgtgcaccaaagttccttgtagaatcaagagaacctgcaacacccaagaagtaaaggtattaatatagttttttttattcctgcgcaatgtcttatacataatttgtgatgaaagaacgtaccttcgaacatgtcatcataaagattgaacgtgtctgtgtatataaggatattatcattgtcgtagttacttgggttttccctgtacgattcatatcccttcaagacttcttcatctgtttcttggctcggactattcttctccgcttccttggatcgcacgtaagaagaatttgatgattcttgagtcgatggagatatagggtcgtcggagagagtcatctctgtttcgttggatcacgatagttaaaacgacttagtactctttttcgatttcttcttcgtcggagagacttatcgttaaaacgatttgagattgagagagactgttagacggattagtgagaccgcgagtgacgagactcgtttctgtctttcttttctttttttttttttttaacatcttcattttattgatattatgaagaattgtaatcaaatcgtaatgctgtgtaaattacaggtggtatagtagagtaaaatttaaaatgttcttctcgaaacaagtgagctttggctagcagatctgcaggtttgtttgtcatccgagtgacccatgtgaatttacactctcgaaatcgatttctccatgcctgaacttctctaacccaattatacagatcaaatcgtgcctttccatcattgagaattttcagcagctccatgttatctccttcgaagcagactcttgtatatccatgactccagcagttctgcattgcaaatataagggcttgaaattcgttctcgattgcactgttgttggttcgtcctctagcttgtcctgcactaacaaaaaggcctgcttcatctcttgttacccaacccgctttacctgtctttcttttcttatataataataccggccttattttgttgttttgaataagaaaatgtatatgttttaaagaaaaaatcaaattacgaacacttcaaaacataatctagatcattaatttattacacgtgaaaagaaaacaaaaataataatttcatttaaatatttatcaaattaaaatatatttattatataataaaaatataaaaatatttattatataaatatatatttaatataaattatattattatataaaatatacttattatacaattaaaacataaacaaatttattatatatttctgatgaattcttctacactcatgatatatactctctccaccttttcttttgcagtgaaagctcacaaaaatatacaaaactacattctcatcaaaaaatcaccaacttaaaaaataccaaaaattgtatttaattctatagttaaaatcaatttgagttttattgagtttttatataattttagtcttttaggtgaatttggggaattgttatttgttgttaaatcctacttcaaatcatgaaatttgaatctttgtattttgaagtatgtaaattatctaaatccaagtcttctttagtccaatcccaagcattctgcatcatcagctgtcttttctcctagggtgcgtgtgaagtcattcctgagattgaaggtctcctggatctgcctctcatcatagccgcaagagttcgacaagtacgtttctgcccctagattgtcaaacataaccaattagataacactagatagagatgaaacagaaggcaatgccaatgctctgtgtcgtatggcttctgcaacaaggtatatagagtagctggacagtggacgtagaaatactatgggccagaattattatgggctcaaattagaagtatttctattgggccagcattatttattctctaccctaaaccctactatttcaacacttgaccaaaatggcctttaagacacgctgggcctacgccaataattatccacgtcggtctaaaactcaatgacttgacgaaaatgcctttgaggattctatgaaattaccgaaattacccttttgtttcttagccgcgtaagtttcgtctgatattatttttcttcttctccgagaaacaaaccctttaatttactgttgtttctcacaattctcaaaaatctctcatccgaattgcgccttttccgcttccttttgctctgtcaaatctctcaaccggaaaaatctcgggaaggttcgtctgatccaattctgaagattttgaaaaacccaccgagaacttcgaggtgaatttgatcatcttcttcaaaaacctgtttttttgtttgtttgttcttgtgtgtctctattgttaattttgacgaggagatttatatatcctatgatcaggtcgtgtttcacttctctaattaagttgctttcttttgattccaccgtattgtatctctggatcgaaattagggttttagtgtgtgttgtgaactttaaacgcataaagtttctgcctttcgcgtatttgaaagtttgatgcagccatattctgtagtgtctccaagcaattttctagggttttacataaatatgatgtaacttcttatttgttgattttactaattagatgatacttttcagtgaagttattgtcttttgggattacttgaatcaacccaatagctcttgcaccattttaacccagtaataatcgtttgtttttgctttcttgcagatttaattgaatttttcactgatg

SEQ ID NO: 20624 - DNA, 3003 bp, Unknown; identical to SEQ ID NO: 20623
  misc_feature (1)..( 3003): 2750-1469P.txt file - cDNA_ID_1827500; gDNA_ID_2926194; Annot_ID_141192

SEQ ID NO: 20625 - DNA, 3000 bp, Unknown; identical to SEQ ID NO: 5112
  misc_feature (1)..( 3000): 2750-1469P.txt file - cDNA_ID_1827508; gDNA_ID_1620763; Annot_ID_50066

SEQ ID NO: 20626 - DNA, 3000 bp, Unknown; identical to SEQ ID NO: 5112
  misc_feature (1)..( 3000): 2750-1469P.txt file - cDNA_ID_1827508; gDNA_ID_1620763; Annot_ID_167247

SEQ ID NO: 20627 - DNA, 3000 bp, Unknown; identical to SEQ ID NO: 5112
  misc_feature (1)..( 3000): 2750-1469P.txt file - cDNA_ID_1827508; gDNA_ID_2926194; Annot_ID_141190

SEQ ID NO: 20628 - DNA, 3000 bp, Unknown; identical to SEQ ID NO: 5112
  misc_feature (1)..( 3000): 2750-1469P.txt file - cDNA_ID_1827508; gDNA_ID_2926194; Annot_ID_201297

SEQ ID NO: 20629 - DNA, 3000 bp, Unknown; identical to SEQ ID NO: 5108
  misc_feature (1)..( 3000): 2750-1469P.txt file - cDNA_ID_1827511; gDNA_ID_1620763; Annot_ID_50065

SEQ ID NO: 20630 - DNA, 3000 bp, Unknown; identical to SEQ ID NO: 5108
  misc_feature (1)..( 3000): 2750-1469P.txt file - cDNA_ID_1827511; gDNA_ID_2926194; Annot_ID_141189

SEQ ID NO: 20631 - DNA, 3003 bp, Unknown
  misc_feature (1)..( 3003): 2750-1469P.txt file - cDNA_ID_1827518; gDNA_ID_1620763; Annot_ID_50062
ttccggctactaaaagtataataatcactaatatttaaatttctaatgatacctttccttgttgtccttaaactagtattaaaacttataattcgttgacataatgaaagctttttgttcgtttaatatagttttctcataaagtcataataacaaactttttgttcgtttaatcctgtctaagtaacttatgaatcacaataacaaaatacactaaacaaaaagttaatttagtttataaacgaatgaagtgatataatattaatatttttatcattaaacgtaaatcatagattaaaaaaaagatttggccaaaaaaaaaagattaaagaaaatattaaaattaaaaataaataatgatgattctaccatatttggtagtagtaatttgtaaaaaactttcttttaatgtaattgagttttcagaattcttattttttaccaatccacgtatccaactaatattacattaaataaataaatgttcaagaaactaattggaaatcataaaataaatctccaatctaaagtagaaccgcattataaatacaaactcatcccttctacttcccatcatcttcatcacacacccatactcttcctcgaactctcttcttctttctctcttactttgtgtttgctctgttttgctctcttaacacaacacaaaaaatgtccatcgttgttggccaagcttaccaacatcttcccaagcaagtaagccaaaatcctgacgtgggtggatggagtttcttgcaatatttctctgagccaaaaggcattgtccagaacagagaagacgacacaaagaaaacagcttatgtctacccgatcgagaagcgttccgtagctaaactgagccttgagatgtgcacagagagcctcgggaccgagaatgggagtgatagtggagacgagatgtcgttacttgcgcttgaagcaaccaatatttcaaagagtcctcgtcttactacgaaacctcaaaaagaaactagcttcatgacccgtgagaacagttttcctccgccgctaaactccgtcaacggattcaacaatagccgtatggtgaaatcgtataaagaagacggtcgtcttgttgttcaagcaattagggtttgttctccacctcgttgctttgtatctgaacgtcgtgaaggaaggcttcgtctctgtttatcacagaattcattgaatagccaagacgcagaagaagagtttgaagaagaagatgaagatgatcaatacgatgcagaggaagaagaagaagaagaagaagaagaagaagaagaagaagaagaagaagaagaagaagaagaagaagaagaagaagaggacgaggagggcattgtggggaataatgagaactttgagggtaaaagtggaaataaaaaggttagcaacaggccaaaaaggagatgcaatgaaaatggatgtgagcctaaaactatgcttaattggaagcagcagcaattttgggtgaccacttaatgggaattactcaactcagcaaataattattttttacggcttctaattctacatatataaatgctaaaatgtgagttaattgttacttaaactgtttaacaacatagagaactaatcttcattatctgcttttactttttagtatgttataggtaacctttgattattaacgagagttttagttatgttttcatagactaacgagagtgaaactatagttttaaaaagggtaataaagtaccagtaatagtgagactgacgaaaactatatgatatctttcaaaaaacttcattgaaattttggtaacatcatctacactagtttgcaacacatctttgtgcttctaagcgcagtcaatgtcaatgttattgtcatcactagtcttagtagcaccaagggataccacacttttatcatcaaccatcagtccatcaaatggtcattaattcatatttaagtcttttataagaactaaaggtttctacaattttcaacaaaattaagtaatgtaaatgtcgtttatgagtatgcgaataactttaacattattattgtagaccaaactctttgactgtcacgtgtgcatatttatagacacttgctcgtacggacgtaattgaataagaacatataatttgtaggtccattgtacacgatctctctactttcttgatattcttccctctgtctcgaccaaattcgtactatataaatctcggagtgatatcaaaatagattgcaagtatatgattgagccaatgagaaatagacaacattacgatgtaatgtccaatcttacgtacaaatgtgaagagcaatctttgttctctgcaaacgaataagagaacattacgattctttatatataacatgccacttgactccgcttataattgaccgaaatctaaagcaaatctcatcatgtacccatcttatttggtatattgatgattcgattttattttattttcaatatagaaaatgtattttccatatacttaatgttataaaaaaaaaatcatgtttatattttaattcaagttgaatcactttttgacgagattatgcgaaatcaagttttgatggaaaaaaatatggaattgtgtttttgacgggaaactacggaatcactttttgacgagattatgtgaaatcaagttttgactggaaaatttggaatcacgtttttggcgggaaaattatggaattacgtatttagcgaaaaatgtgaaatcacgttttgacgaggaaaattagttcttatttgttgtgaacagtgaactagtgaagttaaccaaagtgttgcagttttgataaggctaatgactactaattttagaatgatttttattgactgagagaaaattttgaaagttcttttatgtactgcttttattttggttttagattgggccgagacaaggcccaacaaagaaatagctcaaacacactcacttagcaaattactcaaacagcagagagagagagagagctcagtaaactaaacaaaaatg

SEQ ID NO: 20632 - DNA, 3003 bp, Unknown; identical to SEQ ID NO: 20631
  misc_feature (1)..( 3003): 2750-1469P.txt file - cDNA_ID_1827518; gDNA_ID_1620763; Annot_ID_167242

SEQ ID NO: 20633 - DNA, 3003 bp, Unknown; identical to SEQ ID NO: 20631
  misc_feature (1)..( 3003): 2750-1469P.txt file - cDNA_ID_1827518; gDNA_ID_2926194; Annot_ID_141186

SEQ ID NO: 20634 - DNA, 3003 bp, Unknown; identical to SEQ ID NO: 20631
  misc_feature (1)..( 3003): 2750-1469P.txt file - cDNA_ID_1827518; gDNA_ID_2926194; Annot_ID_201293

SEQ ID NO: 20635 - DNA, 3000 bp, Unknown; identical to SEQ ID NO: 5105
  misc_feature (1)..( 3000): 2750-1469P.txt file - cDNA_ID_1827534; gDNA_ID_1620763; Annot_ID_50056

SEQ ID NO: 20636 - DNA, 3000 bp, Unknown; identical to SEQ ID NO: 5105
  misc_feature (1)..( 3000): 2750-1469P.txt file - cDNA_ID_1827534; gDNA_ID_2926194; Annot_ID_141180

SEQ ID NO: 20637 - DNA, 3000 bp, Unknown; identical to SEQ ID NO: 5104
  misc_feature (1)..( 3000): 2750-1469P.txt file - cDNA_ID_1827542; gDNA_ID_1620763; Annot_ID_50054

SEQ ID NO: 20638 - DNA, 3000 bp, Unknown; identical to SEQ ID NO: 5104
  misc_feature (1)..( 3000): 2750-1469P.txt file - cDNA_ID_1827542; gDNA_ID_2926194; Annot_ID_141178

SEQ ID NO: 20639 - DNA, 3003 bp, Unknown
  misc_feature (1)..( 3003): 2750-1469P.txt file - cDNA_ID_1827546; gDNA_ID_1620764; Annot_ID_50089
acttgtcttcttttattttattattttccaaaaataatacttcgctttttagaattactcatactcaatgaaataaaaaacaccacttgaaatcacaaaattgatagttgaaccaaaaaaaaaaaccaaaattgatagttgccttaaaccctcattaactaataaatttttatgcatataacttatagaacacacgtctttaaagttgggatttgggaatatgtgaaaattcaatgtttgaatgatcaaataaaatttcatcatgtaccgtggttgttataagttataactcagatatattatacagctttgtcaaataatactgatgtggaaccccattaatgaaacaagaaactttttttcactttgactttctttcttatttaggcatgaccatgttcgatctgacttcttcttacaaaagcaaggttaaacaaaattttattttatgtttaaacgaacaatatctcagtcatatatattagttgttggtggtaaatcaacttacataaaactttttaatctttttgtactcagaaaaatcgaagatggggtagaaacaagtaaaacaatacgtagttagggtttattgtacgaataactctctctttttttattgtcaacaaaataatcctagattagtacaaaaaacaatatacataataggaggaaacataaggaataaaagggaatcttatataggtcattttagaaaattaataaaacaaaatatgattatatataactcctagtcaagttacagctgttaataaagacttgcagaaagtagagtttcgtagttcataagcatgggataaataccctctaacctaacaacgaacaaatcatttggtcaaaccttttaattatttggtcaaaccccacaatcttgggttgttaactagctgtaacacccaccagatatgaggcctctcgtgtatgtagacatacatgtgttttatgctactataaactcaaaaactgatattatggtcagtattatacgatttttgttctgatctcaaaataaataagtcgggagtagaatactattttctgattaaaaatcctttatctgaaacttcgttgcagatcatttctgttttttccacagtgatataaaaaaagtacacttatgaattatgtatacaaccttgtaataagggatgttcttacaaatgtagttaggttaggaaatatgacttgtttattcaacttggaaatgcttctcatcattgcagacaagcagaagatttaagatccaaccaaattatgataagtgaaacttgcacacaactcctctttctacattactccaataactatgtctatatgggaccagactatattactgtttcactaattaaacgcatataaccactacacattcattagaggcggaaacgtaaaagtaaattatgtagtagtaaattttgtaaacaaaaagaagtaatatcactagtccttaaagttacaagcatcagatcttaaatgtgtacagttgtatagtttaccaactaaccaatgtataaacagaatagtacaatctaatttccgtttcatgtgctgtaaaagaacaatgacacacgtaaaaagtgagcaaaggaatgattaagaaaccttaatggagtaggttaaattaaagacacaggttccttattatactccattttcacttaaattatgttaactttgattagagtgaaaccaattaaagtgagaagatcctgcgaccacgctcgcggactacttatgtggaccctcttttttaactaaaacttacaatggcccacaagaagtggaagtggtccatactcttttatttgcaatgatgtcaagattcctagtatcttaattatgatcgcaaatcatatctttctctctaatctcatcgtttatttctcaaagccataacaatttgctttatctaaaaaagttaagaaaaccgtatagtctagaaaccaaattaatgtcgctggtccaatgatgcatgaagaagtatgataactttggttctcattgatgtcgatgatagactaaatgcatatatatttacgtgaaaagaagtccgaattccacattagaaagtaataaatcttgattgtccataaaaaaaaaagattgattagaaattatatttcttcattaccaagtttatttggttaccagatatatcaacgatcaacaacttttcattagaaaatggggtactactaaaccacagtattaaaaaaaacattcattacataaaaatgatttctcgtgaccaaaaattgttttgtattttaacgaagctgtgtccttttagagaacatatatgatttggaagctccaagtcacacatacacacacgtagtttagagaaaaattgtttgttgacattattaacgataacaaaaatatttgaggatcatgagtggtgacaacgacgttgatttcagattggttagtattcattttcggttacatgcgaaaaaagtggtgaccacggatactacaagcttcacatagaaatatttacgcattgataatgatataatatgtaataacgtgaaatctcttagtggtattagtagaaaaatcatggtccataagccatatctatgacttgtagttacctccttttttctccaacttttttttctttctctagttatttttgagatctgacattataattttaatttcaattttgatgatagtttgaagattttttttttttttttgaatctcacattttaatttaatttgagttttgatgatatatactaaatgggcctcacgtgagggaagaagcctacccgctaattcatgtaaagtgtatctcagcacttgactttcagtctcagcgatcggagacggagaagctcatggaagctgctggcgttacaagttctcatcttctctagtcttttacatttcacctccctttcgtcggcgacccaaatccacgttttgggaattcctccctaaaaatcagaaacccttggcttttccaacatg

SEQ ID NO: 20640 - DNA, 3000 bp, Unknown; identical to SEQ ID NO: 5129
  misc_feature (1)..( 3000): 2750-1469P.txt file - cDNA_ID_1827567; gDNA_ID_1620764; Annot_ID_50083

SEQ ID NO: 20641 - DNA, 3003 bp, Unknown
  misc_feature (1)..( 3003): 2750-1469P.txt file - cDNA_ID_1827571; gDNA_ID_1620764; Annot_ID_50082
ttttttttttattaggttcctcctccgggcaaaggctcgttgtatctcagaccgttgttgttcggaagtggagcaagcttgggtgtggctgcagcatcagagtacacgtttcttgtgtttggctctcctgttcaaaactacttcaaggtcttaatcgccttgaagaggtattcttgttttctttgtagcaaagagtcttggtcttaaatttgattgcttgtataggaaggcacagcggcgttgaacctgtatgtggaggaggtgattccacgcgcttatcttggaggaactggtggtgtaaaggcaatatccaattacggtccagtaagtttaaacactcatcctatatagtttcaagtactaagcaaggtgtttcgttccaaagtaagtgttaattgttttggtgattaactgtgaaaggtgcttgaagtgatgagaagagcaaaatcaagagggttttcggatgttttgtatcttgatgcagatactgggaagaacatagaagaagtctctgctgctaatatattccttgtgaaggttaacaaacactctatttaagacaaaagtggaagggattttttttgttctaatgatgctgttgtatactaattgaagtttattgagtctttcagggcaatacaatagtgacaccagctacgagcggaacgattctcggagggatcacacgtaagagcataatcgaaatcgcccttgatcttggttacaaagttagtagttattccacgtcttttttcttctaacaccgtttccaatcttgagtcaaaaaacagagcaatactctgtttcaaaataggaatacttttgatgcatggaagttttgataagtgtgtaatggactcaggtggaagaacgaagtgttccggtagaagaactgaaggaagctgaagaagttttctgcactggaactgccgctggagttgcttctgttggaagcatcacttttaagaacacaaggtctcttcttcctctctggatacatgtatacatatgcttagaattttacatttatctgttgataaataatctgcaggactgagtacaaagttggagatgggattgttacacagcaacttcgatctattcttgtcggaatacaaactggttctatccaagacactaaagattgggttttgcagattgcctaagttactttcatatcctataaataatgttgcactctcttgatcacccatcaaaagcttttgaaatagtttttggtaaatttgtgacataaatttgtgatatatcaccacatcgtattagtattaaacatttgtttcactcttccaaagagacaaaagcaaaactaaagaccttcaacttcaaggtcaggatatgtaatctaatggtttgtctttgtggcattttgccaccattggttcaaaataccattgctgtatgatcagcctcctcagattctatttgccagactctacggcggtatattcgcttttagaaaaaaaacaattttgtcgaaacttttttttttttgtaaatattgtagattccacacacaagactgtctaagattctttgataagacacgacaaatgcgatttaagatttttcaaagaaatgaggttcgttgattgttccactaggtttggtatatttataatttgaatttttttttttaaagatatttataagaaaacgaaggagtgtgctcgcgtcaagtgtgtactaatagtcgatgacactagtgatacgacgatactggaaagggacatcaatattcattagtaagccatcttagcaaaaacgttgttatcagataagaaaagttctcagactgacgtggctgtcaatctccacaacgtgtttatctcccatttgggtagttacggacaaagacgttgaaaagacaacaatatggtctaaaagattgacatggaaagaaaattgtttatccgacaaagacctcttggtccaacgtggctttcacatcactagtttactatttcacatctcatggaaaattactgaaattagtacttgtctgtattttgttttttcgtcaagtatttgtttgtatactttaggtaattgcgtgccgaagaaacattgctaaattgatatttataccaacttacaatagtttacagttcaaaaatagaaatctccattttgaagatacaccactaattttcttcatttatttaccccataagagaacgagaaaagaacaatagtccgttgatttcgttaaaatctagtttcagaaagacacgtctagatctgtctgatcagggcagatagacacaagtgacgaagcaaaagaaacacaaaaataagataagaactcttaccactaaaagataaaaataagaaaaaaaataaaacaaattcaacgatttgccaagataaaagcagacactgtacataagctccgcattcacttacgtgttggatacttaatttgacactcttctttgtgttttctcttccaccttctttttcggtatatcattcaacaaaattctctcttcatttctttattttgttgttttttttattattattgaaatcaagagaattaaaacagaggctctgcaaaagaagatgatcaaaacaatcacatctctacgcaaaactctggttctacctcttcatttacatattcgtacggtataaactggattcttacaatctaatgatgattacttacttagagacataactcggatctcagatacaaacatgttttatgttctgttttttttgtcctgatgaaatagctacaaactttcgccaagtacaacgcacaagctgcatcggctttgcgagaagagcgtaagaaacctctttatcagtaagttctctttttcatgatccagccaggtcatatagatattttgttaccattggaaaaagctctgtttcaaatttgttgtaattgtatcatatagaaatggagatgatgtatatgcggatttggattgggataatctcgggtttggtctaaatccagctgattacatg

SEQ ID NO: 20642 - DNA, 3003 bp, Unknown
  misc_feature (1)..( 3003): 2750-1469P.txt file - cDNA_ID_1827575; gDNA_ID_1620764; Annot_ID_50080
tattgtgagcgagaaatctttgcagcgttcctctgaaactaacatcaactcgttcccagctcagttttgttaattctcttatcatctcctctgcataagtttgttgtattatgatgactagaaatcaagaataagaaacacgagaatgagttttccactgaaccaaccttccatatctaagttcttgaacctgtctgctttggtccttgaatgatcttcctcatagttacttgcagtatccggtgcttcaacattcacaatgtgaggatacttctcattgactggaccacgttgaagctgcgaaggttatatcattatatgtgagacttgattcagcataacatacacagcattatcttattaaacactgaaagtgaaaggtttaaccttaggaagctcattgtgacgccggatagacgatgtactccacccaacaaggtctaagaacaaaggaggtcaaggtttcaaatgaattgtaatagccacaacagttctgagtcttttttttaagctcaattcacattgtccgatcagtgaagaagtagagaattagtttaaagacgtccaacaaagaaaggatacggtcgaaacttgtattcgcgtaagcaatacgccgtttgaagcattgcaaagcagaactgttcacaaaagcagaggagacattagaaatcatttgaactacgcaaaagcctcaatcagctatatatagaaaaatcattgaaggaactcacatgaatttaagatctctagaatctttaaccatccggaggagtaatggaggctttccaccatcactatcagccagaaaaagatgttttcccgttttaccaagacaacccgacatacgcgtagctaatctctccaaagtgtaagatccagaaaacaatgggacctaatgcagtcaaaatgccacaccattaaccaaattgtaacttttcatgttgcaaaattccacaaactgtatcaactatcaagcttacaggagaatgaggcataaaaggatctcaactttgctgtaaacatattgacagcttcaatgtaagaaaaccgttttcaaatcacctgtttatgtcctcttgaaccaaggtgtggtgttgcagaagttataaaatacacaggctctaatccagcgattcttgctttcggttcctctatcgagcatttatcaccaatgtcgtcactattatgtggaagctcttctcgggattcttgctcataaagacgcccaatagcatacctagcaatcaggccacctaaagaatgtcctacaaaggaaatcttctgaagacttgggtgacgtttgatcaccgacctaacctaaacaaaagagattaagaatatcacttgagctggaaaactcaagcagagacaaagatagaaacttctacataaaaggttctagcattgcgaaaacatctagccaagcggaagacaatataacattagatagaaacaacgctgaaatataagcagcctaaagataagaaacacaaacctcttcagctaatctttctcccataacatcaacaccatcaaatgtctgtgtggaatggttgcgtttactgcctgcaaaatgattataaagtatcacaagccattatttaaaaactattataaaaatccagtaaagtgagatcaaaatatctaaagtgtgattctttcttccttccaataatcaatctgtttcacttgagacttccaatcacaaatttactatagaccattaggaggaaactctgttttaattgaaaaaatatagagaaagaagaactcacagtgaacgaggagatcctgaggatacttcttaagcatctgcttagcggcgaatctccaattctgagcactgtacccacacacaaaatttaaaatcagcttaaaatagaacaaaatcaagcacataacataggaaacactaagaacctgccgatgagaccgttgaccatgacgactaggtgagtcggctcagtgcgttcgccagggaaatcaacagtcaaatcgacgtttccactttcgtctgattcagctctgagacaacccatccaatactttttcttcttcttcttcgtctctttatcatcactcttcctgcttctcatcttcttcatcttctttggcttacggattccttcaagatcacttccaacacgcccatctccttctgtattcttaggaatcacgctatcttcttcctccatgatcacgaaacgaagaatgaaaaatggaaactttatgcaggtgttaattcaaggtcgccactttgggaagattcgaaggtctcgcgtaggtttttatagacttcaaacatcaaaagttcaaatggtcagagagaaacagagaatagtttcagtcgttagggaaagtccccacagaagtatttgttgtcgtcgttgaaacgccattgacattttctttcttacacatctgagatttggacactgttgctttttctagaacacaacacatgttatataaagtcattaacttgattaaatgagccaaaaatgtgatttggcataagttaaaaagcatattcagacatgatgatgataattaagattatttttatataataactttaaaagacaggcccggcccatttaatgtcaaagattggatccaagttttgcccagagaaaaggaagcttcatgaatcatgagtttgtttcttcttctggaagagtcaaacaacaattttgacttttttatcagcaaccacaacgtcgaaagcacgacatgaatcattaaaaaaaaaaaaaaaaaccgacgagatttttgtacctttcttctccgaagtgttgctgattgatgtctgttggatttctctttcttcaactaatcacctttctgtgtcctctcgcttctctcttctcttctttcccattcaaaggtgagatttttaatttgactttttttttttgggttgacccatttcgaatttttatcatctactggttaatgttgttgatttgattatatccgaatttagtacaggctaagctcatg

SEQ ID NO: 20643 - DNA, 3000 bp, Unknown
  misc_feature (1)..( 3000): 2750-1469P.txt file - cDNA_ID_1827591; gDNA_ID_1620764; Annot_ID_50075
ctatattttttcctaactgtctaattaataataacatcttatcttcaaggtattcttattttacctctctttggcgaaattaataataacaagcaaatgaaaacaatagtaaacggaagatagtaggaatcagtagtacatgcctgaatctcgatgagaatagtggtaaaagcgtatgaaaaggcaatgtctccaatcgcttgaaacaatttccaaactttttcagacgcagttacgtccacacctatcactgtccctgtcaattctgtcttaccaatcttcccacctttcatatatattgtataccattttcacggttagtgtcaactttgaagaatcatccatataaaccactatgttttaagataaagaaggggaatgtacttgctacagtagcgatggctaggcctattccgatagacgcataagagaaggacataaccgcggcgatgatggataggaaagagagcttgtggaagttaggaagctggctcagaatgatctggacgatcccaaatgccgccatgtatggataattcgatacagaacatttcgctttatgtcccttgtcatgataacaatttgatttcccaatcgctctaacgaagacgtacaaaaacaccaatcaaacaattattagtaattttattcagaacaacatgttagtataaccataacaaaataatcgaaataaatcagaatctttgacttacactaagcttatggaggcagtgatggtgtaaccaatagtgacccctacgagattcacgtactgtgccactccacatagctgaacctttttaccacctgcgttttatgttattaaagaagaaaaatgattactcttgtactactatcaaatactaccaatcttttggtcttatggcaaagtttctaaacatcccgcataattccaaattttcaacgaggggtcaacaatcgaatttataacattctttaacgggataaattgaattgactatgttaccaatcctaatcaatttaatttattaactaagttatgaaagaatgaagattatcttccttttttttatatagattttgataattaattcatatcttcccatgaaagagcatgcacacttggcaaaatcgtaaatcatttttttctaacaaccatatttttttctttcattgttcaacaacaataatgttcttcaacaaatttacatggtaaaaaattgttgaaatgagccaattatactgtagatttacaaattccaacttagcattaaatatatatttttagatcagattttttttctttcgccagccatcatcattgtgacagaaatggaagaaaatcaaaacacatgtcctaaattgagactagttaggcaaaatctaaatgatatcaaatgaacaaaatccttgttcatctgagaaaaaatgtctagaaaactgaaaaatctgtgaaaaacaatgctgataaagacacaaaatgaatttgtttatatgaatccataccaaggtaagatcggacgacgcccatgtaattatagttgcgtgttccggtgatggagtccggcgaacggtaacagtcggcgagcaaggtggacgtgtagtaagtaatgatggcgaaagcgaccaaaactgtggttcctgccacccaaccaagctgtgctatagcccaagccaacgacagcacccctgagcctatgaccgccgtgattatgtgcgcactcgccgtccaaaatgttcccgttctcttctctcgaccatcgtcgtcgacgcttttcacggcggcgtcacccgactccaccgccgagggattgttgtatgcgtccatcattgtgagagaaccactgaaccagaggagagaagagaggggaagagagttattgacagaggtcgtcttattagagtactccctcacaatcacgtacttacatgtattatatacacaaatatcgatgtttatatggaaagagcatctttgtacgttgaatcttatttattaagagaatcttctattacgaggatttatttcttttgactttgattttgaatgtgtaaccactattgcttattccggaaacaaaaattggtccgcatgttgaaaagaggatttacctacattaacgacactacgaataatcgaaattaggtaactgattaaaattagatgagtaaaacagagagatatttccttcagatcttggcctcttgcatagctatatcctctcttctatcttgctcatttatcttctcaaatcctcacatgcacatgattcattaatcgggaaattaaatcattaacattgagttataatgatgtattgatgtgaatctatatatatatattgttgtatcaactaaatattatgatatatctacaacattttgttattagtatcgcatcaaatacaaaattatgtggatttacatgtttgtattatattttactactattttaacggtttacaaaaacatgtaaaccaaaccataaatttcactaatttcaattatgtacgattttgagtcttcattacttcttatcgtttctttcactcttatagtcttatctcacaatccgtaatttgtgcacaattaatgaattcaatgttgtattttgtcgtattaaatatggattttgaccaacataaacctgattttttagtggattattttaaaatatatccacaaaatattccttcgaataaaatcccattctaactatatccataaaatgcccatcccaattgtcgagacagaatcagatatctaaaatgacacataataaatgtcgcatattacaccattaaagtacggtacgttgacctcctacctgactatgaacagctcatcagacagctccctgtgccctcaagtaggggtgtggataaattggtctggttaccggtaaaatctggagagtatacctcaagatcaggttacggggtaacatccttgacagtgctaccaacagctcaggtccgctttaactggcaagcaaacctttggaaactccacactatg

SEQ ID NO: 20644 - DNA, 3000 bp, Unknown; identical to SEQ ID NO: 5121
  misc_feature (1)..( 3000): 2750-1469P.txt file - cDNA_ID_1827594; gDNA_ID_1620764; Annot_ID_50074

SEQ ID NO: 20645 - DNA, 3000 bp, Unknown; identical to SEQ ID NO: 5137
  misc_feature (1)..( 3000): 2750-1469P.txt file - cDNA_ID_1827598; gDNA_ID_1620765; Annot_ID_50107

SEQ ID NO: 20646 - DNA, 3000 bp, Unknown; identical to SEQ ID NO: 5135
  misc_feature (1)..( 3000): 2750-1469P.txt file - cDNA_ID_1827616; gDNA_ID_1620765; Annot_ID_50101

SEQ ID NO: 20647 - DNA, 3000 bp, Unknown; identical to SEQ ID NO: 5133
  misc_feature (1)..( 3000): 2750-1469P.txt file - cDNA_ID_1827622; gDNA_ID_1620765; Annot_ID_50099

SEQ ID NO: 20648 - DNA, 3003 bp, Unknown
  misc_feature (1)..( 3003): 2750-1469P.txt file - cDNA_ID_1827655; gDNA_ID_1620766; Annot_ID_50118
ctccttcttttgtgctatttcacgattttcaatcttagggtttgtgctcagagacgtgggggagaagatgagtcaataaagttaatgaggctattgggccattatgtaaaataggcccatatattaatgggtttcgttggattagaaatcttaacttgtaggaaaaaaaaaattcacgccggcaaaagaaaagaaaaaaaaaaccttcgccgtcgtttgcttagtcttcttcgctctatcccaacactcgatcaaataatcccagtgagcttcttccattccaaggtacgaatcgataaagtcatcaaacctataccttttcaggatttaatggtaattagtcaggatctaaatcgtttcttcgaatttgatttcggtgatctagaaccctaatttggtcgggaattttcaaatcaattgatttccctgccctaatttaatttgatgattgttctgtttgcctatgaataagtttgatttcaatggcaaacaaaaaaaagagagacattgatttgaatatttttacttaggtgcattgattctgcagattgtgttaatgtgtgtcactcttaatcttctgtcttatgtttttctcagttgataaggaatttgaagaagcctttgtttaatggaaagcaaaggaagaatccatccatctcatcatcatatgaggcgtcctcttccaggtcccggtggctgtatagcgcatccggagactttcggtaatcacggtgctataccaccttctgctgctcaaggtgtgtatccttccttcaacatgttacctccacctgaagttatggagcaaaagtttgtggcacaacacggggaattacagagacttgctatagagaatcagagacttggtggaactcatggtagtttaagacaagagttagcagcagcacagcatgaaatacagatgttgcacgcgcaaattgggtcgatgaagtccgagagagagcaacggatgatgggtcttgctgagaaagttgctaaaatggagactgagcttcagaaatctgaggctgttaagttggagatgcaacaagcacgtgctgaggcacggagtcttgttgtggctagggaggagcttatgtctaaagtgcatcagttgactcaggaacttcaaaaatctcgttctgatgtgcagcaaatacctgctctgatgtctgaacttgagaatctaagacaggagtaccagcagtgcaggtaatggttgtagaatggaagtttctgatatcactggctcccgacactcttcttatagttattgagtttgtcagcttttgtatcatcctcttatgaaggttgggatgaatttgattttatctgattctggcagggcaacatatgactatgagaagaagttttataatgaccatctcgagtcacttcaggcaatggagaagaactacatgactatggctagggaagttgaaaaacttcaagcacagttgatgaacaatgcaaattcagatagaagagcaggtatattgaattatttagttagtttctgctctatttagcttcattgttccacgaacttttttcagtaatttaagagttgtatctgtcaatcaaatgaaggtggcccttatggtaacaacataaatgctgaaattgacgcttctggacatcagagtggaaacggttattatgaagatgcttttggtcctcaggttcgtgagtttctctttgctagctcgtctttttgagacccattatagttttccacattagttgatttagatgtgcttgagctatatacgttttgttacttttgcagggatatattcctcaaccagtagctggtaacgcaactggaccaaattcagttgttggcgcagctcaatacccttatcaaggagtaactcagccaggatacttccctcaaagacccggttacaactttccaagaggccctcctggttcatatgacccaacaacaaggttaccaacaggaccttacggcgctccattcccacctggaccatctaacaatactccttacgccggtacacacggaaaccctagtcgcagatgagtccaccagctaagagtacatatataaataactcaccagctacagattccttcaactgtggaattgttgcctgtttggtcccataatctttatgggtaaagagaagttggtacagtggtgaacgttgagtgctattgtttaactgattttgttgagagcttgacttttgtgagacggttttcaacaagttttgtgatacagagagatgtaacatcgggaaagaaaaaacaaagaaagagaaatttgttgtttgcccttcaccattttgtctctatgactctatgtttcactcagttaaaaagtttacaaatgaatcgaaagttaaatttatctttgtaatactgtagtttctagttttagtttacttttgaagggcccattttattttttattttattttgtgagaagggcccatttcatatatatatatatattatttattttatttttggacagaatacgagttgttttaaaaaaaaaatatttttgaaacaccgtccgataaaattattgaaattttttgatatttttaaattcccgccagactcccatctaaatttcgcttctcctttagccatttgcttccattgtcacggacctgagaaagaaggggaagagagattgaagcaaacaaagagataatcgcagcaactttgtaccaattagaccaggtaattcttctccaataaagaaattgcaatttctaaggtttcattgttcgatttctgtaaaaaggtttttgatttctcaattcaattgctgaaatttggttcagttacctcgattttaagtttagggtttaccgattctggcccatttgatacgaaagatgtaagcttttcccaatattgaatccccttggctatataggggtttaatcgcacaatttgatttagaagaaattgttgcaatccccaatttacgtttttcatttgggtctgatatttgtaggtatg

SEQ ID NO: 20649 - DNA, 3003 bp, Unknown
  misc_feature (1)..( 3003): 2750-1469P.txt file - cDNA_ID_1827663; gDNA_ID_1620766; Annot_ID_50115
atccggcccagcaaggctacgccaaaacggtatagaaataatcagtcattaactgtaaagatcctgatttaaagaaaaatcattctaatttcttgattaattttcttcatcagattaggaccagcaatataaaagggacaaaagaacaagagggcgataaatcaaacacggaaggttcgaagaaaaaaaagataccaatcaccaaaacgtgagaaagtcgaaagatgaggatgcatgttttcttatgtggttattgtggattttccaaagtaccctttgtataatattgaataatttgaatctacgttggaagaatctttcttcctctaatcttttctggatcatatttttacttattttctgcaacttttgtaccaagtatttattgtaactttccatatgttctcctattttcttaatgctcttcctttctctatcttccattcccccaaaacttttataatattacaaattttctattaaaaaaaaaacaatttccacaaaaaagttcttactctttcatttttttttttcggatctagagagtccaatttaatttcttattgtcttgacgtgtagcactccatttgtacctttatctaaagatgaacatacggtatatttaattatcttattaatattaaagatcacaaaaattactttaggagattatggttgttgcctattggcatcgcggtaataaacaatactagtataatagtaacatgagcaattagcctctaaataacattagttaagttcactagctactttctttcttattttagttaatacgaagttgcctatgttgactaacttttaattattttagttaatacgaagttgcctatgtcgtctttgttaaggaagatggtttccagtacatatactataaaattttgtgatgatacaaaatttaatatttgttagtactatctatagcaaaattttgtacgtgatagtataaattacataagcggaaaattgtactattttttggcaacacctttcgtaactaaaatggttcaaaatttaaagcggatatacaaaatttacttgaaattaaaatgtataactaaacgagaaaaataagaaaaacaaattgcttattgctcacgaactccgttagtagacaacatacatcttcaccgattcagaacagtttgtggcaaatgctattgtcatcttttgttgatcgatcagacagtatataactgatcaaatgagtgcagtctaattcagattatatcggagagaggcttcttcgtttgttttgagcttctataatggatcacatatcttcaaagcaaaaccatttcaaacatgcaaataagtttgtgttttttttccaagaggcatctactagcatatatatagaaacattatatgctctaattagttatttcgttgtttgcttcgcagttcaatccgaactaaaaccaaaaatatcaatttggtcagtttggtttgttctggttttacctaatgctgagggctactggctaggtacacttcctcaaaaatttctattttatgaattaaaaagtatggactgtatggttgaccaaatcagaggcttctgtgagggaaaaaataatcacataattaatatctatatatatggtaacagcatcataaaacaaaaccaagtttcttatcattaacgaatctactcttctcacaattccttgtttagttatttctcaactatggattcttcccccgttcaaccaggaccaggtacgttcaagctaattggtacctgatgagttaagccaaaatagtttgtatattgcttttgattatttaagattcatgtaattaccttatatgaaattaatttatcttcttcgtcatttattcagttcatggacaggatgacaaacccaaaacggtatataacctatcacatacttatgaactgttaggatccagcaactatttgctggtttttagaaagatctgagaggaaagactaatcaatttcttgattattttccttcatcagattaacaccagcaatatcaaaggggcaaatattaagaccagcaatatcaaagggacacaagacaaaggcaccaaataaatcaagcacggaactcgaaagatgatgcatgttttcttgtctaattattgtggattgaatcatttggattgggttaccaaaaaaaagagagaataatttgaattgacgttggaggaatctttcttcctcttatcgttttcttcatatttctactttttatcattttatgtaacttttgtaccagtatctattcaaatgccattgaaataaaaatatggtttcgtattccaatgttgttttactcacatatatattaagaagactttttgcccaaaaaaaaatatattaagaagacttttgttttattctaatttttttttaacatatgtagctataaagaaaaactacaaaaacttgggaaactatataaacttataggattgaatgaattttcatttattcgatgagaatcatagtatattttctttctgtttattttattaatcataatttatttaaaatagtttgacatgaagtaaacttatgagattactattaattattaaagttttttaaaattaatttagtgaaacgattgacaacgcaccctcttatgcaagtataatatataatagataaaaaaatataaaattataaatagcgcactctcttgtgtaatttttatttttctaatcccaaattgccattttttaattcgaaattctctctttgttatcagatccacatccttctccaatttgtaatttttttaaaaaaaagacttaaaaatcctacttccatagctcatttacatccgtatcacagtaagcttgtgtttccttaattttgtgtcttaaatctcataagcataaagacgaacttttacaacaatttcttttttttcttcggtatctctttgatttttttttaactattattgatgttgaaaatataaagctcataagcaattggagatg

SEQ ID NO: 20650 - DNA, 3003 bp, Unknown
  misc_feature (1)..( 3003): 2750-1469P.txt file - cDNA_ID_1827663; gDNA_ID_1620766; Annot_ID_167345
gatggtttccagtacatatactataaaattttgtgatgatacaaaatttaatatttgttagtactatctatagcaaaattttgtacgtgatagtataaattacataagcggaaaattgtactattttttggcaacacctttcgtaactaaaatggttcaaaatttaaagcggatatacaaaatttacttgaaattaaaatgtataactaaacgagaaaaataagaaaaacaaattgcttattgctcacgaactccgttagtagacaacatacatcttcaccgattcagaacagtttgtggcaaatgctattgtcatcttttgttgatcgatcagacagtatataactgatcaaatgagtgcagtctaattcagattatatcggagagaggcttcttcgtttgttttgagcttctataatggatcacatatcttcaaagcaaaaccatttcaaacatgcaaataagtttgtgttttttttccaagaggcatctactagcatatatatagaaacattatatgctctaattagttatttcgttgtttgcttcgcagttcaatccgaactaaaaccaaaaatatcaatttggtcagtttggtttgttctggttttacctaatgctgagggctactggctaggtacacttcctcaaaaatttctattttatgaattaaaaagtatggactgtatggttgaccaaatcagaggcttctgtgagggaaaaaataatcacataattaatatctatatatatggtaacagcatcataaaacaaaaccaagtttcttatcattaacgaatctactcttctcacaattccttgtttagttatttctcaactatggattcttcccccgttcaaccaggaccaggtacgttcaagctaattggtacctgatgagttaagccaaaatagtttgtatattgcttttgattatttaagattcatgtaattaccttatatgaaattaatttatcttcttcgtcatttattcagttcatggacaggatgacaaacccaaaacggtatataacctatcacatacttatgaactgttaggatccagcaactatttgctggtttttagaaagatctgagaggaaagactaatcaatttcttgattattttccttcatcagattaacaccagcaatatcaaaggggcaaatattaagaccagcaatatcaaagggacacaagacaaaggcaccaaataaatcaagcacggaactcgaaagatgatgcatgttttcttgtctaattattgtggattgaatcatttggattgggttaccaaaaaaaagagagaataatttgaattgacgttggaggaatctttcttcctcttatcgttttcttcatatttctactttttatcattttatgtaacttttgtaccagtatctattcaaatgccattgaaataaaaatatggtttcgtattccaatgttgttttactcacatatatattaagaagactttttgcccaaaaaaaaatatattaagaagacttttgttttattctaatttttttttaacatatgtagctataaagaaaaactacaaaaacttgggaaactatataaacttataggattgaatgaattttcatttattcgatgagaatcatagtatattttctttctgtttattttattaatcataatttatttaaaatagtttgacatgaagtaaacttatgagattactattaattattaaagttttttaaaattaatttagtgaaacgattgacaacgcaccctcttatgcaagtataatatataatagataaaaaaatataaaattataaatagcgcactctcttgtgtaatttttatttttctaatcccaaattgccattttttaattcgaaattctctctttgttatcagatccacatccttctccaatttgtaatttttttaaaaaaaagacttaaaaatcctacttccatagctcatttacatccgtatcacagtaagcttgtgtttccttaattttgtgtcttaaatctcataagcataaagacgaacttttacaacaatttcttttttttcttcggtatctctttgatttttttttaactattattgatgttgaaaatataaagctcataagcaattggagatgggatctcaagacccttgtatatacagagtgccaagccagttgcgtgaagtgaatccagaagcttatagacctcggatgcttctcatcggccctcttactcattccaagaaacctaaagttcatacggattcaaggtacgcagacatagcctggacgacctttgtagcctataatcaatttttttttttttgcatataatcatcttcttaacatttatttcatacaacgtatttttttttaatcgtaagaaagaaaaaaagaagaagaggacttttgttaagtttttggctgagttttaccctctttgttttgttagcaaaaaaaaaagtaaaaattctgcaatataccactttcagtttgctattgttcatatatttcgtacaaatttgtataatctatatatatgtaagtattcatctctattgttttgtggtacttttgagaatatctcaaaacataacaacgaaagtaacattaaatccggtaatgtcaggattttaattttgttccgagagctttttacgaactacattttacaatcaaattaacatttaaaccaaacaaaaacaatttgcagttatataaaacagaaaacgtaaacagattaatgagtctcttcaagaaaaagtttagtaaaatcttgattaaagtagaatccaataacatcaaaatttaacagagcttaataacatattgattgaataacaacaaattcttcataacattagaacactctgtaaatcacaaaccaataacaccactttagtctctttagctcctacttcatatcttttgtttaatgattaattacttacacaatatagatattaatgtttagatgctttattaggtatctagaatataagatg

SEQ ID NO: 20651 - DNA, 3000 bp, Unknown; identical to SEQ ID NO: 5141
  misc_feature (1)..( 3000): 2750-1469P.txt file - cDNA_ID_1827667; gDNA_ID_1620766; Annot_ID_50114

SEQ ID NO: 20652 - DNA, 3000 bp, Unknown; identical to SEQ ID NO: 5140
  misc_feature (1)..( 3000): 2750-1469P.txt file - cDNA_ID_1827671; gDNA_ID_1620766; Annot_ID_50113

SEQ ID NO: 20653 - DNA, 3000 bp, Unknown; identical to SEQ ID NO: 5139
  misc_feature (1)..( 3000): 2750-1469P.txt file - cDNA_ID_1827675; gDNA_ID_1620766; Annot_ID_50112

SEQ ID NO: 20654 - DNA, 3000 bp, Unknown; identical to SEQ ID NO: 5139
  misc_feature (1)..( 3000): 2750-1469P.txt file - cDNA_ID_1827675; gDNA_ID_1620766; Annot_ID_167340

SEQ ID NO: 20655 - DNA, 3000 bp, Unknown; identical to SEQ ID NO: 5164
  misc_feature (1)..( 3000): 2750-1469P.txt file - cDNA_ID_1827707; gDNA_ID_1620767; Annot_ID_50136

SEQ ID NO: 20656 - DNA, 3003 bp, Unknown
  misc_feature (1)..( 3003): 2750-1469P.txt file - cDNA_ID_1827714; gDNA_ID_1620767; Annot_ID_50134
attgaacaaattggatgtttggtatggaatcgagagcttgtggatgtaatgcagtttgttgctggaggagaaactctttccattcgtcttgcaagttctgagttaggtacggcattaagctgagcataaagtaattctaaaaaatttcgagtttcttcgtgatgttcttgtttgctgcagcatggtttacagttttattttatggtgcatctctcagctggaagcaatcgagtgaagattattgttgctagcattgtcagcatttctgttttcatgatcttggtttttgcctcttattggtactggagatacaaagccaaacaaaatggtgagacactgaaatgcgtagtagcccttatttctctgttttcttttcaatcagctacgttagtgtagcctttgaatgctaattttctacaatttagtactgacttggatacttgtaaatcatagattcaaatcctataccattggagacatcacaagatgcatggagggaacaactgaaaccacaagatgtaaatttctttgatatgcaaaccatattaactatcaccaataactttagcatggaaaataagcttggtcaaggtggattcggtccagtgtataaggtaaactttatcatgctttatctactctttttcttttgtcatcctctttcttgttcaccatatgactatctccaactgtggatccagggaaatctacaagatgggaaagaaatagccataaaacgcctttcgagcacctctggacagggtctagaggagttcatgaatgaaataatactcatctcgaaactccaacacagaaacttggtccgccttttgggatgttgcattgaaggagaagaaaagctattgatttatgagtttatggcgaacaaaagcctcaatacctttatctttggtcagtcccttattgtgcatatctctgcatctttccaattatattcatcatgtggaactcttgtacccttgtttatgtgtgaagctgaccaatctgtttttaatttggctagattcgacgaaaaagcttgagcttgattggcccaagcggtttgaaatcattcaaggtattgcttgcggacttctttatcttcaccgcgactcatgtcttagggttgtacaccgagatatgaaggtcagcaacatccttttagacgaggaaatgaacccaaaaatatcagattttggattggctcggatgtttcaaggaacccaacatcaagccaacactcgcagggttgttggaacgctgtatgtatctctgcctcctctatagatagataacaagcgtttacttgtttaaataatcaacctgaggaatttttgtcaaaatgaacagcggatacatgtctccagagtatgcttggacaggcatgttctctgagaaatccgacatctacgcatttggagttctgctattggaaatcataaccggcaagaggatttcaagtttcaccattggagaggaaggcaaaactcttcttgaatttgtaagccattgccctctatatcctccttgaatctgagtataaatcaaaatgtttctaataggactgtgttcatcgaatttgaaggcatgggattcttggtgcgaaagcggtggatcggatctactggaccaagatatctctagctcgggttctgaatccgaagtagcgagatgtgttcagattggtttgctctgtattcaacaacaagccggggatagacccaacattgcacaagtaatgtcaatgcttacaaccacaatggatcttccgaaaccaaaacaacccgtattcgcaatgcaagtccaagagagtgattcagagtctaagactatgtactctgtcaataatataacacaaactgctatagttggtcgataaaagcaatgatcacacatgtctacaaaagaatctcattgtaaattttagaggttttaatattcaaaaaaaggtgaccttggttattgtaaaacaacaaaacaaaaaccatttaatccttatgcacgagggatagagacagagatattacttcaacagtacggcacaaatctccaaaggcacgacgaatatttgtgttatttgagttttgacttaatcttcccaagccaatacaaatcgagagtgtggcttgtttctcacggcctttgaattcttttttatctctaaagttgttgtctttcttttatcatcaattgtgtgttgttgacattgtttctcagccaaagtttgagactttggatcgaatcacttatgcccagatgatctctgcatgattaatcacaatttctttttaaaaaattgtttagtcttgcactatttaaggtttgaccgcttctacaataagatatgcactgaatgtgttcgacgaaatgactgagtgagatttaactttcaaatattttgacttcgtgcggtttcttttttcaacagatttaccaaagagacatgttgaagcgactcgagaaagtaggtacattgaattgctcttaattgagagaactgtaagtaaactaaaatttgtgtactgtgttattattattaagctggcttatctaatagtggttttgtcattatatcactcttaggagattattcgagaaatggaaagcttatgtaacatccaggtaaattctgcaaatgggtcctgtttaattgtgttaatctctttcatggaatggaaggtgacaagtgtgaaagcttaaaagtatttttcagaggttggagaaaaagttgacttctttttagacttaatgcaattggaatgtttcaatgttttattgtttattctgtttaatattagaaaggaacatattgcattattgtaccagagagagagctgaactttgaataagtcaagttttgtgaacaaaagcttggtcaacttattaggtgtcttaagtagaagcagaccccatgaatttttatgtatatacatgaaacttgaggaagattgttctctcaattctttgagttcaccaaaataacgttttttttttgtcaacatg

SEQ ID NO: 20657 - DNA, 3003 bp, Unknown
  misc_feature (1)..( 3003): 2750-1469P.txt file - cDNA_ID_1827718; gDNA_ID_1620767; Annot_ID_50133
tcagaattgggtaaggataaaatacatttcttccgagattatgaaattcaactttctttataatgttttgtagcagcatgatttagcgtttttttatctgtttctggtgaatatctcagctggaagcagtcgaaggaagattatcgtaggcactactgtcagcctttccattttcttgatcttggtatttgctgcaattatgttgtggagatacagagcgaaacaaaatggtaagagactgagaaacttagaagctttctctctctctctctctctgttactctcttttcctctatatcgaaactgtagtaaaagacacttctatatatacacactaattagtctataatctgtcaaatcttgacgttaagcctttggttgttaaactgctacaaatcaagcaatacaacatgcacatatcttattcgtatttctgttgtctttgatactttataagatgcatggaagaatggttttgaacgacaagatgtctccggcgtcaatttctttgagatgcatacaatacgaactgccaccaataacttcagtccttcaaataaacttggtcaaggtggatttggtccagtttacaaggtatgtgaaattatgttttagttcctcaaatggaaagtttggtgttctctagataactttctgcaactttttccagggaaagttggtagatgggaaggaaataggtgttaaacgccttgctagtagttccggtcagggtacagaggagttcatgaatgaaataacactgatctcaaaattgcaacacagaaacttggttcggcttttgggatactgcatcgacggagaagagaagctactgatctatgagttcatggtgaacaaaagtctcgatatttttatatttggtatgtcttttattccatacatctctcgttattccttttccttccatcttatgagacatttttaatgtgtcactttcactaatctgttctactttattggctagatccatgtctaaagtttgagcttgattggccaaagagatttaatatcattcaaggtattgcgcgtggacttctctatctccaccgtgactcacgcctcagagttattcaccgagacctgaaggtcagcaatattcttctggacgacagaatgaatccaaaaatatcagattttggattggctcggatgttccagggaacccaatatcaagacaacactcgcagagttgtaggaactctgtaagaatctgtccacaacaacattcttaagaaaggatttatagtatagtcttatatattgacattttagtgaaactatttgatatttgaacagaggatatatgtctcccgagtatgcatgggcaggattgttctctgagaagtctgatatctatagcttcggagttctgatgttagaaatcatcagcggaaagagaatttcacggttcatctatggtgatgaaagcaaaggccttcttgcttatgtaagtgaaacaacttactgttttaacaatctaatatttcatcaaatgcagacacttccctgtttccttttctaaaacacttcttcacattctttagacatgggattcttggtgcgagaccgggggatcaaatctacttgacagagatcttactgatacatgccaagcattcgaagttgcgagatgtgttcagattggtctgctctgtgttcaacacgaagccgtcgacagacccaacactcttcaagtactatccatgcttacttcagcaacagatcttccagtaccaaaacagccaatatttgcagtgcatactctaaacgatatgccaatgttacaggctaattctcaagatttcttatctgtaaatgagatgacagaatctatgatccaaggaaggtaagcctaaggatcttgttatctcactacagaagtagtagtatatacttgtaaattcatgaacatttaaagcttaagattttgatatctcactctattttcttaagcatgtgatctcataaagccccaatattgcgttgacacgtcatcattttcggtataatattgttattaagcgtcgcaaagataaaaatatgctttttgatgacttctctggcattctcttctctgcattttataagatcatgttgatggaaagtcttcgactttggttacaagcgtcgatgcccagttggttagatttggatttctccgctatactttgtttctttgtaattaaaaaccatgttgcttcgaactttggaacgtttgggttatgcactgaatgtgttcgatgaaatgcgtgaacgagaatttaaaattcaaagttttgggcagtgggggcccaatgtttgaagccgcccatgaaaagtcatacctccactataggaaatcggagctagaactctgcactcttcttcaggtaagcttctcctaaatccaaagtctgttgctttcgatttcatatcagggtaacattctttcccaatgaattgaaaagttcttgtgttggtatttattccccaaatttgattaatctacagaggaaatagaacttttagctgcaagtaaaatgttgcaaaaacgttcttgtgctctgttactttctagaaaatggagaaagttttagctgcaagtaaaatgttttgcttttgtctttctgttactttcctagaaaatgtgttggctttatttatggttaaggcccagagatgggaatatacaaagttatcttctaaagcaacatggaatataaaactagtaaaacatttagttttttgacttctaatttggtgtcaccgtgtgattttgtgaatggaaagatgtgactctagtggtcaacgaggtctatgatttttctttccttttttatattgcggtcacgatggctttactagttattataataatataagttaggagtctccatagatataccatccaagaggtttcatattttatttgttctgttattgcattgactttataaagattcatacattcaaatccttagaagagctcttgcatatcgtatg

SEQ ID NO: 20658 - DNA, 3003 bp, Unknown
  misc_feature (1)..( 3003): 2750-1469P.txt file - cDNA_ID_1827733; gDNA_ID_1620767; Annot_ID_50128
agcaaggatctaatggacacaaggcaattttctgcagcaggagaacttctttccattcgtcttgcacgttctgagctaggtatgacttacaatataattcaaggaccttttgtatcttttgtaattatatcttccacttctttgatattgatgttttcgatagaagcatgacttattgttcaattcttatcctaaattcctcagatgtaaataagcgcaagatgaccattgttgctagtacagtgagcctgaccctattcgtgatctttggatttgctgcatttggtttctggagatgcagagtggaacataatggtaacacattgatgactttactatcgaacaatctctcactgttcatctaatcatttggttgtcaataaaattgctctgttacatttgttataagatatcgttaaataaaaaggtgttttttccactactaaattgactgacttgtatattatttttctggtacattggtttcggcctgttttaaaaactctgaatatactcacttggcactgacacacatattctaacccatattttagctcatatatcaaacgatgcatggaggaattttctgcaatcacaagacgtcccaggtttagaattttttgagatgaatgccatacaaactgccaccaataatttcagtctatcaaacaaactcggtcctggtggatttggttctgtttacaaggcgagaaacgttttatcctctttgctctttttcttttctgtcatttcttgacatgacatttgcaacttgtttcagggaaaactgcaagatggaagagaaattgcggtaaaacgtctttctagcagctctgggcagggcaaacaggagttcatgaatgaaatagtactgatatcaaaactccaacacagaaacttagtccgggttttgggatgctgcgtcgaaggaacagagaagctattgatttatgggttcttgaaaaacaaaagcctggatacttttgtctttggtgggtcacttcttacccctttcgtgtagttttcccctttatatctggaatttcttatctgatagcttgtatacttagatgcaagaaaaaagctcgaacttgattggccaaagagatttgagatcattgaaggtattgcacgtggacttctctatctccaccgtgactcacgcctcagagtaattcaccgagacctgaaggtcagcaacattcttctggatgagaaaatgaacccgaaaatatcagattttggtttggctcggatgtttcagggaacccaatatcaggaaaaaactcgcagggttgtcggaactctgtaagaaccatcccttgataacatattaaactagattggtagtcatatattaaattgggtgaaactatttgatctttgaacagaggatatatgtctcctgagtatgcatggactggcgtattctctgagaaatccgatatctacagtttcggagttctgttgttagaaatcatcagcggaaagaagatctcaagtttcagctatggcgaggagggaaaagcacttcttgcatatgttagtaagactttatgttttcatgcatttgcagaggttgcaaaaggtttgttgctttgatattcttaagagtggaaactgaaaaacaggcatgggaatgttggtgtgaaacccgagaagttaattttttggaccaagctcttgctgattctagtcacccatctgaagttggaaggtgtgtacagattggtttgctctgtgttcaacacgagcctgcagacagaccaaacacacttgagttgctgtctatgcttaccacaacatcagatcttcctctgcccaaaaaacccacatttgtagtgcacactagaaaagacgaatcaccgtcaaatgattcgatgatcactgtcaatgagatgacagagtctgtgatccaaggacgttgaaactgtagaattggaattattctctataaggatcaaaatttctaatggttgtaaaattacatcccttcctttattattcagaaactttttatctatgtggaaactgtttggtaaaattgactaaggtatattttattaggcatgattacatgattccacttcccactaaattgacaaaatactttgctcaaaaacaaatcgttgactctacttcattttaagacttcccgggagattattctcgggcctagtggcacaccaatgttgactgttgaattcttcggttcttttggacagaaacagttaagcccatatggttggagttgggaatcagtcgattagggtcattacgggtctaacgacattagcgaggctcggaggttttttttatgcactgcaagtgttcgaggaaatgtctaaacgagataaaacatagcctgcatttcaagaaagttattgtgttgtaatggtgaagcaaggattggattctttcgattgatgcagaactaataaggacttgaacaatgacaacgttgcgtatctgattgggtaaggacttcttcgtgccaatctatcatgtatgcattgtttctattattgatgcagagctaataaggacttggaattgtctcccactcattcacgttgttatttgtttagtgagcagttactttctgaacaccttttttgtgtatttaagtaaatgattgtctttgaatggaatagaagaaaatttgcagtaacttattctaaagtctttgataaccaaagtcttcttctttttgttcttgatagcattgaacaatgacaacgttgcgtatctgattgggtaaggacttattcgtgctttgacacttttgttctctattatcaaataacgcatgatttttggaacattagtaaagattattaaataacgcatgatttttgttctgtattattctcacaagtcagtccctgagttgacaaaacaaaaaatgtgcaaagagagtttttttttttttttttcttgctttctcgctttatgtaaagctaatctaaaaaagatagtttttggagagaaataacaaatatg

SEQ ID NO: 20659 - DNA, 3003 bp, Unknown
  misc_feature (1)..( 3003): 2750-1469P.txt file - cDNA_ID_1827737; gDNA_ID_1620767; Annot_ID_50127
acgaacttacgatatatcgtgaaatacaacaaatctacactaaactgacggaattttctatgttctctttggtacattggttttggctggttttaaatactcttaatatgctcatttggcactgactcacaaattctaacccaaatttcagctcatatatcagaagatgcatggaggaatgatttgcaatcacaagacgtcccaggtttagaattttttgagatgaataccatacaaactgccaccagtaatttcagtctatcaaacaaactcggacatggtggctttggttccgtttacaaggcgagaaacgttttatcctattcgctctttttcttttctgttttttctgaagatgacatttgcaacttttttcagggaaaactgcaagatggaagggaaattgcggtaaaacgcctttctagcagctctgagcagggcaaacaggagttcatgaatgaaatagtactgatatcaaaactccaacacagaaacttggtacgggttttgggatgctgtgttgaaggaaaagaaaagctattgatttatgagtttatgaaaaacaaaagccttgatacctttgtttttggtgggttacatcttgcctctttcttgtaggtttcctctggaactgcttattttatagtttttacatggtatttttgcttaggttcaagaaaaaggctcgagcttgattggccaaagagatttgatatcattcaaggtattgtgcgtggacttctctatctccaccgtgactcacgcctcagagtaattcacagagacctgaaggttagcaacattcttctggacgagaaaatgaacccgaaaatatcagattttgggttggctcggttgtttcagggaagccaatatcaggacaaaactcgcagggttgtgggaactctgtaagaaccattcttcgataacatgataaactaattcccttgtcatgatagtcatatgtgaaactatgtgatgtttgcacagaggatatatgtctccagagtatgcatggactggagtattctctgagaaatcagacatctacagcttcggagttcttctgttagaaatcatcagcggagagaagatttcaaggttcagctatggtgaggaaggaaaagcacttcttgcatatgtaagtcagcctttatgttttcttgcactttccgattttgtaaaaggtttgttgctcttgtattgttaagatctgaaaccaatgcaggtatgggaatgttggtgtgaaacccgaggagttaatctcttggaccaagctcttgatgattcttctcatccagccgaagttggaaggtgtgtccagattggtttgctctgtgttcaacatcaacctgcagacagaccaaacacacttgagttgttgtctatgcttaccacaacatcagatcttcctctgccaaaacaacccacatttgcagtgcacacaagaaatgacgaaccaccgtctaatgatttgatgatcactgtcaatgagatgacagagtctgtgatcctaggacgttgaacatcaatgtgtgatggaaaattttagaattggaattattctccaaaggatcaaattttctaatgttgctaacttcaacgtagattatttcattatgttaaaacttaaaagagaagatcacatccaaaattatgcaaaaaggcttgttcaaagagaagagagaagagttggtcatttcctaaacttccaatttggttaaccaaagattatccagttcctgtttcgtaagcatctcttgtgttttacttcgatttcccgattgatcagtgtcattcgatcacagctcaaattaagctaaagacgagaaaccataccagtgaagaagaagaaggagaagagtagaacctgatcaagcatgtcctagaaaccataccagtgaagaagaagaaggagaagagtagaacctgatcaagcatgtccttgaaaatagagatttgacatagaatcgcacctgaattctcgatctccaaatctctctatctctctctcaactctcgtgcttacgcttgttttcaaattcaaaaacataatcgttaagagttgagttgggtgggggggggggggaataatattttactgggccttatgggcttatattggccattcgtattttggaccttttaatattcgaaaatacgacccgattcggaatgtgtttggttcggtttgtatttttttgtggtccggttcagatttcgagtttggatttggagaaaagcttgtgttcgaaattctagtgttgtagaattgactgttgaagtcgtcttcttctctccggcgaaactggcacaccaatattgactgtagaattcttcggctattttggagaaaacagtcacgcccagtcgcccagatggttggagtcttggagatggaattgggcactagtggagctctgaaagttttgattatgcatttcaaatgttcggtaaaatgcctgaacgagaattaatgtagtctccaattcaagacagctgttccaatgaatcaagtaacatttaaagacgagtgttgatgtttatcatttgcagattctggaaactaagagctggcgacaagaacatgggaacatcacgggatttttaatctgcggtcaatcaatggattcagacttgtgaaagttctcgtctttcgatatggttgcagagtatcggtggctatctttcactggttctcagcgcaagaagctaaacggacatggaaatgacaatgttgcgtatttgaatgggtaaaatagttggactttgtttgttgaagttatgtaactattttgataaaattttgtttgtattcattaaatagggtttaacttgatcctgtataaagataagtgtggttgatctggtcaacattgtttataggtgcttgaaaatagttctcactaagtccctctgtgtttttgttttggctttcttactctgtttgcttcttaaaataatctgaagaagatagtttttggagaggaaaaaaaccagatg

SEQ ID NO: 20660 - DNA, 3000 bp, Unknown; identical to SEQ ID NO: 5187
  misc_feature (1)..( 3000): 2750-1469P.txt file - cDNA_ID_1827773; gDNA_ID_1620768; Annot_ID_50157

SEQ ID NO: 20661 - DNA, 3003 bp, Unknown
  misc_feature (1)..( 3003): 2750-1469P.txt file - cDNA_ID_1827785; gDNA_ID_1620768; Annot_ID_50154
aaagtagcctcctgctctaagcattctattaacttcaagaagaagtatcccatctgtgtaattcatagaaacaaaatgctgtagtcacttactatgctaaagctcaaataacattagaggagaagcaaaaagccagaaattaaccatcgcgtgtccaattaattctgcatctggaacaatgaatcatctcaaaagactggcttggatacaacaacctccgtgtggcaaagacagccaccatcgcaggaacaccacgctccaatgcaaactgtatctgattctcatgaacatcttttggtgctacagacaaggttgtcgtgttacgctgcatcaaaaacgcaccaaagctcgccacaccacagccaatgtccaaagcaacacgggtgcgtgatccaaatgtaatatcaggaatcatctgcaaatttcaatctaagagaatataagatcaacacaaaaaaaaacagattagccaatacaccaaaaaaacaggtaggaagaatcaaaaaacaaacctgggagatctggtctaagtactgatcagctccatggatgaattgagttccacctccagggaaaacaaacttatctttctctcttctaatccaattttgacctcctttatcttccactaaacgtgtatgaggcacattattgaaccatatctacaaagcacaaatcaaagttagtgactttacacttaaggcttagataaaggtaagaacttgatcacactatttcaccttgtctctgctctgtggccattggattggtttcttataaccatctggaggtggaatcaagcaatctaagctctgtttaggacaatgtctctcgtaattttctcctcgatctgtattgttcaatctctttatctcttcttcgttgtctaagcaaggaatgtaatctatcttcgtcttgtcacacaatttgagtttctcaatctgaaaaccgacttccggcgattctttttcctcaaccgacgaatttccggtggctgatttaagctcgtcgatggaatctggatcgaatccgccgatttcgaaggaatcagacatggcaccattctcgttgatgatacctgttctcaccactgtcggtggaagcggaggaggtgatattttgagacgaggacgcggtggaggagatggtgccaccgccgcgacggatgttatgttggtttgaatagcttcggtgacgtttgaagaagaggagatgggaaaaggaagagatggataagagaaggaatctgagaagtgattgaagagaaaaattgttgagattgagagaaacgcaaacgcaatcaatttaaccaatctcggagttttgacaacgtctaatccaacgtcggagagtttcatggcggtttaaaacgccggcgatctgatgatcgctacagagtaaattacaacagatcgagcaaaacagagagagaaaggtggttcctttttttctttcagagagacggcgaggaattgatgaagcagacgctgcagacgccggcgacggtggagagacgtaggagagtggaggttgagacacgtggatgtggtggtgcggaatttgatgtgaagagagtgaagggacgaaactcgacgagtcgcatgaagacaatgaaacagaagaagaaaaagaagaaagtgtacagattaagcaaaaaataaaaaaacgtattataaacctaattagtacctataattcaagtttatagcataaggtctctatttttttatgatttgcttacattcccctaatggaaataaattacaggttttggtcaagacaaatcagaaactagtgtcttttaaatgtggattttaaaactttttaatttaactgttagaagatgagattttatttatttaatgtgatggttgaggatctaaattgaatgacaagtttcagttaggtattgtgttgacttgctgactttaagagagagtatggtatatcaaccacatgctcacgtgctttaatttacagagtgcattcgtaccaataaaatatcaattcaaattttattttaaactatgatgaaaataatataaaaaacttaaaaatctttttttctataaatgaaaacctttatactagtggatgagtaatggaatttatacagaggattgtatttaataaaatgctcttagacttattgattctgctaggtaaatagagaagctcttctcatttagcaccattgctaaatggaccttttttgtgtgtggtagccttattttttgtaaaggccatgtttatgtttagaatagaattttgtaaaggccatgtttataaattaataagaggatagaagttggaaataatctcaactgggccaaaaagccttcatttcggcccatttataatactttggaatagagattagattcttaatatttgttattacatatttgagcgcgtactttaacggtacggaacaccgtatatcgtgttgggatcatgcatttatggttgctttactacttccggtgactggcgacttcgacgagctttatggtttaccgtcaaatacggtataaaaattctagggttttcttctaatcggaaaacttcctcgagaattgttgtgaatttgggttcttcgtctctacttagaagctggattcgttatttggttggctctccaacaacaaatttcaggtaagtagcgagaccaaagatttcaaatttcagtcttcttcttctgtttcctttccctctcgttacaattgggttctcaatttctaacttacatttgtttatttgttctttaaatgttggaatttcgtgaaaagacccgagcttgagtttagtggactgttttgtactactttgtgagactaggtttgattgatttggtaatttctttgtggttgaatcaaccagatctggtcgctgcaaatttcaaatgtgaagaaaagtttggtcgttggtcaatttttcttcgtttcccaagttgtttttgtttcaggatctggtagagttatatagcctgctaagttgaatatg

SEQ ID NO: 20662 - DNA, 3000 bp, Unknown; identical to SEQ ID NO: 5176
  misc_feature (1)..( 3000): 2750-1469P.txt file - cDNA_ID_1827789; gDNA_ID_1620768; Annot_ID_50153

SEQ ID NO: 20663 - DNA, 3003 bp, Unknown
  misc_feature (1)..( 3003): 2750-1469P.txt file - cDNA_ID_1827799; gDNA_ID_1620768; Annot_ID_50150
gttaataaattgtggtgttttttttgcctggtttccgaatccaatgcctatgccgaggaagattcgaccaaggattaacatgaggatgtttttggctgcagcgttaatcactcctccgaggaagaagctgacagagccaacgaggatgcttcctctcctaccgtagattctggtgacgtaagaagctccgaaagttgagattaaaccggcgaagtagagagaagaagtgaagagtgtgaggatttgattgtcgtatttgcagtaatctgtttcgtttagatgcatttgctttcttttgtagatccctgggaagaactctttcaagaaatcgtccattgatgtaacaccacctgcgtttaacaaggacgaataaacaaaaatgagcattggtcttgcataggttccttgatttacaagaaactaagcagtcgacacttaaacaaagctgaagctaactctcgtcagagagggaactgatattttcggacaaaacaggggaaatttaacaaaactgaagcaggcccttttcaaaaacaatacttggcagtttcagaatctggctatttgattggtataagataaaaccagatcgagaaagttatctaaccagagactccaagatcatagccgaaaagagagcctcccatggatccgacgatgcaagcgaagatgaagtaagaagtgatccgatgttcatagagatgagctctctttaggcctccttcatcggtaagagctccaccggccatggctttaaaatcttgaagacaaaaggaggaatattctggtctccctctttgtaataaaatttgactgagggttgtgaactagttgtgatcactatgatcaagattttagagataaataaaaaggttggatattagcagactagctgttacactttgaccatctatctttccttatccctttttctaaggatatatatatgacttcatctttcttgattattacaatgactagttggtaataattttcttgataagctatgtccttttaaagaaatttcaaatatggtgatgatctaaaaaataaagatatttagatcattttctatataaattatagtatatctcgactccatgtcatattttatccataatttaatgctagcataccattaattattttctccataaatgagaaaatacatttccctttctattgaattgtatcataactttgatattaaaaccgtcttaattacctgagttgttcagttgatctagagattttttttttttttgcacaaggtattgagaaggtgtgtccaaagttggatcgaacttgatgaatgttatttgagtgacaatgtcatcattttttggcgatctacatgacagaaaaaaaagaaagatgttgtaagagttgtttataactaccacagatacaaacaaaagaaagagagatgctaaaaggagataaacaatatttttactctttaagacatcatttatcctctgtgtcctctaccacataaacattcctttgttggcttgagggtttcttgagttagcttcaccaaatactaattttctatagcttatacctttcttcttgttactggtttcaccggcccctacattgtggtaattgttggttcatatacttttgacgcattatttggcttaattacatataagattaatagatacaaaggacatgcatttgttgaacttacatgtgtttggacataagttggtatcgtatccaatccatcatccgcattaagcttcctttgcgcatcgctcttaaacaaccatagattctacgaacctataagggatctcaacctataaactcaacgaaacatgaatgagatcagagagagagagagagagagagagagagcaatggtaataagaatacaaaaccgatttctgatacggttttgcaacgtgaaaagatcatgtgagatattttagggatttctaaactgattatctatccgcattacaaaaatgtaccgtaaaacatatatctaaatacacaccacatttacgatgtataactttacgtaatagacatgatatctacgatgagttaatttttaaaataagatgtgtttgccatttttatcaactatcaccattcacccatcaaactattattttgacaagggaaattgtcaaaagtttgaatattatacgtagctcatgataacacaccgattaaagaactcatctactttgtgatatcaatttaagagtgatccatcattttcgattagcttgaatgatagaaaatactgattgttgaattgttttaaacgagctaataataataatttctacaaagtgatcggacaaaagaataaagtccaatgaggatgagacacatcagattatttaacataacacgtcagcaaattaagggatcgaagaaaatggtttagcttgacacaaccgccaaagcaaaaaggctgaagttttcctttttaggctctttctcttccacgcggaaattaataataaaaaagatccaaactttgaagatagcgaagagcaaaaagataatctctggctcgatttttgttggagtccttgattcgagcaagtttaaagactcgagggttttcttctggataacgtaattagatactcgtgtaagtgcaatttctctctttttcttctgttttatgggtgttggtgatttagggttttgcaaaatcgttttgtttgctgggtgattaagcttgggtgatttagaaagacgaattagatcaaggaacttatttcttgttatgagtcaatttgggttttaaagattcaatttttgatcagaatataatctaattgttgtgtgttgttactcgtaatgcaggttttctgaaagggtcatcactgctattgtcatagcttgagaaaggatctatttttaatatcagtgatattggtatctatgagatttggagtagttgtttggaggaacgtgtcctcttgcttgatgtgaagattgcttcttgttgtttgctgtttcttaatg

SEQ ID NO: 20664 - DNA, 3003 bp, Unknown
  misc_feature (1)..( 3003): 2750-1469P.txt file - cDNA_ID_1827819; gDNA_ID_1620768; Annot_ID_50144
gacgaagactaactttgagaacgagagtcgatgtcttgactccatgggacttgaggaaggtatcatcgtctccgtaagaccagggtcggtttcgagaatttcataatcgcctggtaaacaacaaaagacgagacattttagggatttgggaaggagaaattaatttgattttggaccaaggcacaaaacggtgcgtattaggaaaatgagatttttagaagtccgtgttttgcaaaacgaacctttacttatcaggtatttgttattttaacccctactctaatgtttgaataaattttaaccagaaaacgaaaatcacacacagtagtacggttttacgcggtggaggaagaatcagcagcgacggtggagttggtctgagtctcaccccaatgccaaagcatactctcccagaaacagaaatcttcaaaacaagtcgtaagtctcttatctttgatcttaatcctccaatgtccgtctctgtaattcgctttctcagcttgtctccgatcccactcaagttgcgccttttgtttcgaactcagtagacaaaacctctgcaatttcttaggcatcgcgtcgtgcactctccaccaagttttgtgtgcttcatcgctcgcgaattgatggtatccaacgacattccaattgcaatcgtagtctctgaagcatacccatggtttgttgtaacctaggtaatgaagaacgtagagtatcggaggatcagctccaaatagtctcgtcttagatttcctgtgcttaggtgtgtctccttcccagaaatgcttcaagaaattcatgtgttttggaatccgatgccaccatgtgaatatctcgttaaggtaaccttggtctcctccattgtaggaattgatatcgttgatgtgatccattagtaactggaatgttgaatttgatggttcaatcaccattagaccggagttgaagagcgtaccgtcgtttccagttgtggagatttcggggtactcgaagaggaaatccatgtttctgaggataagcatgtctgcatcaatgaagatgatcttgttgtattctgtcaattcccaaagacggaatttgctgtagttccattggttatatgcatttgcttcagctttcgggtttctgattctttgaaatgtgtgaatcttccatccagctgattccaagccacttctatggtattcactgatcgaatcatcgactagtattaccaaattgcgagtagagcctgacattcgaatgctctgtgctactgcaatggctccacagacaaaagcatcatctgagtgcaagatcgtcgcgtacgcttctttcttggcatttgccgagtagaaattatctgcaattgaatcataatcagcttaggaggagagaatagagatgtcaaatttagctgatacaaaagacgaagaaacttactactgagtcactgacctttagcttgaagaggaacagaaagttcacaggaaccaacaggaagttgtaacttttgtcttaactggtgaagtttaggcttatacagccatatgtttccttgacgggcaacaagttcttgacccgtaaaaagattcggtattggaaagcaatctgataccaaaatcacatgaacatcatgaagcccttcagaagatgccgccactcgagctgctgcaagttgtaagtgcaatctagccacatctcttgaccattttcctgacttgttacatgggagcttggcaatgataagatcgattcgagacttgtcaggaacttgaatccaaggaagagaaggacaagtggggactttgaatttttcttcctcgtcaatccattccgggtataaagatttccaagttatgttacttgcagcatggtctagatgcaaagctatatgctgacagtgagattttatgaccacctgccatcgattaatctcgttatcgttgagatttagaaagccaattccttgatactcgcttctgccagataagtaatgctcaacaacaagtgacatactgttccagttgatctcagatgtagctatatagcgaggatctgtggttacagcaggttctagtatccatttgtttgcaaaacttgatggatcttcaggaatttgcaacggtggagaacagtagagtgtgaacatagcaaccagcatcataagaaacaaaacaagtttcagactagagaagttgacacacatttcaacatcgagagtgtatccgtttctttggaatctcttcgtttttgttttctcactatatatgtaaaacaaatgcactatgtcaagccaacagatgaatacagatctctgtaatgcacatactcaaccacattgctctcatgatctatgatcctatctgattcccctaagttaggtaaagtagtttccattgaactcaagaaactgatgaagtagaagagaaaaagacttacctggaaatgtaaagtcgatgacttgactgacttgacggcgccatgggactttcagaagagagcttcattctcactgtaagaatattaagtttgactttcctgagtgagagactacatgaagctggatgcatcgagcattacaataatcacacgtttttgacgctaatccaaattatattatattagcggacggatcggaacaaaatcaacacgatgggtcaatgttaagtttgaatttttttgcggaaaaatcctgatctattagatgtttcctttgtaaaaccctgatgttttattacttaataaataaaccctcaaattaggttcagttaatcaaaaattaagtttgtgttgaaaagaggaataaccaataaaatatagggtttgttttgcaaaaacacttttcttcgtatgagtcgacgagtctggggaccttttagttttctcgattaaggaaaggaagatctgaaagtgaacgcgaaatcacttcgccagcgttattgttaacaagaatcatcagattagtcgccgtagatctgaatcaacgtcgtaacagtagcagaattttgcggtgaaacgatg

SEQ ID NO: 20665 - DNA, 581 bp, Unknown
  misc_feature (1)..( 581): 2750-1469P.txt file - cDNA_ID_1827827; gDNA_ID_1620769; Annot_ID_50188
ttctaagtgcaggtctatatgtgggtgcattcgggccttatggcaccgagatagtgcaacttaagcgtaagtatggtcggtgggatgatgcagaaggaagtaactcctcagatatagagttctttgaatatgttgaggctgtaaagttgacaggggatccaaatgtgccggctggccaggttattatcttttttttaattgtattcaaatcatgacatttttgtatgaggtgaacaatctaagatagggtcacaaattgttggtaggtgacattccgtgcaaggattgggaatgggagtcgcatgacgaatcatggattgtttccagaggaattgggagtggtaatgataactttcctcatctcctgagcttcagtttaaaaaacagacccaaaacataagcatgctcagacatgtaaatcaataaaagatcaagaaccataagcttaagctaaacactttaccagaaaaagattaaaaacaatctaatctcctattgaaacaattgcttagacatttcatgggttccagccacattgacatttgaatgaacagcttatccagaagttgtttacatatatg

SEQ ID NO: 20666 - DNA, 3003 bp, Unknown
  misc_feature (1)..( 3003): 2750-1469P.txt file - cDNA_ID_1827838; gDNA_ID_1620769; Annot_ID_50184
tttgtccattattccgtgtttaaagtaatttacattctcttttaagatctctcagtccaaagacaatgcaaacaataataatttctccacttgtttctcatcgtctctgtcttgctcgtgctgttccttgcaaccgtcttctcaacaaccaccaccgtgctcctccttcgatccgcctctcaaaccaccgttcaaccacctcactccgcctcttctcctccgccggtagaccccaccaccttctatttcccttttaaactttttgtttccttttgaaaaagatattttgcttgcgtggggcaattccgtcaaagcgttaccattcgggataaattggtcattttttcatcactgtgtctctctattgagtctttagggtctctctgtgtttgcaaatctgacgccgagtattttgctaaagcagcagccagtcgggacagtgaaatggcgactgaagatgtgcaagatcccagaatcgctaagattgcctcttccattagagtcatccccgacttccctaaaccaggtctccattttttccatttataccgattaatatcgtctctagtcttgatctgcgttgggatcttaaggttttaatttggatacttggcaggaatcatgtttcaggacataacgacgcttcttctcgacactgaggcctttaaggatactattgctttgtttgttgatagatacaaagataaaggcatatctgttgttgcaggtaacaactcgtatggttctgtttggtactccaatcgattaacagcttgtggatttagtttcttttggcctttttagatactgagtgctttagcttaaactgaaaagttgaaatgaattggtggatgatttttggttctgcctaaattgatgttgtggtaaatgcaggtgttgaagctagaggtttcatttttggccctcctattgcgttggctattggtgccaaatttgttcccatgaggaagcccaagaagctacctggtacatttttatttcttcctctagttgcttgtgattttgacattaagttacatgaaaggtctcaattaggaagttgttagtttaaatggcttcttgctccaagtctacactttatcattatctcgaacattagcaaggtgacttttatcttgcagtgtctttgatcaatatgatgctactcatttgctagatcatttttctttgtggtaacttgcagtaacttaagtggttgttattttttctgttacatatcaatggacttagttgtgtatcttgaccagttacaagaaatgtattaagccatttggaaacttatgagcagtgtcaaataattgtcgcattccttgtttatccatggacgttaatttctaaactgcctctgcatttggttcctttaacagggaaggttatttcggaggagtattcgttggagtatggaacagatacgattgagatgcacgtaggtgcagtagagcctggtgagcgtgctattattattgatgacctcattgccacgggtgggactctcgctgctgcaatccgactacttggtaagtccaagatttgataatgcagcatatgcagttcagttaaacttgactatttctcactcccacaattggttggttttgcagaacgagtaggagtgaagattgttgaatgtgcttgcgtaattgagttaccagagcttaaggtttagcttatttatctctgttttactatctgcttccaatctcttacactgatttgcttataaagagatatgtgggctgcaatggttttgtagggaaaggagaaactaggagagacgtcgctatttgttcttgtaaagtcggctgcttaacaagaaactggaagagaaggttattggatcgagtgttgatgctatttttcatgtatggtgagacattttgcgtgggatttgatccttgttgtttcaacttatcataattggttcagactagaaaatggcatttgaatgtcaggattcgattgcagtttcctattgttccacttaaaatccccgattaataaggtgttatgggttttatttatagaatcaagttgtaatagtagactccaacaggggctaaagtcttggtaacgcaattcttcttttaagtttcgcagcaccttgctcgttacttctcttctcaactcgtaaggacacaaatcacaatgctcgtccatgtcccatgctgatgagtataatttgacaataagcttaggaaggtaacaaatctataaacttaggtaagatcctcgtttgcgtagtaaaaacgaataattacatatttgatttaatctctttttctctctcgtttttgggcaaacattacttctctctttcctcaaaattattacttcatgttgttacgtttccatacagatgtatacaataattattacagtagggtattttgggaatgtttgaaacatgctatagttgaaaacagatataaatgtgggacctaagacaaaaattcaaattatcttaaattaaaaaataaaaataaacaaaaagaaaatcacagcgtggttgctgctggcttgttgcttacattgacatgaacaagacacacagtgcaaaatgacaaagagcccttcatcgatttcgaatcttctctctgagtaaatcaatttcacaaattcgaggtttttggtttttagcttactacactactccaagaagaaaatctcaagttaaagtcatttcctatcaaatctcttttcatggcggctgctattctcgtttctcctgttcgctaaattgcgtcattttcatgtaagcttctttcattttgcttaccaaagctcgttttcactatgctttagcaacaacattattgtagaggttaaaggcagcaaaatctataggttaaggatttcttgtggttaatttctgaaattcatgtttctgtgtgttttcttagtgaagcttattataaaagcggcgtagatctgtgattctactcattgcatttccgcgtttgtgaggagaaagaggagaagatg

SEQ ID NO: 20667 - DNA, 3003 bp, Unknown; identical to SEQ ID NO: 20666
  misc_feature (1)..( 3003): 2750-1469P.txt file - cDNA_ID_1827838; gDNA_ID_1620769; Annot_ID_167440

SEQ ID NO: 20668 - DNA, 3000 bp, Unknown
  misc_feature (1)..( 3000): 2750-1469P.txt file - cDNA_ID_1827842; gDNA_ID_1620769; Annot_ID_50181
atacaataaaagaagcacatatacatcaagatctacctattaagataacaattaagcattcctcattaggaagttaggttatatataaggttagctaagatcaaattgttttagaatctgctgactggaacttctctctttgtatagaggtgcaagagcagcggtgtgggagaacttcaagaacaaccctttgtttgacatctcaacagatcacccgacaacatactacgaagacatgcagagagccatcttctgtctatgtcctctaggatgggctccatggagccctaggttagttgaagcagttgtgtttgggtgcattccagttatcatagcagacgacatagtactgcctttcgcagacgccatcccctgggaagaaataggagtctttgttgcggaaaaagacgtccctgaactagacacgatcctaacctcaataccaacagaagtgatcctcagaaaacagagactcctcgcaaatccttcgatgaaacgagccatgcttttccctcaacctgcacaaccaggggatgcattccatcagatacttaacgggctagctcggaagttaccccacgacaaaagcatatacttgaagacaggtgagaaggcactgaactggactgctggtccggttgctgacctgaaaccttggtaaagtcagaaagagaggaatctttttgtatatcttgggtttcacctagagcatacgttgttgcctttctatagcacttcaaaaacattagaagtccaagtcctccgagtggattttttttgtagataacattagtacatttactcgaggtacatgtaccaagtttgttgtacattttctcttcgattgatcatataatactgtacactccttttgtcttggctaactccaatcatgtaagtttcaatgtccaataacctgaaaagttatgaaaacatgtggtaattaattttgttgtgaatcaaattagaatccttattaaaaaagaaaattatttattcaaaaaaagctcgtagatgaaatgggcctaaagtctactaaatgggctgattgaaggaaaaactcgaactaatctaagatctttgctcttgagagagaacgagagaggcggccatgggaggaggaatgggtgcgttttggggaactcgagtgatggaattagtgaagaagcacgattccggtggtcttctttggaagcggatcaagctaacccctactcgtaaagccaatgccaaaacccgcctccgtcgtgtttggcaggtactctcctattccatttttagggtttatgggtttttgagagaacatttctcttttcgtagtctagatcctcttatctgcgttcacttccctacaattacccgccaaggatagattaggattgaatgtattgatggatttttcgtgttgaaagtattgatggattcatttcaagatcatcagtttcgattgcaaaatgttgttcagtctattgtgatgtgctctccttaggtctgagtagatgtaatgagttaggacaaggccaactgtgtagtttgttcttggtatatggcctttaggcttctatgtatctttctgtggaactaggaacagagtaggaacacttggaattcatttttcccggtttggtgtttggtatcatgcaaaggttgtccatctctcaatatgcttgtgttattttcgagctattttgggctatcttgtgcatcacagtgtgttatacattttttggtaaagcttgtcgatctaccaagatgtatgtggtgattttgagctcataccacctaggaatttataaatattataagacccaaccctcctatatattcttcgacgcaagtattgttttaatagttatgagagtctcttgcagaatgaggctgttctaagggcgtgtggtgaatcagatgcaccaaatccgccgggagctagcaacacaaaaagctctagcaatgcggtgaaaaatgcgtaaggccgaagagaagctagtcctagtttgtaaggactcgtagatcaagtctctgtcgttacctgattttacaaaaataatatttgaaccttgtgtttggttattagttttgcaaaagaagaggcacctccacaccaaagcaaaatatggtatttgagtattggtgtttttttttttattattcttgtcatcaagaaatttgttcgtcgcctgctcaatatagttcttttggctacacccgtttatccttgtcgtgccttagttatgttggccgtttagtggctacaagtggatatgtttgtggaacatttttgaaaatcacttgaagcactcttttgtttttgtttctccggttgatcgaaaaaaagtttttgttttctccgtgatttttttcctccgtaattacatgttgaaacaacaggtgaaaataatcttgttgaaaagtttcaagtatttttaaaccatcagtaaataatttttttattcagttaccacttttaatatattccttctcaatgtatactatcaaagtgaaaaaaataccactattatactcattagacctttaatgaaacttttgataaaatatttaaattggaacaaaacagtaaaaggaaaataatactggaaaattaaaatgaatacattagatgtttgaatagaaagtatagcattaataaataaacaatgataaattaaataaaagaaaacctggggttgacaaaaaaaaaaatgaaagaaaaaacaaaaaactgggcaaagtcggatcggtgttgttaaacaagcaaagccctccttagcctttccttcctcttgctccttcactcactctcgatctcgacgcgaaatagctttctctcttccaaaggcaattatcgaaaacctgcaaaaagtttctccgccaagtctctccaaaacccctttctcatctctacttttcttcttcttcttcttcttctactgcgctcgctcctcgctcctccgtctccgtcttcaacgtaatctcgaagtcggttgtttcaatcctgccatg

SEQ ID NO: 20669 - DNA, 3003 bp, Unknown; identical to SEQ ID NO: 15536
  misc_feature (1)..( 3003): 2750-1469P.txt file - cDNA_ID_1827854; gDNA_ID_1620769; Annot_ID_50178

SEQ ID NO: 20670 - DNA, 3000 bp, Unknown
  misc_feature (1)..( 3000): 2750-1469P.txt file - cDNA_ID_1827856; gDNA_ID_1620769; Annot_ID_50177
tgagaagcaattatatcagcaacctgcaagtaaaggagatgaggaatataacaaagagaaacatgattcagggtttaaggcttttggattagggtttaggtcgaaccaattgaacagcgactagacgggaaggaaaactgtaaattggattgcagtaagtgttatccagatagagaatgtcgactggaaactcgtcaatagcagcaacgagagtggttctagcttcgtctgatgcatcagaatcccaccggaagtctccagtgtagagaaaacatccgaaatctccccggaacaaaaacattatggatcctaccacattataccagcaaattcaaatttcaccactgagaaagcgaagccttatatagaaatagattagacttttatcataccaggacagtggtgagcatcgatggccatgagatggaggcggactgtggagccggaggaaggagagcggagggagagagatgtccaggaaaagagagggacgacgcgaagcaaggagaggtcgaaacctgggaaacgggagggaaatagagaggcggtggtgcgggaacagtagagaggaccttgggaccatccgccggagaggccacgagtgtgatcggagtgtatatgagtcaagaagtaggcttgacttccatttctccatcgatccactgatatcagaccactctccatttcggattccttgaaaattgaaattgcaggtgttttgcagtttcaccatttttgtttgcccacttagtgacgatgattccttccgtcttttgggccgtttatgatgatttatgattgggtctgttttgggttttacaaacgaatgaaagtgttacttgctcttacgtaacataacatttcgaactttctcgagttcaaaactaatccatccgttttatcagactgtgtagtcgatgtattggtcattatattaatgagcgttatgaacaaactgggcgacgatttaacaagtcttaactaatccatctctaaaacatatttcaagattttactatgagttattcatctatcaataccaaggataaagagagattctttcagcaatccaaaaaccgataatcatcatacttaaaaattgagtattggtcttatagagagaagctaacaaaaagtattaagggtaacacaagtgagcacaaatagactgtctatgttatagcttaagatgaggctcctttctttgactttgctgccaactgtgtctccggctgtgcaagaacccaacaaaaattatgtgagatcagtgatgaagatgaaatataagtatttgaagatattcagagaggcgttgggatcattaaattacctctttcttcacaggctcttctttctctgacaaaatcaactcaatgtggcatgggtttgacatgtaagctgcataagatagaattaaatcgagagtcagcacaatgtgaatgaagaaacaaacgttgtaaaaacagtcgaatagaaaagaagacatacgattgattcttccatgagcacgatatgtccttctcctctgttttgctgcttggttcacttggatgtgagaaatgaaaagggcatcgacatccaaacctttgacctgataaccaaatggtttacaaaaagttttagtaactaactaaaatcaccatggcaacaaaacaaaaagagtcgtaaaaccaacctcagcattgctctcagcattcttgagaagatcaagaacgaattgagcagatttagcaggccagcgaccttgtccgttcgaatgcctgttctttgcctgagcggtacgaccaacaccacgacagaaacgggtgaaggggatagcttgcttgtgagctatgacatcttccaagtaccttttggccttgttcaatggtagcttccttatggcgtgcgctgtttctctagtgttctgtttcatacaaattcaattcaaaaacacaattagacacatccaaatcatcaacaatgaaactagaatgacaacaatactgttcagtgtgattatttacctaatggcacagtaacatttagcacctcaaacctaatgtaaatgatttggtgtattgcaaattattgaacgactacatctatacaaacccagatactacaatcatgacctaatcaacaatactgaaaattgaaaaaggattcagagctaagctaaaatgtaccatcatgtactgaaccatatgctattagaagtaacattggctcacccattcacaatgaccaattcgattttcctgacatttacgtgaggtctgttatataaaacagaaccctgctttttgttaatcaggttttattcaaactacaagcttaatccccataggaaaatcacttaatctaattcatttttgagatccggaatcagtacaagaaatttaccttgaagtggaccctgagatcggctcctctcgccttgcaagctgcaaacgcaaaaccaatcgaaaccatttcaatgaatactcattgcatagcttgaggtaagccaataacagtgtagcttgaagcaaaaaataacagagactatgaaagtgttcttacatttggtgatattatcgggctcttgagagtacttcacctgaagaaaaacaataagaagacgaagaacataagtataggagcataagttagaagtgaaaacgttgtaacgacgagtctagtgtaacgcatttaccatggcggccaatgagaagaacagaggacggagaggatagagatctcagtagttggagacacttaatatatagtgaaacagaagaaaccctaatcggcgaatacattagttgaactagtgtattaaagtactatttgttcatatgggccttctgggccacttatcttgataagtaggcttaaaaagcccaattatgtgctggtaacacccgacttgtaggctaaaaccctcggaacttgtttcacatcgagacaactctttagacttttctcagtaacaaaaacaccgaaccctagattttctttcacctgaatctgaagatg

SEQ ID NO: 20671 - DNA, 3000 bp, Unknown
  misc_feature (1)..( 3000): 2750-1469P.txt file - cDNA_ID_1827860; gDNA_ID_1620769; Annot_ID_50175
agatgatttcgtgtgcgattcacttgctaactttgattaaaatgattagattagattcacttgctaactttaattaaaatgcttgcacaaatgggcctagtgaaagactctaataaccccaaagcgaatggtaacagaagacaaaaacctatgggcataactgtctttaccttatccctcgccaacgccagaaattttataaataaccaaacgcagcgttgtgtctttttttcgttcgactcatctccaaagagaagcttcaaaaaatggcttgcaaaacgattttgcgttccgttttcgtatcggaatcacgacggacttccggcgcacgtagatgcttctttctccctccttctccagcatcagttccagtccatggtttgttcccggcgccaaagagtctatgtttcaatggttttgcatctgttcccgagcgggctactcggcttaattgcagccataacgatcaatccgatcaaggtccgcctcaagaagctgttctcaaggcaatctcaggtgcgcgccttcgttaatttcttcctagtatctcaaatttttgtggttttgttcgtttggccgaaatggatttgattatcggatgcttggatccttggtgaataggagacggagtttttagattcgattgacgtactagtatttcccggccattagtcggaagttaaaaactgttccgttgtgtcaatttaactcttcctacacttgtagtgattcactaggaatttagattattttagagttactaattaagctggaatggtgaaagagacagatgatgttaattcacgagtgctagtttattggtacttttgtttcccttgtttcattcattttgctggtgggatgcagaagtgtcaaagactgatgggagggttgggaaaactactaacatgattattggaggcactgtggctgatgattctgctaaagattggctcgaacttgaccaaaaggtatcccattccgatattttattcttgtttggtcaatttctagtagagttgctgttcactttgcgttcaaatactatgtgttggtatttatgaagccccttgtcgatttggaatgcattcagtatgtgaaatttaagaaggagatggatattggctgactcaaagctggtgttttacttgccaggtcaatacatacccaacagaaagagggtttactgcaattgggactggtggcaatgactttgtgcatgctatggttgttgctgttgaatctgttattgaccgacaaattccagaggtaatatttcgtcctcttaaaagtatctagatgatttaccggcttatactatctttttttgatacgatatttgctagtgtcttctatacaatattttggctactggcttgataattacaaacagaacatgtatacaagtgcactacttggctttctttacttttgttctcttgctttggtctatactttgtcttctgcagtatagctgctaaatgtttattctgtcatattgttatgtttggatgtgaactatttattttatcaaataatcaaataagagtatatttctatgtagtgtctttcaagcaatattcttataccgagaacacgagtatcctactaatgttgcaaatatgtttttcctccattttaggactgtgtaaagcagactttatcaagcaaaggaaaatatgtgtcggtgaatattggccctatccaagtcgtctctagtgagcaggtttttcccttttccctccttccctctctctcccacacacatacacatatgaaaatccatatgggtttataggcacaagaagcatagagaatcaaaccttatttacagagaggatgtgagaaagttaggagttgaaaattaatgtgatgagaatttgtgttgtttggtttgacaggttcaagctgtgtataatgcaatgaggagagacgaaagaatgaaatacttcttgtaggtttgaagtgtgtagaatcacgggtcttctcttttctatcttctccattgcgactatgtaaattatgcagtgtaaggccaccattaattattatttatacttatctacactaacttctgttagacactccttagacagtgtcttatgcatctgaaggaattagtggatatatcaaaaaatgacttatacgcagatgatagttagataaagcttaatatttgttttaggtgggatgggaaaatcccttcgtatttctctgaagtagagttggagttggttctaagattaatacccagagagttgtaacttcttttacaagtgaggggccagggtcaagaaaaagaatagcttaatgagtgatgaactcttggactataatctaatcttggttagatatagaaacatataagtatcatactatcaatttattataatctggttaggagcataacgaggttataacactaatttttgtgtcggtttgatctagcgcggtttgttatcgttttgctgcttttgcagcaaggttcttgaattttgcggataatcctaagtgtgtatttcacaaaagatgaaaagttgttttaaactgagtactgtagatggaacgatgtctctctgtgtcgtgggagggtggctcacagagctacttagtctaattatggtattgattaaaatacaaagatggagattattgggtaaggagaaaaaagtggaaggtgtggggatttatcttgaatcttttaatcttgcaattaggttaagtggcactgttggccaactaaaagcaaccccaagtatactcaataatgacactcataatctctttctccctctgtctattcctttattgggttaggaattacaaaattcttcaaggagataatgatactaacttgcttacaaagttataaaacatacacgacattgcaatataaaccctaccaaaatccctacttttccatcatttcattcactcacacacgcataacatatttgtagcatccatacataaatacatacatttcgagggaaagagatg

SEQ ID NO: 20672 - DNA, 3000 bp, Unknown
  misc_feature (1)..( 3000): 2750-1469P.txt file - cDNA_ID_1827864; gDNA_ID_1620769; Annot_ID_50174
gaaaccaaaccaactcatcaagagtaccttcttgctcacatttcttttgttctatatccttgcttcttctctctttttctttctgaatagtctttttctctgatctggttttctaaggaagagaagaaagtcatgagaatggatcatttgaaaaagaatacacaaagatggacagaaacggtgctaatatgttagatggtatctctacaaaattattcgaggcttcaagagtttctctcacttttttattcgtgtatgtgcctttttgtactgtcttttatttctgaatgatcgttttatcctttttggtttttataaggaagagtagaaagtgatgcaaagggctcatttagaaaggattacacaaagatggagaacaacaacaacggtgctaatatctcagatggtatctacagaattattcgcagcttcaagagtttctcgcactttttcatacgtatgtcccttattctactctctttttttcgtattgtgatcacaacatttcgtaatagtaagtaaagttgtgtttattaatcttttttggattctcaatgttcctccaatttactatagggacaattagctgaatagcctttttgataacttaatttgtctttatagcatgtcttcatttctcattcagtaacttacatgcacttttaaaaactgtaaaaccattcttacttgtgaattggcgttaatttagaatttcctataacaataatatgttccagtgaataacaaatattttagaatttttttacacaactatagaaattttcaatatttccttaaacctgtacattgttgttcatcttccacattgacaattggtcagtttatacatacgaagaaacatggtcacagtagtaatagattcatcatttatgtagtgatgatactaatactatatgatgaccaggttacgaagaggagacgaaagagagagaagcggagatggagataggatttccaacggacgtgaagcacttgagccacatcggagttgatggaaccatgaccactttcgacaacacctcctcatcttttccattctccggtttccatctcaccggcaccgtcgtctgattttcgcatcttctagtactaaatcaactacatatgacattttctttcaatagtttcataattagtcataagatcatcttatttggttgcaagtacgtacatacatacctcaaaattcaataatcaatctcattcctttaactattcagttttggtaagtttttgttactcatcatctttcacgaactcgttaccgttttacttaaatgaaataattcttagatttttttttccgttcttgtagattttctaggtaaaaaaataatctcatttgctctagatatgttacaaaacattttctatcaaatcatttttctatctacaagaagaagaagaagaaaaatactaattaataaatgaatatttgtctactattagaaaacttttatctgcagtaaactacttcaaaattatttgatgtcatgtaatctacttcaaaatttacgccaaaagaacacgaaatttacatgcgctgtaacaaaaaagttacccaatcatgaaagcaagaatcgaagagaaaaattatttaaaaagcaaaaagaaaacagtaagaaaaaggaaagggaataatggaacaaaaatgaaaaaaaattggaaggatgaaattaatcgaaagcagctcatccgattcccctgaggcgattatggtgtctcctccttctcactctcgctcttagtagtagtctttcttctccgatcgccgactaacctccggagctttcttcggcggtctctcctctctgttttctacttgaggtttctctcttctcttactttttttattctttgtgcatatctctcttctcttactttactcaccaaatttctaggaatactttttctcctgagatttgggcttttaatttagcttaattcttctgttaagtagaaatatatcatggcgaatctatgaaattatttcttctgttaagtagacattgaaatttgttacaatggcgaatcgtgttttttttttggtctgtctccattttttggtattgtctctaagaaaataagacgtttgtggtatttagtttattaggcgaattggatttgttgaagcatggataacttgtatcttaatcccttggggttagttagatgaattgaatggtcgagggaccattttgctttttcatgggaaaccctggctgaggggaccgtgattgggatcgaaacctaacttgctgtctcattttgttagttcaatctttattgctggagatagatccctttcattggcttagcttggtgccgttttctttgacatatacttaattcaatatgtgtgtatctgtagactcaatagtaagctttagattaaccctttatttcatttaaaccttagctaagaactttctgcaagtacaaagaaggaatgggtagggaagggtttgcaattatgatggctatagggttttaattgacttgttgaagtcgtgttctttaacaagttgttgattttctgggcaatctgatttgaggagtgtgggaccagttggaataaatgccacttagtttttgtgtgatggagagcacaagagggagctaagaaaagtaataccctttctcttgccctttttgttggtctgggtgaaacatagcaaggtttctcttgctgaggttattgataaacgggtgagttaaataaaaacgttgatcagcagtgtgtggtgcttggaattcataaggtttttcttctttcttatgcttttggtagttaatggtattgtctattaggtatctgtttgggttgccagcgttatttataggcttgacaagttttctcttatttttgatgtttggctttcatttacaatcactagttctgcaaacttatggttgtttcagtttttgttactctggcttttggtgataggtctatgaaatcaacccacatcttgaatg

SEQ ID NO: 20673 - DNA, 3000 bp, Unknown; identical to SEQ ID NO: 20672
  misc_feature (1)..( 3000): 2750-1469P.txt file - cDNA_ID_1827864; gDNA_ID_1620769; Annot_ID_167430

SEQ ID NO: 20674 - DNA, 3003 bp, Unknown
  misc_feature (1)..( 3003): 2750-1469P.txt file - cDNA_ID_1827870; gDNA_ID_1620769; Annot_ID_50169
cgtgattcacaacacaagagatgcatacgtagctcattacaagtaggtcaagttgacagaaattcatcccactttgctctatacatacattccacaagtttgatgttcatacaaatatgataacaaaacacaattagtaccttgatatgaagaactaaaatgacaaaaacatctcttatcgaacaaatctagtaaagagcgttcaacactaaaaagagaaaacaatgtcttacggcagatgatacaaacactgcaagcatctcaaactatttagagttgagacaatttaatcaagaaggtggcatatctacaactacaacaagatcacatatgagcatagttgaaaaaaactagcagaatcatggcaaagcagtttcccaatactacattcacgaagtgcaaggagatagaagctccacaagacaaaatctaaatgacacaagattacatctactgatctacgcaatcatttgggggaaacctcttttatctccaaccttatcacagatctatcactaaatgcatcagggagggtctaaaatttcgagacaattccagatcattgaagcttttagtgacctaatacacacatcaatctacagagcagtaaggataaaaaccctatcgtacatgatcaacagcgaggaatacaaaggaaacactaaaaatcgaagtgatctaaacccaagggaaagagataaggcaaaaaaaaacctggctgaacttgagagcgtgttgttcaccagcgagctgaagattgccggagacaaagacgagcataccaccggcgggaccagaaggctgacaatcgacggtggtgatgttgtgcttacactgctggaaagggaggccggtgagcttagcgacgatgttctgagagccctggatcttctggccttcgaaggtcaacatggatccttcttggtatagagaaaccaaccctggacgatttgcatcgaaggtggagtagtagtgctcaacgaaagcctttgcaacagcgtctggatccatctctttcttcgtcttcctttttgatccttagctcttgcgtcgtgctttttcaacaggcgagagaggatcgagagggttagataatttactgaaaaattatacgaatggaccaagactagagatactgaaatgagtgtttgacgatactttaaatgggccttatatttttcaagttgggcccgttaatatatgggacaatcaacagtatagctcaattggtaaattgactaacttcatttgattcctacaccatttaaagatttttaatcaaattctgatataactaagataatattttaaagcatttaactaacatggaaaattatgaaatgaaatattaattttggatagaaaatttaaaacatttatctttgtgaaataaaaagaaagtctcttataatataacttgtaaagtaatcctttaaattctaaaagatctaaaacaaaatgagttaaatcctatgtctatgtgttgaatctggaagatcgaggtggaagaaaaaggatcatgattcatgggtgagagaacaaccgttgattggtgtgtttcaactttcaagcaatcccattttaaaaaaataaatttatgtaagcaattgcaaacaaaatgaaatgattatgctttaagatatcgacacgtgtaaaacagatgacgtaccaagaaaataaatgattctgtattttgttttagccatttgttttttctttaaaggaaagtgtatgttgaaattgaaaaaacaaaccgagttatatatatagagttatttgactaaagaaggaagctttggttaaactaacttgtataattcttttgtgtagtttagttttgataaaatggccaaacaattttggtcactttaccaactactgcaaaaaaaccattttcataataataaattgtaacacgccttttatttttattattggagggtgagaactgagaccatatatgcctttgttcccttcttgtgggtccctttagcctttttttttcttttgcctgcgccgtttagtgttttttcttttatatataaatagaggtaagttattttaccaatcatttggtgttattaatagtagtattaatgaggttctaaacttgtttataaaaatcagatcttactaaacaaactcaaagaatctcaactatgaacatttttcttctagaatcgagttttaacatcatcatcagcaggatataattttttgtgtttgaattttatctgtattttttttaggagtacataagcagcttaagattaaaatatatattaatggaagtatgaatgaaaaaagaaaagaaagataatcagataatagagagagagagagagagaaggaagcagacatttgtcttccaccatattcttctcatcttttccgatgatagattcttcttcttcttcttcttctactactacttctgctcctctttcttaagtttctccatttgataattcactcaagtctccagctcctcttcttcttctcgttgctttattcgctctctttcactcatcatcatcacactcaaagatttctgttgtattggagcaagctctagcgaattttcgtactccccttgtagaattttagtttcctgttttagatttcgaggaatctcgctttggaaactttaagctcctgttcaaagtttctacctttgtttattttgtttttgttttcttctctcttatctttcgtcatctttgattaagtaaccactttgatctctcaatttcagcctttgggttgtctaatctgacacgttcctctgtcttagctttccttttctcttctcgtttgtgggaagcctacaaggattaattattaaatacccaaccccaaaaaattcttcctttttgattctctgattcgtccctttttgtacatggtttctgtttggttgttagagcttcttgctgagttgaattgagctggttgcaatcactctgtttcttgggggttgatcgtgtattcaagtggtggatg

SEQ ID NO: 20675 - DNA, 3003 bp, Unknown
  misc_feature (1)..( 3003): 2750-1469P.txt file - cDNA_ID_1827874; gDNA_ID_1620769; Annot_ID_50167
aagaatgaagcatctagcattggactatcattttattcgcgacaatgtgagtgccggtgcactacgagtctctcacatatcaacacatgaccaacttgccgatgctctaaccaagccattgcctcgtcaacactttcttcagttttcaagcaagattggagtgagcaaactccctccatcttgagggggcatgtagagtatataagtaaaggatagtttagtaaatcattaatccctaattcattctaatgtagtccctatatatattgtaattatatcatctaatgaattattcagccttcaatactatagtttgatcatgtgcttactttcccttcatttgcgatacttcaaggttcttgctgccactgtttctttgaatgcgtcacatgtttgaacatgtgtgttctttttggatcgaagcttagctctttagatggaactgaataagtaaaagaggtcactggataagctctgttactagaataataggagggcttctgcttcacatttgtaatcctctctctttctctgaattgatgttgcaattgcttgtcatcagtatctgtatttccatagataactgaactcattaaagggcaaccgaagctgcttcgtggtttatgtttcttctttgtgggctattttgctttgcactttcacttgtttcttagttttggtttgatttttcatactgggccctgagcaaaacaattttagttatatgacttgtgaaacttaaatgggttttaatcgaatggtaacttcatctaatttgtttgaataattcatcatggaccttaatgataatatcttgagtctactaatcatttcacaaatcctttcattttccaacagcaagtagcctgatttttgaacctcagcgatagacagcttaaagtgcggtcattctcgcaaaaagctatcagtctttatttgattcacgaacattatacacgaaagtcaaaattaaataaccaaaaaaattaaacaaaaagcaaacaagaaaacgacttctctggtatgattggaacaaatttaatagagagagaggttagataagaatgtggtagaagataagacccaactacgcgtcataactgggtcccatctttgtctctttcccttcttcactcgccaaccccatcgcgtgtccccacgctccttccctttactttttctcgttatccaaaacacgacgattcttcattttagatttttttcattaataaaaaaaaaaaagtcttttattgcagaaatttcgatcgtttttgttgtgtgtacagagagattatcgtgttttgttggcaatcgccattaaaccttcttccctctaacccaatcaaatttgcggctctttcttttatcttctcgcctcggttttagcaaaccctttagttatcttcttcctcaagcaatttttcttttggattagattggtgttttcttttggtttgtgtggtgatgatgagaaggcaacgagatgaacaacaatctagggttttctacgatctatcatctcttgttttgaatcttctccgttctcctcctatgccgatttctttacctgatcatttccccgatccgcccgctagaattcgtcctcccttttcttcgcatcgtttttcgtcttcttcgccttctttggctcatatttctccgtctggattcgcgtcgttgctgcttggtatatctgtggctcttatgctatgtggatctgtgactttcttcatcgggtttctcttgatgccttgggttcttgctctgattttggttttctatgtcgctggcatcgtttctgccatttctatggtcgggaggtcgattctctgttacgtcttgacgccaccttctccttccggaaaggagatttctggtaattttgttgaattttagggttaagtttgtcaaattggtttcaatgattcaagctttctactttcgtctcggatctgtttagattttaaccaaagtttccttattgatcatctagaaatgattccactgggttttggttctgtccttattttgatagaaatggaggttcgaattagggttttattgaaaagcacaccgatgtttgttctgtctttgactgaaacgatattgttcttttgtttcctcgtggatcatattattcatgttcacattacttttgttgtctgaaattaaacctatgtttgtattagtttcatgttcttgcaataatgtttgtgtttgacatgtctattcgcagaatggaagcttctgtgaaatgattaaacaacagaggtgaagaatctatacatcatccggaagcagagcagagcgaagcagaacaaaaaaaagaagaagaaggattgattatataaacacatatatccgatagagtttttctatgttctttatctgtattttgttgggggggtttgggaaaatcatgtggatatcagggagttttatatttctttacatttcgaaaaaagaatttttctatttaactactgttagaaatagagaagccttgttatttgtgctttcatgtatgtcgtttttatgtaacatgatcatttcttaaagcatacaaaaagattttaggatttctgttgcacttctttcgatttccttgcattttcgaaacactctgtgttgatatctcttcctttaaatcttcttacaatatttgctcattcttgatctcttttatggttttaaataattgtctcttcaagttcacacggaatctagtgtgaatcgaggtttagtcgtgcagagttgtgtgtgttattacatgttttattattgtttaagtatatttatttagtggaggactatacgctatttgcacatctcaatgtcaaattgctcaaaaatggtagaggtgccgtgccgtcaatagatgtcacgtgtcctgacttgccttctcaatacaaacaaaaatactctctacctaaaaaaacacaataaacaacaaacgcatctttggagcggcggtgagattagagaagaagggtttgtgaaatg

SEQ ID NO: 20676 - DNA, 3003 bp, Unknown; identical to SEQ ID NO: 20675
  misc_feature (1)..( 3003): 2750-1469P.txt file - cDNA_ID_1827874; gDNA_ID_1620769; Annot_ID_167421

SEQ ID NO: 20677 - DNA, 3003 bp, Unknown
  misc_feature (1)..( 3003): 2750-1469P.txt file - cDNA_ID_1827914; gDNA_ID_2684237; Annot_ID_192467
atgagtcacctacaacatgaatctgtgcaagacacgttgtgacgatatacatctataaaaacatattattaaattgtagttacgaaatatacccaacattgcatgctgattgttacatttgttttaccctcctctgttttataaaacctcaaaacagactcttcacaaaagcttccacattcttgtccgaagatcctccttctctacccgcttcagtcgctaaacgcttccatttctctgcgttttccctcagctccaccgatttcgcctccatcactgcttccaaacaccgcattatctctcctctctctactaaaccttccgagttctctctcaccctcacacctgtcttccatatttcttccaaaagcttcgcatttgctggctgatccgaccacatcggaaacgccaccactggaacgccgagaaccaaactctccagtgatgagctccacccacaatgagtcaaaaaacaacctatggctcggtgtctcaaaacctctatctgcgaacaccacgagacaatcatcccaacctcttcaagctcgtgtctaaaaccagctatcttctcaatctctgtctcttcttctccttctattttcgcttctctgttgagtttatcagttataacccacaagaacggtcttcccccttctatgagtgctctcgctagttcctctatctgtttcttcgacaactcaaccattgttccaaaagaaacataaataacagaggactctgttttcgagtctaaccaaagtgtataactactactttgatgatctcttgataaatctttacctgattcgcttccagtgaaaatctccgcaggaagtaaaggaccaactgccaccatttctatattcggaatagctgttaagaactctggctccagcgaatcgaatgtgttgacgagaattttcgggttagattcttctttgagaaaatccatcagttcttgatatactgcttgtgcggctttgttcgtgttggaaggtgagaggaaagaaggcagatcgcggatttcgagagaaggtagattcgggaactcgaaaacggagttgtttcctgtagagtaattgtaataaatgtcgaaagcgaaggctggttggatccagagatgaacagagggaagatgaaatctacgcgccacttttggaacccagttgggaagaatcgtgtagatcaagcaacttacgggagagtcaccattctgattagcttcgatgaaatccgatagagctttatcgccattacgttcgaagtgtaccaaccggttttggacgtcgtcggtgttggagatgactccgtcgtcgaatccgtcggagaaagtaaggaaagagagattttcgacgttgttgtggtttgggatcatagagcggtgaatgacagagagacacgtggcgaaagttacacgtgcgccagttgttttgatgagccgacgagcaaaacggagagatgggttcacgtgaccttgcgccggaaacgttaccagtagaaaatgcggttgcgccattttttgaagtgactttcttaatacgtacgaggtgtgtctcctcgtggatttgtgctgttatatgtatataaatggaaaatatattagatgagagtaatgggatttcatttggggtcatgtgacatgagataacatgttttaccgcttttggcgtgatccacgacgtacgccatgatggagatcataataagtatcatgctgaatatactatataatttatttataaaaaaaatagaacgaaagaaaaagtatcatgctgtcaaaaagaaaaaaaatatcatatttttatagagaaaaaactcgaaaaatatctgtttaatatctatagttgtttgaataatatctaaattaattttatgtttttaaatgcttttttaattcaaacattcaaattcatgattattatattttaacggatgttctaactgtggttgaaatttaactcatgatattcacgaaatgtataatctattttctaaagtttacaaatatattagtgtaatctaatggttaaatgtggattgattctcttcataaatctaagttcgaatcccccttctttcctaattaatccaaatttattaagatagtcaatccctctttgtcctaattaatccaaatttactaagatagttagtcaatccacgtttaaccaccatactaacctaatatatttgtaaagtttagagaatagatagtatatatatttataaataccatgagttaaattttaattatagttagaacctccattaagtaccaaaatttaaataaacgaaagcttttaaatttgggaaaatttaataatatatgtattaaatggacaaataaaagttagatgagagtttttttaaattttttattataaaataatttttttgcatgaaattgtttttaagataaaattttgacataaccaaatattattttccgccacgaattgagtctacgagagatgtcctgtctttaaactcgtaaagttttggtcttacccaacccaatacccacaaaggtaaacgacataacggttaataatattctaaccggtttataagtttacataaatcatttactaatccgcgtgtaattaagttttatgaaatgtggttattttgtaggtcacgtgaaatttattaattttttagtacttgtttttcttttttgggttcaactagttacttttttcctttgacatcaaaattattgtagacgagtggtccatatatagatggtgaaatgaaatgaatattgagtaataaataaatatagaaagtgaacaaaaaaaattagtggaaaaggtaactggaaagaaaaggcttattggcttggcaagattccataagtttatttcaccaaaaaggaaagagtacttggccttgctctctctctcttttaaaatggtaaactggtaaagataggagactcaatttctagttcatcaaaacatatttggcgttattatttctgtggtcacttgaataataatg

SEQ ID NO: 20678 - DNA, 3003 bp, Unknown; identical to SEQ ID NO: 20677
  misc_feature (1)..( 3003): 2750-1469P.txt file - cDNA_ID_1827914; gDNA_ID_1620807; Annot_ID_168896

SEQ ID NO: 20679 - DNA, 3003 bp, Unknown; identical to SEQ ID NO: 20677
  misc_feature (1)..( 3003): 2750-1469P.txt file - cDNA_ID_1827914; gDNA_ID_2684237; Annot_ID_137739

SEQ ID NO: 20680 - DNA, 3000 bp, Unknown; identical to SEQ ID NO: 5641
  misc_feature (1)..( 3000): 2750-1469P.txt file - cDNA_ID_1827922; gDNA_ID_2684237; Annot_ID_192465

SEQ ID NO: 20681 - DNA, 3000 bp, Unknown; identical to SEQ ID NO: 5641
  misc_feature (1)..( 3000): 2750-1469P.txt file - cDNA_ID_1827922; gDNA_ID_1620807; Annot_ID_168894

SEQ ID NO: 20682 - DNA, 3000 bp, Unknown; identical to SEQ ID NO: 14979
  misc_feature (1)..( 3000): 2750-1469P.txt file - cDNA_ID_1827922; gDNA_ID_2684237; Annot_ID_137737

SEQ ID NO: 20683 - DNA, 3000 bp, Unknown; identical to SEQ ID NO: 5643
  misc_feature (1)..( 3000): 2750-1469P.txt file - cDNA_ID_1827934; gDNA_ID_2684237; Annot_ID_192461

SEQ ID NO: 20684 - DNA, 3000 bp, Unknown; identical to SEQ ID NO: 5643
  misc_feature (1)..( 3000): 2750-1469P.txt file - cDNA_ID_1827934; gDNA_ID_1620807; Annot_ID_168890

SEQ ID NO: 20685 - DNA, 3000 bp, Unknown; identical to SEQ ID NO: 14978
  misc_feature (1)..( 3000): 2750-1469P.txt file - cDNA_ID_1827934; gDNA_ID_2684237; Annot_ID_137734

SEQ ID NO: 20686 - DNA, 3003 bp, Unknown
  misc_feature (1)..( 3003): 2750-1469P.txt file - cDNA_ID_1828025; gDNA_ID_1620773; Annot_ID_50219
attttcttttcgggacattttgaaaaataactcagatttctgttgaattttgcttctttttgtaaataatcaaaataacatgtaaaagatataatatgagataaaaattaaagtttaaaaaacattaccataactaataatttgagtaatttagaaaaaaaaaaattaccacaactattcttgatataatatgagtaaaaaacttcgaaacgagaagattgaaaatttaaattttatttttcgaattctagctaattggttctatttttttggggatatttaaaggtctatttgagacaattattcatatatttaaataatattaaaaatggaaaattttgggacatacgtaacgacatacttgttacattaagttaaacatattaaaaacaagattattatttgacagaaaaaacgggtattgtatatgacaaaaactcggatgaatacgagataagatagtttctgttctttaccggacatacctaatctttttgtttgataattttcaaaaccaacgcacagaagaacataccttcgagtcttctatattggtcaagtcttgggaatcaaacaaacgcaaaacagagttggattacataccttgctcttaacgatatatagtttatagatatgatagtatttattagctttttccatgtcgggataagactgttcatcgaaggaaagttacgaatttgaagatgtataatactccaaaccttcgaagctatgcacatcccattcaggcgccattaacatatcaaaattagcctcatgcacgtttgttttggtttcttcgtcgtcactggtatcttcgctctcatcagcttccacagattcgatttcttccatcaacttgctcaacttttcttctatcatcgtcacgtttgcacactgattgaggaccatgatgatcgactaaaccctaatcctctatctgaaatcccaaaatcctaagatgtaattctctagaccgagcgatggtatttaaattaccttattatcctagaaacatgtgaaatttaacataattgtcatccaatttggtctttcaaaaaaaaattcttttttttgctcagttaaaaaaaaaagttcaacaatatatgttccaaagacaaaaagattcacgcattttcatgattttagagttcttagaattttttgttataaaaggtttgcagacattaatttttttccccaaattagagtttttagttgaggtattagaattctttttatcaagaaaggtacttataaaaataagtatcagtgtgtgaaatccactacttcaatgttggaatgttacaccttcctcaagaaggaatttgagtaagaaagaagttgtgtaacccattattatatgatcttatcttcgcaaaacatgcctcttcaactagttgatgtagttttaagctactaaaataataaccgggtaacttaaatagtgaaaactgataacaaacttaataggatatgtaaatcacttggttattggtccatgtgttgaaattgtgtggcaatgaacccacaaacggataacaaatcatgattttcaatatctcaaatgagaagttgtgggacgatccattctagatactaaatgctgtcatcaagaaaaattatctaaccacaaacaaaaaaaattgagccaatgcatcatgaacttcttcattctactactaacaattgattttctaaattaactttacatttacattcgggagtgactcaagataatctagatcaaaattccctaaataatctaaaaatcaagaaccttaatatgagtcaaaatctcttctaataagcagaaaataagctaaaacagcacaaaaagcagcaacaacattgccttctttcaaaagaaccttaaacacaaatccgacaacttctctcgtaatcttccttccttcaaccactaaaactcttcttgatttcccaaagaaggcaagcaacaccaccaccgatatccaaatcaccatcaccgccggaaccgccaccgtcatagcagccaccatcgacatagctccaaacatcgcaccgagcaccaccgacgcgtataccgccggtaatcttgaaggagaataatctgaatttgatgacgtgtattgaagcttgtaccagttaagaactgatctcaggaggttccatgaagaagatacgagaattgcgtagacagcgatgaagagacaaacccatgtccgtcttttactcatgattgtgatgaagatatgatacgatcttggagattctgtttgatctgccattagagattggaagttcttgcttatcgatcgaatctgttttgagatttgtctgcgactgagcaaaataaaatagagcagtttatgagaatccttacactcagtcgtagcgcgtgtcgtgtacgcttctttgtgaatttgtttttgagctggcaatcgcgtggttatggttcacacgcgctttaatatatttttttttgtgaaatatgaaaaacatttggtcgaatttgtgagataatgaaatggtaattggaaagattgtgactgcattgtttttaataattaagtaaatttaaattctgtggaagtatatttaatcaataaactggaaaaacaaaagaaaagatttcgttaccataacgatttaaatttaagattttgttatacagaaaaagaaatgtagaagatttttttctaatttagaggagtcaaacaatgatatataacaaaaaaaatcacaatccggtggatttgtggggtaagtcattaatcttttactattttgtttggaaaaattagtagtcaatatcattatgactacatatatcagtgtcaaagactcaaagtaatggcttagatattttatgttaataaaaggaatatatatactgtgaaaaagacaagtttgtgtaagggatcgcatataatctcaactaatacaataaacaaagatatagccgttggcattaatcagctttggctagaccaaccagaagatcagaatcttgagaagatg

SEQ ID NO: 20687 - DNA, 3003 bp, Unknown; identical to SEQ ID NO: 20686
  misc_feature (1)..( 3003): 2750-1469P.txt file - cDNA_ID_1828025; gDNA_ID_2926216; Annot_ID_142227

SEQ ID NO: 20688 - DNA, 3000 bp, Unknown
  misc_feature (1)..( 3000): 2750-1469P.txt file - cDNA_ID_1828050; gDNA_ID_1620774; Annot_ID_50246
cagacggacgatttgaggctcctatatgtaatggatcactatatcgaaagtatctccccctcaagaccctactcaagagagagtttggtacccagataagacgctaccgttatttagctaaaagagctagattaaattcttctagcgttctaaagtcaagatcgccctcaaagtgtggattacaaagcttatctcatacaatccagtggataccattactattttcattagttttttaccagaaatttgcaataacactattcaactttgagcaaatagccttaaaaaatagaatgcacaacataacatatgtcggaagggcttgtgctatagattttataagaacctctttaccttctttggacaagaatttggctgaccaagtattaagtcttgaaacttatctctcacaaataagaaaatttgggtttaaaataggaaaaaacttgggttttaggtaggagaaaacttgaccaagtatcgaccactgttctcataataaatgtaggagactgcaaacaacaaaaacagtggcaactaattaattgggcaggactaggaggcaaatccacaagtctttaaaaagcaattcctttaggtaggcactgaaaaagcaaacctttttttttttcttctttccggttggtccactgttatataaagcttggttggttcttgacttggttgtcaaaatcctaaatcccaaataaacaaacagagaaaaaagggagaaatatttaacaacagtaggagtctacaagtccacggcttgatcaatttgttcttcatctatttccttattctcagggaaatccagggtttttgaattcgtactctctctctcgttgtccctctcaaatcagaaaagtatctgccttttttaaaattcattccccttcgatctttgctttttcatcgctgattgttcttaaaaggaatctctactttttcaataagcattaacattgtccgtttcctcatctttggttcttcgattctcttaaagaggattttatacttgattctgttgaagccctttttctggggttttgtctgcgtttgtttccttcttctaatccagaattaaaactagctctctgcgctcaaagttttaagttttattcaaagaggtgtaagcaaattctccaattgatgatcaactgtttaaaagactcaatacatgttttgatgagtgttttgctttgtaagatccagtgtcccttttttctgtttcatctggaagccatttatatgtggcaagttagctgaagttgaaaactgttgtttcagccactagtgatgatgatgatgatcatgaagagattctcgaacatgtggatggtcttacgaatgctgaggatagagaagaagtagatgcaaaggaagaagaaggtcaaattgttggggacactctcactctcaaaagtagtcttcgaaaggttgattcaaattcaacagaagctgagaagagggagaagaagaaggtacaatgggtggatgtgattgggaaggaacttgctgagattcgagaatttgaacctaggttggtcttctattgttgagaatataagaatgagtttggtcataaggattttttctgatggcatcagatttgttttggtttcttttcattaagaatgagttctttaagttttcataagtacttgttttgtggagaatgatgtgattctttcatttttgcagtgatgaagatgatattgattctgatcgaggcaaaacctgtgtttgtattatcctgtgatccgtccacttaagtttaactgggagatttaaggcaaaagacaaagttggtggcttcagcattaaattccatatacatggaggtacatatagaatctgcatttgtgttctatagccattcttaagtttgcacgcttgaagccatatgatgatgattcctgatttaacacggaagcattctttttcttcttctttagaagtgtttaaagtataggtctttaacttcattcgttgcttcaatcatttaatgaagttctttctcattcagattgtggagcaagtttcaaatataacaattgctatgcatcgatatctagttctgcgatttagttcaaatgactttgatatcagtgtgtttgatcaatgtctaagtgacagcttacttcaatttgagagaaaactattgcttgttgtctttcacgcagccattgtttacatttatagtaagaatttctgtatagatattgctcttggtgtgttagcataattctgtcaaactcgaatcaaatgttatcactattatatttgggtgcaaaaacagcaagtttgatagtgcagactatatctcaaggcttaggctttggagcacttctgttttcaatttcttccactttaccagaggctcagtgaattccatcaagaatgtgaatagatctgtggtccacaagtatgtaattgaaagaagtttgtagcacccaagaactggtttaagactcatctgttccaaaactcaccgctcaatctgttaggagcaagaggtgattcattcttgatttggatctcagtatctttcctgagttattgtttgcgggcgacataagaatcatgaaactagaatctcctctgtttctttagagagccaatgacacttgctctgaacgttaccacttctgtcatgttgccttgtcttcttgtagaactggtcatattgagtcaaaactcaattgtttgtgtaataaacgaatccaactgaagggagatgcgaatttatgaagaagaaaaaaaggatcaaactaaaggtaccattacaatatgacacgtggcgaaacaccaagactgaagcatagccactaaaatcatgcaaacttgtgtaatccgaaactttgaagcttttgcgaaaaaccaaccaacgtcacataatcgtcttcttcaactaacaaaatccaactaatcatcatctgtctctctggctctggcttgtgtctgagctcgaacttaaagaaaaagaatctcaccatg

SEQ ID NO: 20689 - DNA, 3000 bp, Unknown; identical to SEQ ID NO: 5229
  misc_feature (1)..( 3000): 2750-1469P.txt file - cDNA_ID_1828053; gDNA_ID_1620774; Annot_ID_50244

SEQ ID NO: 20690 - DNA, 3003 bp, Unknown
  misc_feature (1)..( 3003): 2750-1469P.txt file - cDNA_ID_1828065; gDNA_ID_1620774; Annot_ID_50239
gtgaatatcttgccaacatagtctcacccggaaagacctttcgcagattcttcctcagaattcgacacatgagaattcatcatcaccagaatctcactggtcaagatattcttactccaaaattttagagcatgtatgctttccatagtgagaatttccgtcgtatctttcttattcgatgcatgcatcaacactgcaccaataacatatgactctgatattactcgttgggctggaaacattcaccacaatcttatcagtcagttttaaccttaaaaactcgataaatcaagaacacttgaatcggaaagcaaaaaaaaaaacagaactagaagaaactttcatgtattgttgtttgttttatcaaactcaaatcataatttgaatgtcttttgaatctgaattttgtggaactaaaacgttttagactttgatgcaactagaaaatataacaatgcatgcaaaacacttttacaagtttggtccctccatttgaacaactagaacaaaacttttaaagaaactctagaacacatttgattaatactaacaagcgtgggaagtaagaaactaatttgaggcatttgtacataccatattgtaataactccttagtgttgttatttgtctcactgcctgggattgttgttggtgaggaacagtgttgataatggcccattattaatgggtcgcaacttgcaagacatatgggtcttcactattaagactctgcaacattaaatacatttctcgtggggttcatcctaatatgcatattggtgtatgtatctgtgcctgcatgatttaatgaccagcaaaaaacagtaatggtcaaagtaaataacatgatgggagaaggtgaaaaaagagtttaaacctcggaagagttaatactggtaaaactctgggtctttcttcaacgttctcaattattacaactttacaagtactacaaacattttcgataaagacaacaatacacacacttcttcaagttatgtaacaatccacatttgaaagcaaaccttacaatatgtaacacatcaacgattttcacactataaatataaaactaaacttaccttcaatgtgttaacaaggacaggatccgagttctgatttgaagaaacatctgaagacaataactgtaaacagaagagagtactaagtaaaggagcagtagaaatcacagtagccaatgttcatgacatctaaatattagcaagaaagatgctcttaacgccagttgatttagataaattgaatagtcaactcataatgatacataaactcttacctctctgccaatgaacacgagtgcaacatcaacaggttgctgaagttttttctccgagcactaaacaatggagacaataaaatagatatgagaatgaaaccattgcattgtgtaaaaatatttgcttgcggactcaacgcgaacataccagaaaattagaccaacctcctagagtgaaaacagagtctactagatcctttgcagacatgacttgataatttacatccgtttcaccattagcatacctacaatttcatcaatgtggacatcaatataagcacaattccaacaaaagttctcaaactcttacaccaaaaccagagtacaataaaatttggtaaatttactcacataagccttgaaaatggtgaaaacaaggatcaacaaaaagataaaaagaggcaggcctaactggagatgcggagaccagaggaaagcaggaactgtggaaggtgaagctaatccaaaatccacgagagacgcaaactcaagaactaccaacaactacgccagtagagcagaggtaaaacgtcaccgtttgctataatttacccacaaaaccgatgtaggagaaccggtctgcgtttaacggttggattagctaagagaaccggtctgataatctcttgttaacggtctttgtagaggatgtgaactttatctaagtgtgttcaaaggcttcatattttgagactttatattttgattttcaacttggatacactagctagatgaaaacaatgatgatcctcttctctgccttttacgtgcgctttattattctgtgctagatgcaaagaacaatatcccctagcaatgaatcttttttaggatatacataagacagtacgtattgataataattaatggcaagcttcatcaaacagcaatgaagaaggtactcatccaatgcaaatcttgtcatccttgtatcgtcctttgtaggtgaatcatcattaggctgcagaacactgttttcacagagagcgtgttcagtttgatggactaaaactgaccttatattatatatcaagctcaatctgctggtctcacgaaaaactcgtctctctattgtacttaaacccttaccactaaatcccctgaatgtcttttactatttcttaactcttgaactactggaattcaatttgagctcatttcttattaccatgttcatttggagatacgatagagttagtttatcaactaaacaagatcacacgattgatcaactaaacaagaaatataaaaccaaaaagacaaagaaaaagagttgagatcggaaagaaggagaacgacgatcaagcctcacgatatttatgttccttcgagacctttggtataagcgaatcacatcttgtgcggcagaaatattgtaaatagtctgaatttcaaaataaattactatatatatatcacaatacatgtcggtctggtttagtaaagagaaccggtcgctgaatctggttcagctaaaagaaccggtctggtgtgtcagataagggccaattgggccattaacacattacggcccatataaatttaaattaacaaaccatgaaccgtcgtcggctcatcggaccagtgtggtatcaccggcacttgtaatcagagagactcactctcgagtttcgtcctctctacttcccgctcaaaatccttcggattcagccattgaaacaaccttgagaagagtttgaaagatg

SEQ ID NO: 20691 - DNA, 3000 bp, Unknown; identical to SEQ ID NO: 5225
  misc_feature (1)..( 3000): 2750-1469P.txt file - cDNA_ID_1828079; gDNA_ID_1620774; Annot_ID_50235

SEQ ID NO: 20692 - DNA, 3000 bp, Unknown; identical to SEQ ID NO: 5225
  misc_feature (1)..( 3000): 2750-1469P.txt file - cDNA_ID_1828079; gDNA_ID_1620774; Annot_ID_167617

SEQ ID NO: 20693 - DNA, 3000 bp, Unknown; identical to SEQ ID NO: 5270
  misc_feature (1)..( 3000): 2750-1469P.txt file - cDNA_ID_1828083; gDNA_ID_1620775; Annot_ID_50282

SEQ ID NO: 20694 - DNA, 3000 bp, Unknown; identical to SEQ ID NO: 5270
  misc_feature (1)..( 3000): 2750-1469P.txt file - cDNA_ID_1828083; gDNA_ID_2926205; Annot_ID_141708

SEQ ID NO: 20695 - DNA, 3003 bp, Unknown
  misc_feature (1)..( 3003): 2750-1469P.txt file - cDNA_ID_1828107; gDNA_ID_1620775; Annot_ID_50273
atagccctcttagtaaacgccattctccaatatgcatcatataaattaacgcaaacaatgaatctggacgtctaatgtcactttcgtcagagtaaatgggtcgcagtattagaggaatttgaaaaacaattgtgttaagcgtcaccatcacccatacaacaatttaggcatgccatcataaaatttggacagatattgggcttttggttaaattaaatgggctgaggtactgaactaaagtttattaacctaaacttgtacaaatattgggcctttggtttgtttaaatgggtctaaggttcagaaccaaatttggggctttatcattctgattaacaagacaccggcgtgtagtgagcttgtatcagctgcagagtttctctcccgattgacaaagtcgattgagcagtagggtagctttagcatccaataacgtatatcgcaaagaagaggtccaagcaagcgatgatcctcgtcattgttgagtaacgttacaaggtctctgttatcggtttcgaaccaaacataacgcaatccgtgaatccatatcacttgtaaggcatggagaaacccgagaacctccgcgtgtagtgagcttgttgatggatgtagtttcgcacttccacataggattgtatggccgttactctctcgtattatccaaccggaacgtgtataaggacttccttgcataaacccactatcgaagttacatttgcataaacccatatcgaagttacatttaacccagccaacagggggaggttccaactgactgcttcgatttcgtattgagggttgtatatcacttggtgcagcattctcatttgtattttcctagggctcattcacgttaagccactcctctgcttcttgaatacctttcttcgcttcacagtctggagatcgacttttttgttgaaataaaaactcatttcttgatttccagagtcgccacatgatccaaaacggaagatatttatcaagaggattgtttattaacacaccggcgtttgtatcaaaatttgctttttaacaaaacagtaccagtccgttcaaagataaattgttcgtagagaacaaataattagtctttcaacatgttttaatgaaatctcatattatagtcatgttcgtctgataatttgttaacccattctctagataacacaatcaccagagaccaaactgatgcgttaagacatccaatttttgaggtactcaaaaatagttttaataatttttgatgtattatctatcgtagatttctagtatcgacatattggattcacaattgaataagaaaacgtattcaaacaagtaaaaccaaaaaccaaagtgtaagatagtaataaaaagcctcagtcaaaatccatataacttcatagaaattacagtttctgccaaggggttctccctgtaaaacagggtctcagctccactgcacctcgaaattggattatatcatcatcagccaacaaaaagaaatatcactaaaaaaaaaaggctcagaagttttttggtatacagtttcttcgatcaggaattatctgaagcagaactggttttaatcatcactgccctcaatacaaacaaacaaaacaacaaagaagaaactttaagaggctcatattaagaaattcaaccattgattatcgtatatacttcatagaactaagtctcagaagcgcggataattttgtaatcatagcccaaaaacacaaattcatcacagagaataacaaaatctagacattgctttgacacagttaagccggattataaaaagagacagaactgcaacacgaatggcatcaatctagcaggagctttggggcttaattcttcatgaattattatcagactagcccgggaggctcctgcggaaatctatgtaaccagagaccctaaatctatatatcaaaaacaaaactgaagaaccctaaattaaaagctatcgtgaggttgagaatgatttgtatatatgattcaacgcggctattatatagagagtaccctagccctaaaacaccgtctctgaaatgtcgtatctaccctcgttcattgactttcctttccgttgttgtcggtttaatgtaaccgaatgttgtagtatttgggctttgtacaaaagcccatcttcaaatttgacaatacgaaagcccagtgtcaaaactatccccacgtctaattgatttgccttttcgtaatcggtattattgtaaaccggcttggttttcatgatactactattattttttactcgctaattttgtttattccgaaaccctaaaacctgtcgccgtcgaggaaattatggtgacaaccaccgatcgtatctctcttacattcctggcctcaaggttttttctcctctcatcattcattttgcactatttgatttttgtttttatcaccgttttactcatctgcttcttcgttttttctgtgaaatgtgtttttttttcttcgctcgtagaatagagaaagctttaaaagtttaaatccttaattttgttaaaattatatacatgtatgaatttttactagtgtataactagccctgcatagcctttaatgtgttttcgtaaacaaataaagcaggaaccaaagtccatcatatctaaagaaatacttgaaaccaacaagcttatgttgtttctccaactttggttcaccattcccaaaatcaagattgacaataatctcgagtttgcaaagaaagattgttcctcttctaggtaataactactaagttattgtcaatattgaaaacttgtcttgtaatggatgactcttttaattaatttactatactgaatatctgcagatgtggacgttgcatcaccatcacctttcaaccaaatatttgttcatgaccggaggctaacaaagcctgtgagtacactgagagcatctaaagatggaaactcgatcccatcaatagcagcaaacgtattgctaaagagacttttcttgacttttaacataatcattggaatg

SEQ ID NO: 20696 - DNA, 3003 bp, Unknown; identical to SEQ ID NO: 20695
  misc_feature (1)..( 3003): 2750-1469P.txt file - cDNA_ID_1828107; gDNA_ID_2926205; Annot_ID_141699

SEQ ID NO: 20697 - DNA, 3000 bp, Unknown; identical to SEQ ID NO: 5257
  misc_feature (1)..( 3000): 2750-1469P.txt file - cDNA_ID_1828125; gDNA_ID_1620775; Annot_ID_50266

SEQ ID NO: 20698 - DNA, 3000 bp, Unknown; identical to SEQ ID NO: 5257
  misc_feature (1)..( 3000): 2750-1469P.txt file - cDNA_ID_1828125; gDNA_ID_2926205; Annot_ID_141692

SEQ ID NO: 20699 - DNA, 3003 bp, Unknown
  misc_feature (1)..( 3003): 2750-1469P.txt file - cDNA_ID_1828131; gDNA_ID_1620775; Annot_ID_50263
aatgtctgcaaaaactgaagatggaaaggaaaatatgactgaagcagcaagtttactttatggctagatgtgaaactccattctcaggattcttgtgtatcgtccacacaaattcaggcgtatccattctcggtcctgcgactgttctgtatatgtatatcctctcaactggagagctctcaggtcttgactctggaggatgttcatcaatgacttcgacattgagccttggcattttctgacttagaagcttgcaagcaccaaaacttacaaagcaagatgacatccaaagggatcgcatggtctctagcttggcagcgtgctccagtagtgcagtgtctccaaaagggcagtctcgtatctcaagcttctttaaactctcacagcccgacaacaagtgatgaagcatcaaatcactgtccccagcaaatgctattgatagcatcctaaccttcttggcatgtttcccaatgtatttgaaggccttgtcagagagaagaccagagacggagagccgtcgaagatccctgcatccctcagctatggctttgaatcctttatcaagtggctcatttgttttgtaatcaggagcaaatggctctatcacacagagacggaagcacttgagattcggacgttttcttgctatggtaaacaaagctgcgtttgtgaactggacacagaagtagagaacagactcaagctttcgacagcctttagacacaaagaccaggccttgttccgtcagaggtatgttggttgcatcaagatctggctcagatggaaacaccctcagttctcgcagttccttgcaatatgaggcaacagcttcaagacctttgtcctcaatcaagtccatcacctaccaaaaaatgtctcactagtaagaaccaacataaatgggatactcactcaaagagtcttgaaaaatgtaaaatactcacccatagcttctgcagtttcgagcatcgcctaagaagctcaacaagatcaggcattcggacagtagcgtagctcaagttcaacgaggtaagaccaggacagacagaataaagagctggaagatattcagggaggacatcccagagaccagataagctctgaagttgcttacagtttgaaaaagcttctgataactttgaaaacgcttcaggtttcaattgagctgcgaaagaacctgtgccgagctcagtcagttgtggagcacaacgaagtaagctaacgagtccatctagagtcacagctggattcaacttcaaagacttcaagtttggagatctgctcacaagacgctctaaatccgagattttaacctcagaatctaaacaagagaagtcaagagagaccaaagaagttgaactctctggaaaatagctaagccaatctcctcctaaatcttcaacaatacactctcgtagttccaacactctcaagttcctatattgaaaatcagacaacaacaaaaaacaaaccaaagctacttactactatgagatataacttgcagccaaagaaaagattgtttttgtatttggttggaaccgaacctgcaagtagctgcaatagcagcgataccatcagtagagaaaccttcacaagaagtcaacacaaggactttaaaatccttaaacgaagcagcaattttctctaagcactcatcagtcaccaccatcctcttcattctgatctcttcaagagacgaacttttcgccgccatagcttcaatccacggccaagcataaccaccccaaccatcaggaacgagattatagtcagcgaagtgtggcttccccttcaaagtcaaagatctcatctccgggaaccgtcgtgtaaccgcagcaggactgaccgcgtaacagtttccgacaaagactcgcttcctagtcttccgttctgtctcaaaccatgacttgcagaccagagaaacagagttccggtcctcgttggaatcaatgaaggagaggatatgttccaacaccttaggtgggaatcggagacccatcagaaacagagtgagagagagagaggggggaagaaatgaagaaaaaggtttgagattttgattcgatatgagtgtgatctaaatcgaaagattgaagcttttgatatatataaacagagcaagtggaagacaagaaagagtatgacaagacaagagaatcgaaggagacagtgtccatgtgagaccattaataaagttgagcttgcacccatgtgagcctactgtgtatagctcactaatataattagtttccttaatcataattagtttactctgtgatccatcacatgtaagtctgtgtgagaactcgtggatctaatcatttatggtattacccagttcacacatgatgtcagattcgttaattagtattttacttatgcttcagtttcaaagtaaaaatatattttatctttggtaccaaatatcaattcatattgttaccaatcaaatgttacaactgaatctcttcaaacaatcaacgtttttggacgtgaaaaacatttttatgattaaagcttcgaatggcaactcattatcaaaacggtacagtttatacagttttgacaattatcatttacaaaaagaatttcaaaaacgttacaatttttttttattttcaatttttttatacagtttttttttacagttttgcattattctataacagtttaccgcgtcagttaacaacttatcgctctagctaacagctaaagttttgttaccaatcagactcttaaatcttaagaaatggagtaatccatctcagtgcataagtgtcacaaaatgatcgagactcgttggttacaaactctttatcacatttgaagaagcttaacttaagttgttttgattttcgagaaaccgatagagtaacaaagaagttaacatcccaattaattatgttcctaagctttattttcttagtgtcggattggttagattttctcatagacgctattccgctaaaaaactatgactctacacaattacacaagatg

SEQ ID NO: 20700 - DNA, 3003 bp, Unknown; identical to SEQ ID NO: 20699
  misc_feature (1)..( 3003): 2750-1469P.txt file - cDNA_ID_1828131; gDNA_ID_2926205; Annot_ID_141689

SEQ ID NO: 20701 - DNA, 3000 bp, Unknown; identical to SEQ ID NO: 5243
  misc_feature (1)..( 3000): 2750-1469P.txt file - cDNA_ID_1828143; gDNA_ID_1620775; Annot_ID_50258

SEQ ID NO: 20702 - DNA, 3000 bp, Unknown; identical to SEQ ID NO: 5243
  misc_feature (1)..( 3000): 2750-1469P.txt file - cDNA_ID_1828143; gDNA_ID_2926205; Annot_ID_141684

SEQ ID NO: 20703 - DNA, 3003 bp, Unknown
  misc_feature (1)..( 3003): 2750-1469P.txt file - cDNA_ID_1828147; gDNA_ID_1620775; Annot_ID_50257
atatacttacactgttaaaattgataaaaaggaggctagaactataaccttcttctgctgcttgactgtttcatcatccagattctggctgaataagactcgaacatgtgccaagtttcttcgtttccttaagtctttccacacgaagtcacctattttaccaggtcctccaaggctcgtagtaagctccttctgaaggaataacctggggaaatctttattgcaagggctttcatgacttccgtcatatattttccttggagaagcatgatatgcaacattcaagtcaatgactcctgattggcaagaagaggcttgtcttgtcccacttaacgatcctcgtaagctgcttgacaaagtgttggtttcacttctgtctttaactaaactagcaccccaagatctcctaggtgggacgtgatgtctttgcataagacgtgatcttttggctctgggatgcctccattcacataagttgagaagacatgttttaacagagacgttagctctggttctctcttcattggtgaattttctcttcttcttagagtttctttccctgtgtggagcagcactaaacagaccattcaatttgtctctttcaggttcaccctcaatggtatcattgttccttctagaaagattactaacttgatccctcatttctgatacactcccaggaattgggtctgattcacaagcttcttctgtagtacagggagcatacactaaagcactcattgcttcagcagcaatttgagtgttaataccaatgtcaataaagtcttcctcgggttccaagggctcctttggcgccttatcctccaactgagcatccttctgtgagataaacataatgccctcactcaaacccgatgcttgttccatcttgagatgctttgcagaactgttcttcataactctttgtgtgggatgacttgagacttttctaatatcacacggatccctagatcgtttcttcactccaaaatcatcacctgcaacctgatcttctcttatcttggagcatgtaatacttgcacgagtgactggagaggttttagggtcactcacatcacactgatcactactccaatcaaagacactcattttcctggttggacttctgctcataattcttttggccagagattgacatccttttgcacctgatacaggagatgacttccttctgcaactattaaccgggagatcaactggagacaaatttagatctttgtccatcaaaaagtggtcaacaaaaccaagggcatctgcttgtgttgactctcctggttcttgagaatccaaaaaatcaagccctggaccatggctactagcagtaatccgcaatgaaccttggaaaccggtcactgtatcacaatttgattcttgcttgccttgaagaaagagatgtagtaagatttatctgagttaatacaaagaagaagatagaggcaacataacaacacaaggatatgtttacctgtttgacattcgtgatcatttgatccatcagactccaaaagtatatctccagctttcgggcttagctccggcaaacacatcggctcaccagcagcgacacttccatcttcatcatcactatcatccaccaccacttggtcgagaccgtaacattcctggttcagtgattcctcgtcaccacaatttccgttatctactagctccgtatcgtcgtagagcacttgaaatggggtttcaagtaacgagctattaagtactaatgcttcatcaatcgcctctgtatcttcaatttccccacatcccaaaatccgattaacctcaaaccctaagagaatccagaaatgaaattggtactacgaatctatcacctcaaaaatctacaattatcagcaagaaaaagaaaatgtaaatgaatcgtaatctcaaaactcactatgatccgaagaagctgaaggagactgcaaatcggaggcgaaatcttcggtttccataagattgaccatcgaaactcgaatttcaatgctgtccaagaagaaatggaatcgctagaagctcccgattcgtatacggttggaatcagagaagaaaccctagaggttccattggtgctttagtcgaggtgattggcgggagagagacgagtacagagctgtgtcgaatggttttgaaaagctcagttccgtgaaacgatattttagttactatatatatttaattatgtcaaacgatacatcaaatagggcatttggtctagtggtatgattctcgcttagggtgcgagaggtcccgagttcaattctcggaatgcccctctattatcttttgttttttgggacttgaaaattcttacctcattttcttctcagtatttccactatgttcttatccctttaatcttcttcacctatgttgcaggaaaaaaaaagattatatattatgtcttctagaaggaaaccaaactacttattcgacacctcataaatgctttgctatttttctactctttgtgtgcgatttggtgaagaatctttgagaatttggtcaaatgaacatttaagaatgttacaatttatcgacatgtcaaagattggtaacactttggttttcttttccatcccatgaatgtgaacttgcttacttaaaatatttaactgtaattttataacattactttacgatattaattaatttagatttaccagcaacacatggtattaggattgtgtacctttgtaattgttgatatatgagtcacttgttctaagaacacatttcattactttggattttgaaattctaagttgaaaatctttgttttattttcttggctagatttgatgcgtgtcataatctaatccaatttgaaaatatgtaatatgttgtataaaaagttaatatgccaacaaaaggatagatcttagttggtggaatcaacaccattagatatcaaattggtcgtatgcaatgtttctgtataatatatcatttgtctactgaataatatatatcataatg

SEQ ID NO: 20704 - DNA, 3003 bp, Unknown; identical to SEQ ID NO: 20703
  misc_feature (1)..( 3003): 2750-1469P.txt file - cDNA_ID_1828147; gDNA_ID_2926205; Annot_ID_141683

SEQ ID NO: 20705 - DNA, 3000 bp, Unknown; identical to SEQ ID NO: 5292
  misc_feature (1)..( 3000): 2750-1469P.txt file - cDNA_ID_1828157; gDNA_ID_1620776; Annot_ID_50312

SEQ ID NO: 20706 - DNA, 3000 bp, Unknown; identical to SEQ ID NO: 5289
  misc_feature (1)..( 3000): 2750-1469P.txt file - cDNA_ID_1828168; gDNA_ID_1620776; Annot_ID_50309

SEQ ID NO: 20707 - DNA, 3000 bp, Unknown; identical to SEQ ID NO: 5288
  misc_feature (1)..( 3000): 2750-1469P.txt file - cDNA_ID_1828176; gDNA_ID_1620776; Annot_ID_50306

SEQ ID NO: 20708 - DNA, 3000 bp, Unknown; identical to SEQ ID NO: 5287
  misc_feature (1)..( 3000): 2750-1469P.txt file - cDNA_ID_1828183; gDNA_ID_1620776; Annot_ID_50304

SEQ ID NO: 20709 - DNA, 3000 bp, Unknown; identical to SEQ ID NO: 5286
  misc_feature (1)..( 3000): 2750-1469P.txt file - cDNA_ID_1828187; gDNA_ID_1620776; Annot_ID_50303

SEQ ID NO: 20710 - DNA, 3003 bp, Unknown
  misc_feature (1)..( 3003): 2750-1469P.txt file - cDNA_ID_1828195; gDNA_ID_1620776; Annot_ID_50301
aacaaatccctctgatttcatttcctcaggatggacgaagccaatctgtattggaaggcatgcttttggtgatcagtatagagccactgatctcattgtcaatgaaccaggaaaactgaaactagtttttggtaatctcctcctcccgttctggatctgtctaacccttcaattaaattgttcattatagagaataatgggggatcattgtcattgaattcacctacctgtggaagtttatttatacacgttaaaaatcatatcttacatatgcagagccaagtggatcttctcagaaaacagaattcgaagtcttcaatttcaccggtggaggtgttgctttagccatgtataacactgatgaggtagatattattgaaatagtcctctccttcatgtctgcactatctgaatacacttacagagtatctattgatatggtggtccgatttcatttttgaacagtctattcgtgcatttgctgagtcctcgatgtacacagcttaccagaaaaagtggccactttacctctccacaaaaaacaccatcctcaaaatatatgatggaaggtgtgaattcactggcctttatactttcttgttagagtctcaccgaaatcatttcaccatctagtcatactgccctgatattaccttttcatcttgttttcagattcaaggatatattccaagaagtttatgaagctaactggagatccaagtatgaagcagcagggatatggtgagatgtgcatgttattagcgacattctattacagtacaccatgcaaacttgtaaacaaagttaatgaaatccaggtatgagcatcgtttgatagatgatatggttgcatatgccatgaaaagtgaagggggttacgtctgggcatgcaagaattacgatggagatgtacagagcgatttcttagcccaaggtttttcctcttaaatttgagatctgtctagggactgaaaccttaattctgccaaatgcattttggtcttgtatcatggttctttgttctttacttgtgatctaaatggggacagaaacttcaattttatttctccttatgaaacaaagtttctgctctccgctgcaggatatggatctctgggaatgatgacttcggtgttggtatgaaatgacgcgggcctcagccaaagtttttggtctttatcatgataacatgtttcctgcgcatcattatattttatgtattaaatttgagatatattacaggtttgtccagatggaaagaccattgaagcagaagcagctcatggcacagttacacgccactacagagttcaccagaaaggtggtgaaacaagcaccaacagcatagcctctatttttgcttggtccagaggccttgcccacaggtaacgcatttccactgtctttaaacattttcatacttggtaattcgtgttgctactctggagaaaatccagtcccttgcttcaataatgagttagtctatcagggattgtttgtggtaagatttgtcattacttgtctctttataattgatcactgaactatgtgaaccgttttacctttggcataaattgagtttaaagtctctgaaaactggttgagttcatcttaacaagatgtttggtatgtgatggtaccagggcaaagctggacagcaatgccgcactcttgagctatactgagaaactagaagcagcttgcatggggacggtggagtctggcaaaatgaccaaggatctagctcttctgatccacggagccaagtaagactaaaacttgagagaaagttgatgaggttgatgcacttaataaaaaatgtttaaagataagtttttgtctactatttgaacagggttaggagggatcagtatgtgaatacggaagagttcattgatgcggtggcatgggagttaaaaagaagattgttaggcaacaactccaggttgtgagaagaaagaatggaaatctgaaaagcaaagagtctcagcagcgtgatgtttgatttgatgctctttcataggtgtagaacttaaagcctgaaaaggggctattgcatgaataaaaggagatagactaattgggtaatttattgaggaactcagatttcccaaagccgagactcactcctcattgattcgttaaaaattgaatctttttagcccttctttctctgtataatctctgttgtaaaagctaccaatcaacagaaatggctacgttctcgttgtcattatcttctctttccctttgtattatttatctggcaaagaaatgaatggttgagctttagttataagtgttccctcttgctccctcaagttgctatggctatgtgggattagtaagaagacgacggaggatgattttgatgataacagctcccgtttgtcctcctcaccttctcctacgccattcttctttgcttcgccatgaatcatcgatcggaaactttcatcggaagaaaaatccacgtttcagaaccgtatcatgttcttctttgttgccgcaaccgtcggttcgtccggataaggcatcggagttgaagactctgtggaagaaattctacaaagtcgcgtcgccttattggttttccgaggacaaagaccaagccaggcttcgtctcgccgccgtcttcgcccttactctcgccaccaccggcattagcgtcggcttcaatttcctcggccgtgatttctacaattctctcgccagtacgaattcttcaactctctctctcatttctcacttttcaaaaacaacttgctctgttgatcctcttttctctgtgttcaatagacaaagaccaagagcaattcaccaagcagttgttctattacctctgtgctttcgccggcggcattccggtgagttttcctcacgctcctccctctgtatccaatctcaatgaatgatgttgttcactttccctggattttgcagttctttgtgctacgagattatacaaaagagactttatcactgagatggagatcatggatg

SEQ ID NO: 20711 - DNA, 3003 bp, Unknown
  misc_feature (1)..( 3003): 2750-1469P.txt file - cDNA_ID_1828199; gDNA_ID_1620776; Annot_ID_50300
ttcttatcccttgtgctgtaaaagtaccattccatgtcgtttcccggcaaaaatgacttttctgttccgcgtattatccaaataaataactcataaaacctccaatatcatatgtatgaatgcatcatgaccaatatatgtaatctataacgtcagattgacataaacaagctgaaccatatatagagagagatataaagagttggatcgtaccaggcaagtcccatggctcgcatttataaagatcaacttctgggatgatctcgagctcaatggcttggccgttgaccttcctatcaagatagtaagccaccagttcttcatcagtgggatgaaacctgaatcctggaggcaaactcatgggcgccattcaaagtgtatgcgttagaaaacgagagagaaagagatgagagagattaattaaagtgattaggatgttcgtacgacatatgaaggtgactatatataattaaaaagatgagactctgaagaagatatgatatgggaatgtgtaaaagtatgccatgggattggcatcttctgagattaatattttgtcttactttgggttgctttttggtcagtgtttgtcatgatactcatcacacatattttctaaaaccaatatatatattttaaataaaaacctaactctggcttttgaagattctgcaagtgtgaaaaccctagtaggaggagagacggaaaaagctttagcaagaaggccccatctcacaaatactcacatatatgaatgtatatgcttataattccggttagaccttaacgtgggtcatgaatcattatagagggatttttataacgtttgctttaaaccaaaaatgaaggctttttatgattcaacagtttaggggacccatctcttcttctcaaaccaaatctacctggcgacacctaaacactcggctttttcttttctttttttttcggtttgacagttttgttatattgttttatgttgttatggtcttataataagaatacttataaattgaattcatatatatgattaaaaaatgggagaataaaaaagcaggaggcatccaagtcgactttggctttagtgttgggaggcttctttagtcccttttacatatggattaaagacgttgttcggctcttttacatcattactcccacacaatctttgactctctttctctcggcccttcaattttactaacttccggtcaaatctcttttgcctcgactctcggcctcgatccaaaagataaattaaaaaaataaggacatcttcattcttcacatgtatgatatatataactcatgtcatatattagatgtctcgtttacatggttttttttcgtttgctaatatatataattcacatgtagacgaagaacattgtaaacggaatttaacagaatgaagtaatcaaacgttttatgtaaggaaatgatcaaatactgagggagtccacaagttgcgacatatataaaactcctccattcttataaagtataatattcaaacttcaagtaagtaactctcccttttccgtgagaaagaaataacaataacattttagggaagctttaagatgtggtcaccaataacttagggagagagagagagagtgacagatacaaaaaacaaaagatagcaactgaaaaatattttggcgaaagatgctttaacagtttaacttatcaaacgacaacaacaagacatgccccaattgtttcaccactttgtttttcttggtcacaaatcgagtctaagtctatatgaacaagtaattaatgtgagtactatatataaaaaaaaatgtgactatatatataaatgttgtatcacaaatgcaaaaggaatgtggattaattaattaataaagacaacgaggaagctaacatgcaagcctaactaaagacatgcaacctttgatacgatctaaggggaagcgaataaagctaattaagatctaagcatcttatcttatcaacccttttatatttccatttcacatgtatcaagtacctatactctttctcaagcttatagtattgatatctagagtatcaaataaacattaattaattagacgtaacacaatagtgacattattaaatgaatagtaaacaaactttacgtgtatatatatccatgacgaaattggcaaaggcgggactctatgggggaatcatgataatacatacatacgatatacatgttgacatgtatcatgtatcatgataatacatacatcatcccttttttgttggtttgttaataaaatgatcatacatcatcttaaacatcaacatcaatcacaattcttctaaaagagaagaagagtcttgttcagaaaaagtagcatctgattccctacatgtcggtttccaaaacatattttttttccatctcatattagtttgtgctaaacaaactgatccaaggaaaaaagaaaagcctttaaataatacaagttggaatccctgtgtctctagagattcttgctttcatgttttttcacgcatctcaattatagcagaagaacaatgtcactgtccaaaaacatttgcgttatttgccttttgcttttctccatgcattaaatctcatttctacccttgttaaagtggtcacactcattactctttttaatatactaatcctacaggaccacctcgtgattgttatctcaaattttgattaattattcaatcaattagccaaagcagatcttcttcaattttaagattttgatgattactgttaaagctgactatcactgcggggaattcaaagatgatgctagtatacaaaaagagaagcatggtttcaaattgcagaatcaggcccatatataagtgggcttgattatttgggcttttggaagagtgtggcccaacatagagatatagagctgttatcgtctgtctttcatggcggagcagaggtgatcgtttcactattcaatttcactcgtcgatcattaccaacctctgcgggcaaagatg

SEQ ID NO: 20712 - DNA, 3000 bp, Unknown; identical to SEQ ID NO: 5294
  misc_feature (1)..( 3000): 2750-1469P.txt file - cDNA_ID_1828257; gDNA_ID_1620776; Annot_ID_50317

SEQ ID NO: 20713 - DNA, 3003 bp, Unknown
  misc_feature (1)..( 3003): 2750-1469P.txt file - cDNA_ID_1828261; gDNA_ID_1620776; Annot_ID_50315
cccttcctttctggttgttggcaaacaatccggaacttaaagtattacagttgcaggataatttatttaccatcttccagatgcctgctacaatagtgcatgagttgcagttcttggatttttcagtgaatgatattagtggactgctccctgataatatcggttatgcgcttccgaatctgttacgaatgaacggctcaagaaatgggtttcaagggcatttaccatcttctatgggtgagatggtaaacattacatcccttgatctatcttataataacttctccgggaagctacctagacgctttgtcactggttgtttttcactaaaacacttgaagctctcccacaacaattttagtggccattttcttccaagagaaacaagctttacttccctggaagagttgagagttgatagcaactcattcactgggaagatcggagttggtttgcttagctccaacactacgttatcagttcttgacatgtccaacaattttctaacgggtgatattccaagctggatgtctaacttatctggtttaactatcttgtcgatatcaaacaattttttagaaggtacgataccaccatctttgctagccattggctttctttctctcatcgacctatcgggaaacttattatctggatccttaccgtcacgtgttggtggggagtttgggataaaattgttcctacacgacaacatgctcacggggccgattccagacacgttgttggaaaaggtccaaatacttgatttacggtacaatcaactttctgggagtattccacaatttgtcaataccgagagcatatatattcttttaatgaagggaaacaacttaacaggatctatgtcaaggcagctctgtgatttgagaaatatcagacttttagatctttcagataacaagctcaatggcttcataccttcatgtctatataatttatcatttggaccagaggatacaaattcatatgtaggtacagccataacgaagattactccgttcaagttttacgaatccacatttgtggtagaggattttgtggtaatatcctctagttttcaagaaattgaaatcaaattttcaatgaagcgaaggtatgattcttattttggagcaactgaattcaacaatgacgtacttgattatatgtatggaatggacctatcaagcaatgagttaagtggggttatcccagcagagcttggaagtctctcaaagctacgagtcatgaatttatcttgcaacttcttgtccagttcaataccatctagcttctccaatctcaaggatattgagagccttgacctttcgcataacatgttacaaggaagtattcctcaacaactaaccaacctttcttctcttgttgtctttgatgtgtcttacaataatttatccggaatcattccccaaggaaggcagtttaatacctttgacgagaaaagctacttgggaaatcctcttctttgtggaccaccgaccaatagaagttgtgatgctaagaagacctcagatgaatcagaaaatggaggagaagaagaagatgatgaagctcctgttgatatgttggccttctattttagtagtgcttcgacttatgtaactacattgataggcatttttatacttatgtgctttgattgtcctttgcgtcgagcatggctccgcattgtcgatgcttccatcgcctcagtcaaaagtatgttgccttaaaatcatttcacttcagtttttacgtaccattgtgtttctataactatattgctttggattttacctgacatggttaataataatgtgtgctttggattttaccatacacggtaatgagtcgtatggaagaattattgtgtacgatcgatagttttttttgacagatttattcttttagtgatagagaaaaaagtaagtaacaatttttttttaagagatatatatttggtaacgacagagctgtttctttcaatggatttatttttcatagcgacatagttaatgtaacaaattaatgactaaagtagcacaacattgactctagacttattctacgtcctagtaaatttgttaattaatggaatcaacttttagaaatagttgtgacatagtaagtccgtattggctgtgatagacttgagtctgattgaaatgggaaaacgttgatatgaaagtggtgacaaacttaatatcaccaaactaaattactaactctctcataactatgaatataactgtcacaattacaagtataactctatcataactcataactatatatggttaaatgagtatgtaactaactatagttcacaagggtaatatatatagtaaattcttgattgctagatgcaggagggtaaacttgaactttgttgtggtatctagatactttcggacaaataacgtataggtgatgaaacaaagtgcatatcttattgtacagttttagactttaatttggataaccctactcattgccaaggttattatcgtttagggatatgattttgcaaagataattctcccaatagaaacttaggaacttgccgagttctaaatttctaatgaagaaaaccatatctcataaaatttaagaatttgtggcttattgtgttaagttactaaatcctagagatgaatgcttagtttggtaataaaaaccaagaaaatctcattacgtcactttgagaccacaactaaacccgtttgaacaaagtgggtaaagtaaatccggcccaataaagcccatttatttccaagagaataataattagaaaccggagagacttcacggatagggtaaaaaagaactcagaggttaatcggaaaaataaatatttggggtgaagagaagcttcttctgctcaatcatgtctaacaactttggtgacagctaaagaaaaactaagttagaagaatatttagataaccttcaagctcgagaccactcggatctctctctaatcgccgatcggaatccgccatg

SEQ ID NO: 20714 - DNA, 1123 bp, Unknown; identical to SEQ ID NO: 5342
  misc_feature (1)..( 1123): 2750-1469P.txt file - cDNA_ID_1828272; gDNA_ID_1620780; Annot_ID_50353

SEQ ID NO: 20715 - DNA, 3003 bp, Unknown; identical to SEQ ID NO: 16530
  misc_feature (1)..( 3003): 2750-1469P.txt file - cDNA_ID_1828287; gDNA_ID_1620780; Annot_ID_50349

SEQ ID NO: 20716 - DNA, 3000 bp, Unknown; identical to SEQ ID NO: 5340
  misc_feature (1)..( 3000): 2750-1469P.txt file - cDNA_ID_1828293; gDNA_ID_1620780; Annot_ID_50347

SEQ ID NO: 20717 - DNA, 3000 bp, Unknown; identical to SEQ ID NO: 5328
  misc_feature (1)..( 3000): 2750-1469P.txt file - cDNA_ID_1828295; gDNA_ID_1620780; Annot_ID_50346

SEQ ID NO: 20718 - DNA, 3000 bp, Unknown; identical to SEQ ID NO: 5329
  misc_feature (1)..( 3000): 2750-1469P.txt file - cDNA_ID_1828299; gDNA_ID_1620780; Annot_ID_50344

SEQ ID NO: 20719 - DNA, 3000 bp, Unknown; identical to SEQ ID NO: 5329
  misc_feature (1)..( 3000): 2750-1469P.txt file - cDNA_ID_1828299; gDNA_ID_1620780; Annot_ID_167911

SEQ ID NO: 20720 - DNA, 3000 bp, Unknown; identical to SEQ ID NO: 5330
  misc_feature (1)..( 3000): 2750-1469P.txt file - cDNA_ID_1828307; gDNA_ID_1620780; Annot_ID_50342

SEQ ID NO: 20721 - DNA, 3003 bp, Unknown
  misc_feature (1)..( 3003): 2750-1469P.txt file - cDNA_ID_1828315; gDNA_ID_1620780; Annot_ID_50339
accagctatgttccaaataatcacataatagcaaaattagtaacaaagcttcatctaatacacaaccttgaaacagatgtagctgacagtggaagaaacaattaaaaggttcaaatcctataaacaatctcaaatagtcacgcgccagtgtaacttggattccatcatgccgattagatctacatgttgttcctctagagaactagatctccatgatccagaatgactatatttcttatctacttatctattactctgttcttgtatacaagattaagtcactggtgaaactaagtatttgttttgttctgatccactgaagaacacaagcaagacacaaaaagttcactgtcctgcatcaaaacgtacctggctggggatctggcggtcgtaaaagggagaatcacgagagacattcatgtcgtatccaggaggcgtatgaacataaacggacaagtacttttcattgcctttaaaaaacttctcccaaagcggaagcataggtaaaggccctctcgtcagaaacataaacgccactttcggaaccctatcgtacggatactcttccttcaccggaaccatcgaagctctccagaacaactcatcatcagtcattccatgactcagattctctggccgaacaaacccatcaatgctccaacaatctcgaacctttggtttctccgccttgactcctccgtcgtcgctctcgttgtcgtcgttacctgtgcagtctcggtggatgattgtgcaattggagtaatcaggagtcgaaaaaggaatcgattggaggttagtggttgatgagaacatcctcggcaaagaattgaagtagcgatcgatgtgagaacttgcggcgagaccgatgatgattccagccatgaaaattagcaaaaacgacagcgtttgcgccagctttagtaaccctatgtgtttttctccttcctctttccctcctctcgccattgttcgagaaactcaaaacttgtctacccaaacaacaacacagtgatgatctctgttccccaaaaataaagtttcagggaaacattcttatgattcaaagagaatctgattgtttcaagcacaaatccattgcattcaatctcctcgagaaatttcctaaatttgtaacatataattaaatccaaggatcaaacgaaatcgaaaaaggtaagtggataaatggaaattggatctgtggaaatcttcgaggaaagtgagaaacgatgactgaaacagatcagaaactgaatttcatgcagagaggaagaagaagaagaagaaacataaacaaatctggtcttttgtttcttccagttgaaatctatgtgtgtgtgtggttgattttgatcttatatatataaaagaacaaaattaattggaatgttatgcttaatttaattagattaattgagtttaaaactccacgtcgaaaagcataacgagttcaaagtccgcagatcttgccagatgggaataatctattggttttaagttattgggccggagggcccacgtttaattgtgacgtggtttagtgctcgtcaactctttggtccgacatttcacttttttttttatagaaataattctagatatccagtagtcaaacttattgattatctaatttctatatccttactatttttaaaaaaattacttttaacatttctagaatttttcgattttttctgtacttattaactattagtaaaatttattgatgcttcttttggttatgttatagtattgagacaatgtattgtattctaattttgattttttttttcctttttaatgatttgtagattttgttttttcattattatatttgaaaaaatatcttcttatatcttaatcaccagaaaatctaaaaccgatggctatactaatttccggaatatatgaaatgtttatttttctattaaggatccaaagcagctaattaagattaaaaacttgggaagaactagtatcccaaacaaacaatatgatatccagatgtccaaaaggaaaaagaaatggtatcaaaagaaccaagaaatgtgcctagaaatttcatatagttagcttggaaatttctgatttttatgtccaatgtttatttattttttccttataattatacttgtcatacatcacaaagaattgtcaacattgccaaactagtcctaagatgttggaaggtatgatgatagacaacagttctaaagaagggaagatgagattcaggcaacaaaaaacacatatagttcaaaaaaattaggttggtaggatcaattattcaaaaaacatacaccaaatagattttagtaggggttgtttgtccaaaaaaaaactataatagtttacgaaaatagttacaccttgtgaatagattttttgtttgccttcccttgaggtaaattatgtcgcgagaactatatgaacaacaacgagatccacaacaacatttgattacatttttatttgaaccttcacattgatttagtaatgtgggattccaacatcatctaatgttatatgaatggatctaatagatgataaattgttaaatgaactgataatttttttttatttttttatgtgtatttcacatcacattgtttttttttttttttttttaagtaagaaaaagaagaagcacttgagaccgatcagaaaaaaattagaaagatatgatttttgtaagtcttttgaaatttgaatcttgtcccgtgtaattgtgaaatcttacgtacgtcctctttatgacctcgtcttcgctcatttctgccttcccttacgaaatccccaacgaaaaatcttagcttaacaccatcgcgaccggattccaaattccggcccatcgtctcaccgggaaagaccccgcctattgccgccgatttcggttccggtctgctcagatctaatcgagtggcttccttcttcctccagatctcttcactttgaatcggttactcgatctcgattcgcggagggcttttgctagtcgcgatg

SEQ ID NO: 20722 - DNA, 3003 bp, Unknown
  misc_feature (1)..( 3003): 2750-1469P.txt file - cDNA_ID_1828334; gDNA_ID_1620780; Annot_ID_50331
agaaacaaaaccaatatatgttatcgatcgatggagaagtagtgactcttttgattcttcgatagtcaaaatcatcccagagagattgaattgtttctttaagcagcgacgactttgtccttggcggcattctctcctcctccttcgagctggctcaagtttcctttctccttgatcagctgaatatgatgatgcttgcaatatagcttaccctcgtgagctatgtaattcgaagggcttatcgtgcagcctccatgtgtacacttgaagcagctcttgtggtacaatgttccattcaccgatacctacacaaagtccacattataagcaatgtttcagctctggtttaagccaagaacagatcagattcgttatggaaacaatctaacaatcttctttgacacaacttgattctgatcaggaaagatttgagattggataccttctcaattggatacacggttttgtcgcaaccaacgcatttctctcgtgttccaccaaacatattcgaaactttggttccagcaggtctctgttaaacttctctcatgttaaatgttaaaaaaattcaagaacctcaaaaacagaaaaagggttttgttctgctgtccgaaagtacctctccctccaaaggcctatcaggtttcccaatctttggtgtccctgtacatatatatgaatcaaactttagatagataattccaaatttgaaatccccactcacaaagcttttcacattttgatctgtttttggtaatttaccttcgaagcttttctcaagacttccagttctcttgaagttttgatcgaaatgtggtctgcagtagagaactccttcaaaggagttgtaattgctaagctgactcatcaagaagaagaagaagaagaagaagaaacagaacagtcaaatctttagaccaatcagtttccatagccaaaaattcaaagatttctacttaattgattggacttcttcatctacatatatatctactagatctacttctggattaatgagaaatcatcacaaactagaatcaaagatcaaaccttgagagttcctttgcaatggtgacatcggaaacaagctttgtggtagacccggttatcggcggttaacttgtcgacaagataaactgttttgtcacatgccatgcatttctgggttgttcctgcgaacgccattcttgtaagagatcagactaaaagactcaggaaaaaagaaagaagctcaatagtcttgagagagagagagagataaagaagaataagatgaagatgaaagaaagagattgtcaattattgttgcttgttttaatatggggaccagatatattgaaaaatgaacatgcttcttctttttaaatatttaaagtaaaattcttttaggaaaaattgaaatttttaataaaatgtcacaaacaaaaaagttcaagatgagtatcgaattttggatgcaaattcgaatatttggtgtttctgacaaccctagcattgtttttcgtggttgtctaatccacaaaacaagataagcgatgaataaataaataatttgaacgttagcaacaaaactaaaaactgtactacaaaaagaaaaggtttcaacggcattttttgtgttcttaattatttttgtccaaacttgaagtaacccgtcaatatctgtctcctagatattttgcttatattttttttacattaattcagttcttttatatctagagtcaggtaattatttagagaatgcatgcagttgcttgacagtgcgtaagatttacacaaatttttctcaacagtgaaggcaatgctcaatagtcaataactgtttgtaaggaaatagaacagggaaaaccaactggaaagaatctttgtctggttttagataatgattaaaagctgtattggttatgttgaattagttggaaatctctaaatatctatacactatttattttctttaatactatatgttgtgtagtgtgtatatgaataatgaaaatatctgaaacatgctttaccataaaggcttttgatgagctgtagtattgacataattggttgaagagaatgagtgatcataatgatacctaacatcttttatttaatcaaaaatacctaacgttatttttatttgctactataatagactccaaccaatttattagtatcattttatacagtttctaacatttttgccactgcttagatttatgggctttccctttctgtctgcatgggcctcctctcttatattaataatctgacttaatgaaaacttttaaatcttttgtagtttattttcctctagatgctaattttagcaaaatgaaaagatgtgtgatggaaacgtaaagttaaagcaaaagaagatggtgaattggtgatgcaatattttagtcatgtgtcattgtttacatttatgatatattttactttaaaatacttttcttcattttcaatttttataaatcttcgtagaacacatattcacaaatgatgctactttggtgatcagttactaaaaaataccgaaattgattttagaagatagagacgtgaatctgtttgccaatattaattgggctcaacttaagcccaaattatataaggaaagactacctagtaacgaacaagtagcaggtcaactgtccgagcgttggccaaatctctctcacttccacaggtttctctctccggccaaatctaacctccggggaacgtcgttggtcacttatcaccggttagaatttccttcccgctttatcccgtaaacttttttcccattgattccgatcgtttatgttccttcaccaaatcgataaagtttgatctttttccttttcactattattaacagaccaatctgtttacacaagaaatctacagtaacttatcacttgaaaagttttgataaatagttagtataataatttgttaattgtgtgtgtaaatttgatttcttgattgtgtgtgaattgtgatgaagagggaaaacaaaaaatg

SEQ ID NO: 20723 - DNA, 3003 bp, Unknown; identical to SEQ ID NO: 20722
  misc_feature (1)..( 3003): 2750-1469P.txt file - cDNA_ID_1828334; gDNA_ID_1620780; Annot_ID_167899

SEQ ID NO: 20724 - DNA, 3000 bp, Unknown
  misc_feature (1)..( 3000): 2750-1469P.txt file - cDNA_ID_1828338; gDNA_ID_1620780; Annot_ID_50330
aaggttgaagcttgtggatggtagtgaagcatctcattccacatcatttctcttatcatctcctctctcaaatcctcatctacatcgagatcgataggaacttgagcaggagggtttgcattcgggtcatatagaggcgccatgtatggatgctggagtgcttcagagacactaatcctctttgacggatcaaaaacaagcattttctgcagaaggtcgatggccaaaacatgagcgcccgggtaaagtctggataaagacatcccaggtgagtacggaagtgatctaatgtatcttttagctttcgggttatctatgaactcaagatcttcttctctttggcttccgagaatgttgacaatgagcttcagctggttaagacattccgttccttggaatatcggtttcctaccaagaagctcggcgaaaatgcaaccaacagaccaaacatcaatggatgttccatagttgtcacaacagaggagaagctctggggctcggtaccaacgagtcacaacatattcagtcatgaactgacccttggtgttgctcgcacgcgctagtccaaaatcgcatatctttaaatcgcagtttgcgttgacaagaaggttaccaggtttcaaatctcggtgcaggatattggctgaatgaatatacttgagccctcgaagcaactacacaaaaagaacaaagcaaagcaaaatttcaggagaaagcaaagctagaaccaacagtaaatgaacgggatcaaccacacacctggaacaagaagtattggcaatgatcgttactaagaacttgagaagacttgataatctggtggagatcagtgtccatgagctcataaacaagataaacatccttgaagctcatcttatgaattggcatcatgacatctttcaaagcaatgacattctcatgtcgaagatggcgtagaagcttgagctcccgaagagtcctcaacgcatcgatcctattctcataaacattgtgaatcttcttgatagcaactttctcgttggtgtcactgttaacagaggagcagacaacaccgtaagctccacgaccaataggcttgataggcatgtacttagtgtcgatctcgaacagagtttgccacattgagaagtaatgcttcccttcattccttatcccattaggaggatcaaccaaagtcgccattttttgttttccctcttcatcacaattcacacacaatcaagaaatcaaatttacacacacaattaacaaattattatactaactatttatcaaaacttttcaagtgataagttactgtagatttcttgtgtaaacagattggtctgttaataatagtgaaaaggaaaaagatcaaactttatcgatttggtgaaggaacataaacgatcggaatcaatgggaaaaaagtttacgggataaagcgggaaggaaattctaaccggtgataagtgaccaacgacgttccccggaggttagatttggccggagagagaaacctgtggaagtgagagagatttggccaacgctcggacagttgacctgctacttgttcgttactaggtagtctttccttatataatttgggcttaagttgagcccaattaatattggcaaacagattcacgtctctatcttctaaaatcaatttcggtattttttagtaactgatcaccaaagtagcatcatttgtgaatatgtgttctacgaagatttataaaaattgaaaatgaagaaaagtattttaaagtaaaatatatcataaatgtaaacaatgacacatgactaaaatattgcatcaccaattcaccatcttcttttgctttaactttacgtttccatcacacatcttttcattttgctaaaattagcatctagaggaaaataaactacaaaagatttaaaagttttcattaagtcagattattaatataagagaggaggcccatgcagacagaaagggaaagcccataaatctaagcagtggcaaaaatgttagaaactgtataaaatgatactaataaattggttggagtctattatagtagcaaataaaaataacgttaggtatttttgattaaataaaagatgttaggtatcattatgatcactcattctcttcaaccaattatgtcaatactacagctcatcaaaagcctttatggtaaagcatgtttcagatattttcattattcatatacacactacacaacatatagtattaaagaaaataaatagtgtatagatatttagagatttccaactaattcaacataaccaatacagcttttaatcattatctaaaaccagacaaagattctttccagttggttttccctgttctatttccttacaaacagttattgactattgagcattgccttcactgttgagaaaaatttgtgtaaatcttacgcactgtcaagcaactgcatgcattctctaaataattacctgactctagatataaaagaactgaattaatgtaaaaaaaatataagcaaaatatctaggagacagatattgacgggttacttcaagtttggacaaaaataattaagaacacaaaaaatgccgttgaaaccttttctttttgtagtacagtttttagttttgttgctaacgttcaaattatttatttattcatcgcttatcttgttttgtggattagacaaccacgaaaaacaatgctagggttgtcagaaacaccaaatattcgaatttgcatccaaaattcgatactcatcttgaacttttttgtttgtgacattttattaaaaatttcaatttttcctaaaagaattttactttaaatatttaaaaagaagaagcatgttcatttttcaatatatctggtccccatattaaaacaagcaacaataattgacaatctctttctttcatcttcatcttattcttctttatctctctctctctctcaagactattgagcttctttcttttttcctgagtcttttagtctgatctcttacaagaatg

SEQ ID NO: 20725 - DNA, 24 bp, Unknown
  misc_feature (1)..( 24): 2750-1469P.txt file - cDNA_ID_1828357; gDNA_ID_1620780; Annot_ID_50323
gaattccagagtgcttcagatatg

SEQ ID NO: 20726 - DNA, 3003 bp, Unknown
  misc_feature (1)..( 3003): 2750-1469P.txt file - cDNA_ID_1828377; gDNA_ID_1620781; Annot_ID_50359
acttaccaaaaaagtgattgtttggtttgactatgcgagtggagtcagagaattagtacttacaagttacatcttagtgctaatattagtagatgtagatcttaggattagtgtaaacttagtatcatcaaattaaatctactttatcattcttttagttatatatgtagatgatagtaatatgattaagttataaatgagtcactttcttattgcaattttactagatattcacaaaatattagctatgtaaactttctatctctgctttggctctctaaaccgttttagttatgaaagcggtttagataaaaagaaattctttatttgaacaagtacaaaatatgtatctcgaagtcgaacaaaaccatatttatttcatcttgcatctgactcgtttgattggtgtttgaacgaaatagataaaaaccttgctattttgttctttttgataatttgatgaaaccttgttacgtacggaatatgttgtttgtatgtactgcaaagcataagaatattcgtggagatgcctagttatttttctctgtaattcatacatttaagtcgtcaaaataaacatgaaggatatagattcattgaatttttaacgaatgaaaaatttattccatcaaaaactgtgtttacattatatgcagcctttttaagagagtttttgaaaagcattgaaacgtaaattgaaattgagcaacttctaaacaaatcttatcctctagatccaaacaaaatccgaagaacatcgtcgtgcttggatgaaccgttacttgaaaaatcattaatcatagctgatatcggacggatcgttcaatgaaagtgatgatctgcttgaccatgtttgtatcattgtatgctagccgcgttcgacgacggcaactttttttttctcaaaaaaagaaagatgattgtgtgtaaaattaaaggcaggcagaaaaatctcgtaagcataattataacgttaatgttgtaccaaagtgacgaaaattgatttgatttgactttttttttaaaaaaaatatttgattatatttacttgttttttttttttttttggggcaaaagattatatttacttgtttagtatgcatatttatgagtgttttgtggctttgggaatactatgcggctgagaggttaagatatggaagcaaggctacatgatatcatgaaaaatctactacttttgtgttggttgtataaacattataaatttatgatcatggatatgtaatcatttttgtagaagctacatgatattggtatattggctaaattatgggatggcacatagttgaagcttagattcaattaaaacttaacctcaatatactgatttcaagtaatttggtctcacgaacatagagatatcccctccattaccccccaaattggctgcccaagcggcagtatatcacatatggagacagcggaatcatctccttcacaatggcatctcaattccgcctccaattgttttcaagaacatcaatagcgaagtgagaaacaccattactgctagaacgcccccgtaaagtctttcgtgccttaattgctctttggatccgttaatgggttgattgatactcaactcttctttgtattattatttttcttgacaaagtttacatttgtaggttcagctttttgtaaaacttcaacacttcattctaatgatgtttacattcttataataataaaaacatagagatgtcatatttatttctatttatttatgtactatattacgacgaagtttgaacttgtgagaagttagaaaagaagttattactttctgaatcaacatttaaaaaataatagatgaacttaaatagtaaattgtacgtaaaagtcgaactccatcagctaatttctttaagtcttaccacaaaagactaatatgagtcaaacttgagacttgttcgttggaacgctgaagttaccaaaaaggtcagagtgaacaaaatcttttcaggcatttagtcagactgagatccaaactaagtggtgaaatggtaaattacactaatgtcattgccctccattggccattaaagccttctattttctgacattggtcagtgggaatagaaactgtgaagaagaatggaatagaagaaactcggattctgagaatccatttaaatttttttagtttaatcctaattagaaacctgaaagcaattgattagtgaatttaatttcgaatcttttgtagttgcagctggcctcgatcggcccttgtatccttttattaattaaagacttcaaaccaaagcgacaaaattaaagcggttcttaattggtctttaataatttttcatctcgtcctccatatatacgattatacacatacactgttcacacaaaaatacatacgtagatttcatgcacgtcaatgtgtatctatgttcgttgttcaccatatgtcacgatacacacatgtgcacgtgtgtatatatgcgtacacgatatgatgatagtgcatttttgtatcatatgcgctgattctagaagtaatggcaatgcttcattagtaattaagtatcgataacatactaaagtatcgatatgtacatatattttttttcatgataagaagaaatacgaaaggcctcaggcctgagatatagtatatagtacgttattgtcttattgattatattttttcttgatcttgtcctcgtgtttataacctttccttcagctccagttttgaatattgtttaataagtaaaaccaaagatagctttcaaacaaactttcttgggaaattaattcaaaaataaaatgaaattttaaaaactcagctgaaatggcggctgatccttcgggttcagacccctggcaaggaagcatatattgatttcaacttaagctaaaccacttcacttacttcacttcctcttctctaccaaactcactctagctagttccacttagggttcctctcttccaactcttttttgtttttagggttttagagaaatg

SEQ ID NO: 20727 - DNA, 3003 bp, Unknown; identical to SEQ ID NO: 20726
  misc_feature (1)..( 3003): 2750-1469P.txt file - cDNA_ID_1828377; gDNA_ID_1620781; Annot_ID_167943

SEQ ID NO: 20728 - DNA, 3000 bp, Unknown; identical to SEQ ID NO: 5347
  misc_feature (1)..( 3000): 2750-1469P.txt file - cDNA_ID_1828381; gDNA_ID_1620781; Annot_ID_50357

SEQ ID NO: 20729 - DNA, 3003 bp, Unknown
  misc_feature (1)..( 3003): 2750-1469P.txt file - cDNA_ID_1828392; gDNA_ID_1620783; Annot_ID_50391
agttacaagtgaaagaaatcagtaattttttatttattttagaagtgaatttggtttgagacaaacacgaacaataaacttataaatctacttaattaattttctgcttagctgaatgagtttctaaaaaaatttggttgcttattaaagattaaacaaaatgccgattgcagatctttcacgtggttaatcaatttataaatttttaaaacaaaacaatcgaagttcaattttatttttgtcgtaatcgaagttcaattgttggatacaggtctgacgcgatcgtgataagattttatatgctatttaaaagaaatcatgtggcctggccaaacacacaagtgttattagtaaaaaactatcttcagacttgttttatataaatacatttatttgtatcacctattatgaattgttttttctccatatatatacgttgggttatatcttatttcaagtgggtagcttatactctctctgttcctttttgtttgattgtttagaaaaaacacacatattaagaaaatatattaaatgttgattataaatgtattatttttagtgttttacagttttctataactctaaaccaatgatagttaactatttttcttgaaaattacaattcaccaatactaaccaataaatattacatagaaaacttaaaaaattaatcttttagaaacaatttttttttctaaacaatcaaacaaaaaggaacagagggagtatttaattgcatcagttacaattttgagaaactctcttactaaaaataatataaacaattaataaataagtagagagaatgacaaaaataaaaaatagtttctctgcagagaaactttggagtaatgatggaaaaactatatgtataggtatgtgtttataattggacagaaactaaattatattaaatatatattttttttttttttgaaaaacttttaaagtatatgtaaatctattggtgagatggctaagtttctcttcttctattttttccttctggatattaagatctattatctcattattatatgtttaatccaagataatcacttacctgccggaattgattctcgttatatgtaaatcatcatgttaaacagttaaaaaaattgtgatatgatcaagtcctataaaagtttgaaatgatgatcaaacccaaacaaaattaagcttacaaaaagagaaaaaaataatatataagccttatgtttaacaaaatgtttagttgatataagtcgtttttaggatctgattggtgcacattttagctgaagaaaatgactcttaacgtcagctcaaaacataccaatcaagtaaaaagacaagagaaaataactatgctagctctactcttcatataactgtaaaaagaaagagatgttttcaccaatacaataggatgaaaatacttttcttttttgtttactccatttaaaagagttacttttactctatatttattatttataccaatgaaatcagacatttatatcagtttataagaggaaataaaactttaaagaaaagagagaaacatagcttttcgccaattttcactgtgtatctgtattcaaataattagagtaaaacaaaaaaaaattatacccaatcttaacataattattttcagcctttatttttcagctaagatgatttaccaatcaatttttaggtgagatagttatgatgcctaataaattggaggtgcaaagttcaacaaaaattttacttttatgtttaattgaaaaagactgcttctcagtttaagaactatggcccatttatagatactgattaaaacgtggattgtaaaatgtgggcaatcaatattattttaaaaatgtggagccatagttattaactgtgattaaatttccccctcctccactttcacgcaaactaatatttaaaacagtcttaactgtgattcaagtaataagatttttcttttattattatttgacagtacttcctccgtatcattttaagtgatattttaggaaatgtttttagaatgtagagttgtagaggaaaaactagcagaaaaacaaaaatgcaatttatatatagtacagaaggttagtttaattgtgtttcgagttaaatctcttttttgatatggaaaattattctttaaattaaaatatttaacatttgactttggataggagaagattaaaagctgaaaagctggaacttcaacacttttgagaaaagtgagctacaatagtattaatcttaccatttactgataaataaatatatactttctgttcaattttaatagttttcaaatttattcttgttgcacataaacaacataggatatataatttttttagttaggaaatatatgcttttacgtttctatgaaaattctagatatgattataatttactcttaaaatatgaaatagaaaaatggagtggaatattattatttagaaagatatatatatatatatatatatatatatatttgtttgtatgcagaatgttagaccaatataattagtggacatttctataaaaaaacaaaaaattgtggaatggatgggataaaaaaaaaagagagatcaaagataacattttaagatgtttttctttctttaattttcaacaattttaggcaatttagtagtagggggaaatgtatttctatgaaaatccaaatatatgctaatgtatgcaacaaggaaagatatagtaaccaaaactccacttcatattacaaacaataattatttttataaaagtattgacttgtcgtctgcaaacgtgattacgtgaaccttactggtaataatacaaaaatcacagctctaatttgccaacccaatccagatctctctagttctcaacttctcatataattattcattaatatatttattttgagattttggttgattttttgatatataaatattggacttgccattttctattacaaccatcaaatctcaataaagcaaaacgaacaagaaaatg

SEQ ID NO: 20730 - DNA, 3003 bp, Unknown
  misc_feature (1)..( 3003): 2750-1469P.txt file - cDNA_ID_1828396; gDNA_ID_1620783; Annot_ID_50390
agttttgattataaaaaaaaacaaaacgaaggcatgccaattttagtctgtaattaaaagttttgatgacaaagttttgttctctttttttatttggaaacaattgaaagcaaaactatcagttgttttagcttttttcccaaggaagttatatttcgacaattgagtttacaaatgtaatagaggaaagttaatttagcgtcaactattcagataaacttgaagatataatttgcaaagagaaagcttgtgaagttgaaaattcagggattgttccttttccaaggttgatttatcttcgtttaatgaacctactgaagttgaagagtatctactggagtcctctttccatgtctagagacaatcactatacacgaatgtcctaatctgaaaaggcttccactcgattccaacagtggcaagcatggtgaaaatgcatgcatgatacgctacagatatccagaatggattaaaggtgtggaatgggaggacgaagctaccgaaacccgattcttatcttcatgcgaacaggtctaacatttctcctcttctcttagttgattttgaaggagtctaactgcttccatctttaatgcctcttgtctctttttatgtgtgaacttttgttataggtggaagaaccataaaccccaagttgagaacatatattgggctctctacttataccgctctaatgtgtttataatggaagttttagtgttttcagtttctttaataggtttgattctagtcggcttgagttcaatggctcacatggttgcaaatttgtagctcctacttacattatatttgcagtatagacagatttgtgtttcgaatattgtttgtggctactctgttcctatccatggtctttatatataaatgtttactactactaagtctaacctcaaagcctttatgtgtctctgtctcatccaccaaactatgaagcctcttttgttattaagaagacggtgcacaaaccaactacatatgacaacatttgcatcttctttcacgtttgtttttttaggcaagaaatattttttcctttgaatttagtcacttcgattattattattattttattttatttttttattttgttaaagcacttcaataaaattttgaaagtggatttggttaatctcttattcttctttaagttgttcaccaaacccctactgatatatgatcaatactcaaccaccttttgtttttgtcccaattatttgcattatggccttgaatgttttgtagattttgtaagagtttttggattttgtttttcaaaaacttattttcataccaatcaaaattttaaaattttggttttcctacaatttagaaaaactatttttgttgtagttttccattcatgattttagttttttagttttcctaaagttagaaatctagtttttactccatcaacgttatttttaaaacaaaaatatattaacaaaaatctaaaactaaaatctaaaatctagaaactaaaatctaaatccaaaaactgaatcgaaaatcagcatccattcagggcctaagttactaaccacgttaaaaacgaaatttaaacccatgaaacttgaaatagcgtatcaccgaaattgttggtgttggggatgaaaattctcacatttgaaaccaaattttatatttaaactattaaatattgtatcactgaaattgtgtttatacaaggggaacgcatgtttcacttggaatgtcttcaagccaaaagacaggaaagcggacttatatttcccaccaccattcggaaattaaagtcaataagcgacgaggcgcaattgtcaagacattataaatgccatcgttgtattgactcatcatatgcatacttgctctaataaagcgtcgtaaggggttctctatgctgagcttacgagtcatgcaggtcttgcgaaaggtcgaaaaaatggttggtccacctaaaactaaaagtatcataatctagtcttataaaaaaaattatataagaagagaaaaattctaatatctacatttttaaaaaataaaattcctaaatactaaatttataaattaactaacaactatcctcaaattcaaataaatatattttgatttgagcattggaagaataccctatcatcccacatcacctcccatgaatttacgggtatttttgtggtacatatatttttcttatatgattctactgttcccactaataacacgcataattttggaatgacgttttctaatatataatggtaaaagtttactaatcaagaaaatatgcataatgtataacaaaacaccggatttacgtattttctaaaataatacaaaaaaaaatatgttatataagtaagtgggtatatacttgtttatttcatgataaaatgttaaacaaatatttttaattttaaacaaaatattaacaattaaaatatcacccttgtgaataatatttaaaacttgtgactatctaatttcaatcaaatatcaatcatatttgaaattcattaaaaaaattatttaacttacttttcctaatcattgagaaaaaaaaaagttttccttatcataaaaaaaaagagacctaagattatatgtgttagatgtttctatttaccatatgaattggttgggtgtagtaagtaaactattcatctatcataaattaatttcgatattttgtaagaataactaatcactgaacaaaacggtagtttacacttttcagtggcattggaatctcctcaaaatcgagctgtcacactcacctcccctgtctcctcttcgcttcggtacttccgaagatttcattttctagacactccatcctctctcacacacaccttaatttcgaatttttgtcaattggtgatgcagttactctgaactcgagctgagagagaggcatagagatccttgcgattcgttgtatccgtaacatttaacaatctcgttttgtttttcttctgttcctctattatcaacaatcaaatg

SEQ ID NO: 20731 - DNA, 3003 bp, Unknown
  misc_feature (1)..( 3003): 2750-1469P.txt file - cDNA_ID_1828416; gDNA_ID_1620783; Annot_ID_50384
tatctcaaaatttgatatagtataaactatgtcggtatagtcagatcttctagagagttgtggtatccacaaacaaagaatacaatcgcagattcgcaaaacacttttcattaaatagtaattaataatcacatatagtactctttaaaatgtataaaagtcacttttggtttaacccatgtgggagggattaaatggaatagattaatttgctttgatacatctttaactgtataataataaaccaaacgttgactaaaccatacattaatttgcaggtggtggtagtaatcgggaattttgcgagtggagccgatatcagtagagacatatctaaagtcgcaaaagaagttcatatcgcatctagagcaagtaaatccaacactttcgaaaaacgtcctgtacctaataacaatctctggatgcactctgaggtaaaaactattttcttataatggttaatcttgataagaaaaaattcgaaacaaattataaaattcttgcttctattaattattttatttttttgatatcttgcagatagacaccgcccacgaggatggtaccattgtttttaaaaatgggaaggtggtacatgctgataccattgtccattgtaccgggtatttaacaattctcaatttttttattttccgttacacaacggaaattaacatactaaaatgttcggtttactaatttttttttttaatatgtgaaggtacaagtattactttccatttcttgagaccaataattatatgagagttgatgacaatcgcgttgaacctctctacaagcatatttttccacctgcgctagctcccggactttctttcattggtttacctgcaatggttagttagtttcaatcgattaaaattttccgaagttttgagtgattcaactcttcttgatttttagaaaactcatcaatttcttggtttgatattgttataaccagggtctacaattctatatgtttgaagtccaaagcaaatgggttgctgcagtcttgtctggacgagttacacttccttcggtagatgaaatgatggacgatcttaagttgtcgtatgaaacacaagaagcgttaggtattcccaaaagatatacacataagttgggtaaatctcaggtacgacattttttagttacgaatatgctatggtaatatatatcaacttgaaaaagaatatagtttcaataataaattttgtgtcttttagtgtgagtacctcgattggatcgcagacctgtgtggattcccacatgttgaacattggagagatcaagaagtaactcgcggttaccagagacttggtaatcaaccagaaactttccgtgatgaatgggatgatgatgatctcatggaagaagcatacgaagattttgctagactaaatctgatcaattttcatccttctcgttttctcgaatccggaagatgaagtttgactacgattgtaattgtgtctacttgtttggatttaaagtacattgcattataaaaataatgtgtgagtaaatagtttataagagtgtgaaggtcttcttggctagggttacatgttgttcgatctccggaattagcttcatggtgtctagaaacttttgttttttagaccaatatgttaagaataaaagtatgtagttaattcccgtaagtttttatgaatccctggttcattgtgcaaatgtttttttttttgttattgttctgttaatatcaaagagtgtccttaaatgtatgcataattccctctttttggctttttgattcttttattggaagcatataagttagccaattgactttttcttacaataagaatttgaccgttcctcacatggttctgcatcaagtagattatactagagatcaggccccgcttagagggagtgctcgtccacatttttttccaaatgattttaagctcctaagtttttgatatttttgtaataaaggtcctaaattttaatattctgatgatgagactgtaattagatcaagtatagtgataaaggccacgattgttcaaatgaaaattttgcatttaacgtttgtgtagaattataaaataatctcagttttctttatacaattttcaggatgctaacgtaaatgaaaaaataataataaggaaaaaaatgtaaaggccacgactgctttttttttttttttttttgcttaaaattttacaagttcttatagaattgtatggtttttatctaccttatactccaatatatgggtcaattttgggttgttcacatattgccaaatctagctgcaaagctcgttatctcgaaattcacgaagcagaaatattgtgattggtcccaatcggcgaaagtgaagataagagtacttcgacaattgaaacaccggaaaaaagagcaaaatcatgtacgtaacttcaggattttgtctcttttgttatttattttttttggtttttccttttgtgggcaaacaagatattgtcttatattacaaccatggttcaatttgagacgtcagattgcagtgatcaaagtgaacttgctaacttcaatagagattctttctttttccatgattggcgactgcgtctcatatcatttatcactcttgtcatgtgagactgacacactcattgttcacttttgctgcgtcataaatcttttaattattaacttacaaaatatctcttaacaatttgaaatcattcaaaaacaagagtgatttgaatcaaactcttaatccaataaacgctaaaactctataacactgctgtatttattacaggacaaattttccttgaaaataagtaggacaatgattacgcagtagttaagtgaaaatgaacacgacaggtacgttgtgtttctccttatataattaacacatcgacatcatctccacaaagtctatatgaccaaaagatttgaaaacacttaaaaaatcacatattaattaacatgacacaaaaatcccattacatatcctaactaattatg

SEQ ID NO: 20732 - DNA, 3003 bp, Unknown; identical to SEQ ID NO: 20731
  misc_feature (1)..( 3003): 2750-1469P.txt file - cDNA_ID_1828416; gDNA_ID_1620783; Annot_ID_168044

SEQ ID NO: 20733 - DNA, 3003 bp, Unknown
  misc_feature (1)..( 3003): 2750-1469P.txt file - cDNA_ID_1828420; gDNA_ID_1620783; Annot_ID_50383
tactagaatcgtaaaacgtatggattattttacattagttgtgttgaaacaacaaccaaaactcacattttgaagattccctcgttgtcgcctaatatattttgggcaaaatatccattccatgtcggcaacgtgtgccctactagttaacaacacttggcgtttgatccattccatgtcggcgtgagagatggtgagatggcgaaagctgatacgttgatcaatagtattattttaaagtacgtatacagatatactgttttaaagagttagtttcgtggtgatacagactgacaggtacgttaagttcgacttaacgtaataacaaataaaaagaataacaggttgttttgtttggtctacaagactacaagactacaagactacaagtctacaacgaacaagactttttataacataagtaagactttaaagtaatcaacatagatgcctaagatgatttgatttacttggccgtcttactagtcactggttagtggttacccagtttcttaaaaaaaatgttattattctgattaattaagcagatattttttttttcttttttaatagatatacagataaacgcatttatcatatttcataataaagtaaaaacgattatgatcggacatacaagcgaagtaagtaagtgtgattattaacaaacaaagagttgattgaaaattcaattgtggctgtaaataatatgtcagtataaaacatatcaatttttaactcattatttttaagggttaatatgttaagtgatcaaaacaaataatttaatatttcttattgatcgataaattaacccttactatttttagaattttttactttttattttcaaatctaataatcataggaaaaaaaaataacacacaaaacaacaaaaaatttccaaacatagatcgactaaagaaatttccccctcataaatttcttccgcatgtacttgataattacagcttttattctttaaaaccattttggcatttttgaatggctacttaagtgtggtatcttccgttccaccttatataactgtcttgcttcgtgctccattcatttcatagtgtacttattccataaagatgactttacacttaattcttatcatagttaataagcacttaattctttttctaatgtgtcatgaacacatgtgcacggtaattcgataaagccagtatgctaaagtgtaaaggcacttgtctattcttaagcaataaatcactgaaaacaatatttatcggacaaaaaatcagatgtaatagatcatttatgtttaaatcagtcaaattcaagcatattaaagggtgaagttttatgaagaaaaaattcaactaaaaaaacaaaatgacacttacacagttacactgacataactaaccaaatctaaaatttataaatttgtcacatcgtttaatcgttatctgtagctttattgccttttatctatgtcatctacatagatggagtagtaagctgagaagagaaggagaaatttaaggtcaaagttacccatcttccgacatgcacgtggacggccgaaagttcacgagaatcttagattattccacagtgacacatgtcggcctttgcgtgaggaagttttttggtctctaatttttttttttttgaaatataaaaggagataaaaataaatacgtaattaattatacattttaatattaccgttaaattattcgttataatctcctatattgaaatttgaaaacaaaactttattaactataagcatgataaatatataaccgtttatgataattctgatagtatacgtagtttttttttttttttttggtgagattgtttatgaaattagcaaggtttgacctatcatcaaaccttttacctcatgcaactaattaatgggtgatttcttttttcaaaattgtttttaataataataactaattagtaattagtgggtattttaaataccattatgccatttagctaaggtaaaaaatcaattgttaattataacacccaccaccaacatagattcgtctatggttcattcatcgtgtttaagagttgaaagaaataaattcgcccatcgtgaataatagatatttattcatctcaaacttataactcaaatatatttcaactatatatcgatcaaatagtatagcttttggttaatgacgaatttttattcttttgatccataattcttcttcttcttttttttctgtccggatacatgaaattgatgatacacatttaaaacaacaattcgaatcagggaacaaattacagccacaaccagtgatgatagaccatatatatgatttagtttatttaataaataatgtgtaagcaaatttggctttgctgtaaaaaaagaacacgaattttggcaaaagtttctgttaggaatctggttctattctcctctgcaacctccagtctctcatgaatctggttcggattctctttttccttgtttctatataatttagatacatggttttataattctatcatatgtctattttggatatagtattttaaaaatatatatatttttcataaatggttatggtctattctatgttaatgataatcattagtctttttgtcaactatgtttttttttccaacaaatttagtatgtaaacttttttttactaccgttttattaaatcgacggttgatcagatcaactccggtataacacaacataagtttcgttatcaaaacaaaaacaaaaacagatttttttttgtcaactaccagtgaagattagtcttacgtgtcaagaaaccggataaaaatatataacgtatttgggcaatcagctaagatattaactaacgcggagttcattattaaaatggagtaatgatgttttcagttttctatataaatcacgtcgagaccgtagagtcttacacaacaatccttcttacatttctaccaacaaaacacaaaacacaaacatagcattcaaaactttgaaaaatg

SEQ ID NO: 20734 - DNA, 3003 bp, Unknown
  misc_feature (1)..( 3003): 2750-1469P.txt file - cDNA_ID_1828432; gDNA_ID_1620783; Annot_ID_50380
tcaggccggtttatgggctctgcccacggcacaaggccaaacttttttcgttttatcaacttcattagcttataagggccttcaatttatattttagttttgcaaaatagggtccaaggcccatttatattgcttggaaagagtgagaaactgttgctagttatcttttgagagtttgattttttaacgtcttttattatttctaaacaagttttcatacctagcgttgggtggtccggcttggttgcatgaacggatagcagtggaaagccgttcgagtcgatgacgtctaaagtacaactcttgcatgggatgagctttttccgttttgtctttggttctaatctattatgttttgcagtccgttttctctgtatttctgttttttttactctgtttctttattactctgtttcatttattaagacgttaaggagaaaaaacaagttttcaaaccaattatacaaacatatcatcaaaattatcaaaaataatatagaacgataaaagataaaaacaagttttgactctgctttttttcgaaaagccttcctcgctatcggtttatcaaatttgttatttttctttttcgtactcgaactcaagcatgcgttatcacatataaaaccgacattactttcgcggataactcttgtttttactgctcatgatgctttactcggtagtccaatctttgatctatatgctctagttattatacccaagggtaagggatgcttgatcgactaatgtatcttaaaaatgtttcctacatgatgacttttgaagaatccctacaagaccaaattattgatgtagattgatcacctacacaaagttaatgtataagacttttgtaggaaccatatatggttaagatctaagaccatgttattgatggtttttgtaccaaaaaacgtcaaaatcgtttatttttgtaattttatccttcacgtccaaaaaatacagaataattatatgaaatcaatatatgtaaagttgttaaaataggctatatacaataccgtattatttttttacttcatatgattttgcattttttcgacatgaatggtagttgaaaaattgttgattttaagattgtttttttttttgcataaaactctattattgatggataaagtcagaatttgatttttctggattagaaaaaatcaagaaatttactaaaaagaaaaaagaaatttacggatgtcaaaaaaaaataaaggaagaaatgtacaagctacaaacaaaaatcgggtagttgtgtcacgtttattcttcacttgattctacaatgattgagataaagttgccgattttgccgggtagcaaaacacgtgaattatgcaaagactgaaataacatgacttgacgatttaaatagtaagcttattaaatatttcactcaacccacaaaacgcaattaaccgaacggtccaagccttcgtacttttaggtggctattcgttgaagaagataaatgaaagagagggtacgtgtccatccatttgcggttaggtctgggtccatggcccgtccctttcaaaatgcaatcaaggtccgtaaatcggtaaatgtaattaagaaattgtaatatccaagctaaaacttactctttccgttttaaaacgggatataagttgttttagagtttttcttttgagtcaaaatatagatgttttcatatcttcatataaaagaaatattaattaaaaagttttatctaaaaggtttataaagaattaaatgactgtttttcttcattggctttcaccgagtatttcttattaaaaatatatatttgactaaaagcataaattttatcaatctctgtcctaacttccaaaacatcttacattttgaaatggatgaaatatttttcttccttctctttcttcatttgaggtatatatgaatttaatcacacattttaaataattaatgttaaaatgataaatcctatgtttttctattatgaattttaaaactagaactattgaagtattgattgtggaaaatattttaatatccagttattgaaaatatttttaacaatggtttttcaatatggtttcaaaattcaagatgatttgggaaaagttaagtttattgatcacatgcaccaatatatatatacactaatacacaattatatatattaatttaagcactaaacttactaatccttatcttaacataagatttatcccgtacccactctaattaataaacatatatctccgaaaattgtagaaccatataaaactttaacacttcctttcaagtttgagtatatatgtaaatcacaaacgctcaacttggacaagtagctaaaacaggaacttctcaaggctatgtggttcgaacattatatgtaataatattgaaccacatctcttatactaagataatccgctttgatatttttagttttctcatagaacattgggttaacagcaatgtgcaatgctgatttcctatcacaaaacatcaacatcggatcactatgcttcactactcctagatccgtcaaaagtctcttactattttagttcaagctggcagccatgcctatatactctattttgacgatttggtttacaccggtaacggttgttgaatgaagaaaatcagattttaaattcgatcatattcttttattaagttaaattagtttgtgtattgttctgacaacaaaacaatttcagctaattttataacaaaataaattgtgctttttcggatatttccccttccatttttacaatagaatgatcgaatatttttgtatgaagtatattgttcttacaacaaagatggttttttttttgtttttggttaaagtacgaaaatgatgatgattagccatcttgtttcagttctattatataagcccattaatagcacggaacgacctttaaccaaaacacagagatcatacgacagtctcctaccaaataaagaaaaatccaccataccataaagttcaaatatatg

SEQ ID NO: 20735 - DNA, 3000 bp, Unknown; identical to SEQ ID NO: 5375
  misc_feature (1)..( 3000): 2750-1469P.txt file - cDNA_ID_1828446; gDNA_ID_1620783; Annot_ID_50375

SEQ ID NO: 20736 - DNA, 3003 bp, Unknown
  misc_feature (1)..( 3003): 2750-1469P.txt file - cDNA_ID_1828462; gDNA_ID_1620784; Annot_ID_50407
cggttgatggtcgagtccaaggtagaatgcttcgatattttacgcatgcaccagtcaacatttaggactttatgcaagattctttcagaacaatacaagttagaggagtcctgcaatatctatcttgaagagagcgttgcaatgttcatagagatggttgcacaagatttaactgtacgggtcatagctgagagatatcagcattcacttgagacagtgaaaaggaagctggatgaagtattaagtgctcttttgaaactcgcagcagacatagtgaaacctacaagagatgatgtcacaggtattagtccctttctagtaaatgataaacgctatatgccttattttatagattgcattggtgcccttgatggtacacatgtgtctgtgcgtcctccatcaggggatgtggagcgatatagaggtaggaaatctgaagctacaatgaacattctagctgtgtgtaatttcagtatgaaattcaatattgcatatgtaggagtacccggaagagcgcatgacactaaagtactaacctactgtgctacacacgaagcttcatttcctcacccacctgctggaaaatattacttagtagattcaggatatcctactagaagtggctacttaggtcctcaccgtaggactagataccatttagaactgtttaatagaggaggtcctccgacaaacagcagagaattgtttaatcgtagacattctagtttgagatctgtaatcgaaagaacatttggtgtgtggaaagctaaatggagaatacttgataggaagcacccaaagtatgaagtgaagaagtggattaagattgtgacatcaacgatggctttacataattatatacgagattcacaacaagaagatagtgattttaggcattgggaaatagttgaatcatatgagcagcatggtgatgaaaatgatgggcatgttccatatgtgcctactggtgacagagtaatggagaatatacgagattccatcactacagagatggccaaaggaacaagactcccatattaacaggttccatctctctgtcttatgttattgattgtctctgtcttatgctattgtctgtttctgtcttggttttaaattttgtgactaatagtgacagctgaatggtcacgtcactacataagttggttgattacacacgttttaaattttgtgactagtagtgacagctgacaagtaattcgttgaacatagtgttcattagtttggattagacttgattcaattgaatagcttgacataatgacagctgaatggtctatgtttctggttttagctcattgttgaatagtctctctctcaatctagttgttgtattcttgagcagctgcaattctagtgtctcttgatgttgtttgctttagtgttatggtttggtaatatgcataagaccatactttggtttctgattctagtttgtgtcatgattgaattacttttgagaatgtgtcatggttgaatcgttaggtaagtactagccaatatgcatgcttgctcttattggagaattggtgatgattcaggttattgctcttctttacaggtttagtaatttgaaattgaagtttgaaatgggaaatgatcaacgacgacaagatttgaagcacaaaaccaaattctctttttcaaactttactttgatttataagaatgtagcaattgacttgttacttaacagagggtattttagtcatttatatatatatgagaaagtgaatgattcatccaaatgatcaaacaaacaaagctctatctaaatgatgcatttagatgaattagcaaatgattagcaaatgatcaaacaaacatcattaagatgaatcattcaaatggattatttggatgaatcatttggatgcaaattccaaatgatcaaacaaatagagcctaaattttttgtttattccaaaatattgaagttgttttgctataattttttatttttatatttaaacttactaatttcggtttctttttggtttcaattaaagcgtaaaagccgcacttataaatagtttagtcgactgttttttgaaattagtaacttaatggtctcggaacagttatgttctacctgagacacaccaacgttcactattaaagtggcgatttttttcaagatatagttaagtccaaatggtgggaattgaattaattggccatactatctgtctcgatcgtgattttaggcccggcgacattagcaagtctttaacatgtgtctcttcgaacgtttagattacgcactgtatgtgttcgatgaaatgcctgaccgaaatgtgagagttcaaagctacgctctttttatctggagataaaaggagtctcaggaatcgcttgtagatcctataaaatagaaagtgaactgctcaagcctaagctctccagttgtttctttttttaattggtctttggtctatatttgagttcttgcatctcggtaagtcggtatattggcttacacacgagatgacgaatcacagttccatcttttttattgattcagagtgtagacgtctacctctcactgagtctggtcaattttgcgtggtttgattgggtaaaagtttggagttcttggttcagacaatgaaaggtaagagctacaaattttcatcttttgattggttcaaactgttgatgactatctattattggttgtatcaaagacatgaaagtgacacaatgtttctatatgaggccaaccgttgcatggtttatttggaagaaagttggaatttttaagattcaattctttgggttcaacttgtaataaagttgttttataaacaaggtttaagttgattgtgaataaagtaatgcagaatcttggaagatgggtgctgtggtcaacactgtttagagaattattgtttattaagtacttgagtttgttttcgtggattactttctcttgcactaatctgaagaagattgttcttggagacacaaggagcacacatg

SEQ ID NO: 20737 - DNA, 3003 bp, Unknown
  misc_feature (1)..( 3003): 2750-1469P.txt file - cDNA_ID_1828477; gDNA_ID_1620784; Annot_ID_50402
tttcaacaaggaatgattcggataatgtagatcccgagaggtttaggtttgcgcgggatacatctttcgggcgtagacatctgagtttctggagcaaatcaactattacgctgtggattgtatgtttcttcaggcagttctttagatctgtaaccaaagttgattacttaacactgagacatggtttcatcatggtataagtcaatcttttgatctttaacttttctgttgtataataacttatctctcaaggcaaagatcttacagcattgcacgaatgcttcttctttttcttctgtttcaggcccatttggctcctgggagcgacgcaaggttcgatttccgaaagtatattcagagatcactagaggaagacttcaaaaccattgtcgagatcaagtatggaactaattaagattacaaactccacttcactaaccactacttaatctgatgttttaactgcttatatcttcagccctgtgatctggttcatagctgtgctattcctcctgacaaacacaaacggtacactcgttttcaaaacgtcgctgcatcgatacctctttaaaagccttcaacaatccaaaactaatagattactctgcttttctaatgaacaggattgaattcttacctctggctaccgttcattcccttcatcgtaagcaacaaccaaaacctttagactaaacctattttgtttcggtttcaactccgtaacaagaatgaatgtataaacaaactgcaggtgattcttattgttggaacaaaacttcaagtgataataacaaaactaggacttagaatccaagagaaaggcgacgtagtgaaaggcacaccgctagttcaacccggtgatcatttcttctggttcggtcgtccacgtttcattctcttcctcattcacttagtcctcttcacggtatacattcatcttttactttctactctctctccttacaaaaatgcctgaaatttaaccatttctttttcgccatcatcagaacgcgtttcaactagctttctttgtctggagtacggtaagcaagcaatcctgcattctccatgaacttgaaacgtaataatacctatacaatcatcattttcatcaaaatcttttgttatctcttcagtatgaattcggtctaaagaactgtttccatgaaagcagagttgacgtgatcatcagaatctcaatcgggtaagtggaaaacataagcttcaaaacccttcatagaaaccatcccttaacatctaacaaagtcacaaccttttggaaaacataagcttcaaacatagaactgagaaaccattccttaaaatctaacaaagtcacgaccttttggatcttgcagacttttagttcagattctttgcagctacgttactcttcctctatatgctcttgttactcaagtaagatccacgcacacacaaaaacacataaagattgaaactttcaatttcaaaaactgacatttttgaattcaattttggtgaagatgggttcaaagatgaaaccaacagtgttcaacgagagagtagcaacagcgttaaagagttggcatcacacagctaagaaaaatatcaaacatggaagaacttcagaatcaacaacacctttctctagtagaccaacaacaccaactcatggttcttctccgattcatctccttcgtaatgctcctcacaaacgaagcagaagcgttgacgaaagctttgcgaattcgttttctccgagaaactctgatttcgattcgtgggatcctgagtctcaacatgaaactgctgagacttcgaattcgaatcatcgttctaggtttggagaagaagaatcggagaaaaagtttgtttcttcatcagtggaacttcctcctggacctggacaaatacgaacacagcatgagattagtactataagcttaagggatttttcgtttaagcgatgatttaatgttttcttaattcattatttagtgatttgttaatatgctaaatgaaaccagttcttgtaaattttctatactatgtttgttaaaaccagcccttgaagctttaatttctcaatgtaaaagtctgatgattttggattttaagactatggagattcatgggtagttggtgaagagtgttcttgtcttttgggtttgagagtttgtggaagatgtgttagcagatttagaaagcatgcaaggggtttgataaaatgcctgagtgagacttggttttcctgaaacacagtggtttctgggtgtagatagattggattggcgaggattgtattttgatatggtttgtagaatctgaagactcgttttatcgccactatttttttgagtattgacaaggtgattagggatctcttgtgaatgccttcaaggatttggttgaaatgcaatttgctagatagctctttagtggaatgttatattcatggggttcgatgaatgacggggtatgtgcaaaatgagaattttaaaaaagcaattcgtgaatttatgccggacaaagggttggaaaccaagatcattggtgctttgcatgcttgtgcttacgcaggtgatcaggacctagtggccaggccaggaccgttgtatcttggaatactagatggcagatacgttgtattggggtcaaaaaaggtcagtggtacaattctcatgtttgaaaatgaatggtagcggtgttgcctatttttcattggttgtgggctcaatttacctgaaaataataggtcaactgttgcatggttgattgggtaaacataagcatttcacttttctagaatctgtattataaaacaaggttttaagttgatcgtgaataaagtaatgcagaatcttggaaaatgggtgctttgtagtcaacattggttagaggtgcttccattttctattcagcacttgactttgttttatttgcttacttttctcttttttacagtatacatgttctcttcctacaataatctgaggagattgttcttggacattggggatg

SEQ ID NO: 20738 - DNA, 3003 bp, Unknown; identical to SEQ ID NO: 20737
  misc_feature (1)..( 3003): 2750-1469P.txt file - cDNA_ID_1828477; gDNA_ID_1620784; Annot_ID_168077

SEQ ID NO: 20739 - DNA, 3003 bp, Unknown
  misc_feature (1)..( 3003): 2750-1469P.txt file - cDNA_ID_1828481; gDNA_ID_1620784; Annot_ID_50401
gttatttgtatacactctttacatcctcatattcatctgttaatttggctttgtaattgattgtaatcacatcgtgttatggtcaatcatatataaatattttaacgatatatcgagctatttttcaatttcttatagacatttgagcgattatcatacttcttgccacaataacaagaactatgggaatatacaataactattaatccctaggatggaacttggaagaggtttcactttttgatttcactttcaacaaatgcgtgtggccacataaacttttgagctttgacccaaatgttttatctaaagtgggcttgccaaaaagctcttgttaaaagacttgatcacctctagattaatagggcttgactcggacatttgtgccaataggaaacaaaaatggataaccaaaaagaataccaaaagctgttagatagaataggaaaaagtgttaagtgatcatcagtacaacaaatgtcacatctaataaacaagtaacaaagtactacacggttcatttacaaatgagcttgtttgcaatcttcaaggaaaaagtagtatgcagcaaatttcttccaagcaggaacattttgtttgttttcgcgatttgcagtagcgaacagaattgaccatgcacgtttgtattttgtaagattgacgttgagatcacagcccaccgggactggtgagattaaagcatgttagagtatgttagagttttgtaaggtaagtacgaccggataatacacatattgaattgctatttgtcattaataaatgtcatcacgacagtcgaaataacatcatttgtagtagacatgtatgttgtcgtttgttacaatattttcttaccagattagtattcattatagacgtcaatgcataaaattacagatgtacgaacgtatatgtagtaccatgtgcatggttatatcaatattcgttttaggtttgttagaatgcaaattaatcgttgtagagccatgtccgcattgcattgaaaaatgtaagtctataacacagttttacatgacatgttaatgactagggtttgccaaaatatataaatacttgatttgattagttatatgtccgaatctgttttaaattatcatacgcgcgccaattacaaattgtttatcacaatatacaaactacaacaccatatttcattatagtaaaaccaaaatttaactacgaatctgaacgtagccctgctttatgataaatatttcccgaaaaaaaatcattagaattcctataatgataaaaaaaacgctggttcttatggtaacaccatgtgaaaagtgatgactttttcatagcagtagaagtagtcaactacctcagataagtactgtaattaaataaactaattgcccaaaatgatacaactttgtcgcattaaattaaaagttaaaccttcactggatgcattaccaaaatggtcatataacaatacgtaatccaactcgctgtagctatcaatctctttatcacaaccaaccaatattcaacaatgttgttttatttatttttcatatggtttatttaatcacctcgacttttttggcatcgatcacatctacaaataaattgttagttagcacgaccgttattattactttatgaagaattgttaatctgaaaaatatccttttgatatcagttggaaatatttttttaaataatttattatgtagagcttgcggctgagtcaaataaaaataaaattgaaaactaaaagcgtgattgacaaaatgactttaaaggctgatttgtttttgaaaaaaccaagttcttaagaacacatttgaaccaatcatcgaaatatatggtggaaatatatttctaccaaagatttgttttttaaccaaataattgaacacaacgctaactgaatattttataaaactgatacagatttattaaaaattttgctaataaacattataaaattgcttttaccaattataggatgtattgtatctcttggactttaatatcgttgacgatcttgacaaataaaaagctggcgtttcattaaattggtatttacaatgagaaaaatgtgtgggatccaaaactggatataggattcgctttactgtatctggatccgaaactctaaaatatgatgtttcttatgatctggattttttcaaactataaatgatttctgaatttccgtgtatgtcaaccaatatttaaaaacagattatatttcttaaatatttttcagattttttgaaaaatattctgtaaattacaaatgcaaataaattatttaagaccgttaaggatcaaatatgtttttagtttattcaaatctctcgttctctcatatcgctattttgtacttagtttagataaaagtattaagtttggcttcttagaatttgatgtttctttttttcgtttttgctatcgacttttgttttttttttttttactattttggtgttatttatctattccttaaattttggttttgtttctgatacttatattttctgtaatttatgtcgcaacttcaaaaataatataaatactttacattgatattaaaaaaaaaaaattgagctctaatgacctttggagctcatgctcatctatggaaaaaaaaatccatgcaggaagaaccaagaggaaacggtatacaaaataatattaaataaataattatttgtcaataaaataaataaaaactcaccaaagtacataacagttcacacagcatgtttttagaaaagatcatatactattggtttcaaagtctttgactttgaatgtttgaacttttcaaggttcgcctactcgccggtcgtctcctttaaccttcgtctctgtgtttatataagaacatatacgtatttgatgattacaaaaagacaattctttatccttctttagatttctgtggaaagttcactatttattaggagagacaatttcaaaaaggaaagctttttgcttggaactgttctgtgagttctaatg

SEQ ID NO: 20740 - DNA, 3000 bp, Unknown; identical to SEQ ID NO: 5381
  misc_feature (1)..( 3000): 2750-1469P.txt file - cDNA_ID_1828496; gDNA_ID_1620784; Annot_ID_50396

SEQ ID NO: 20741 - DNA, 3000 bp, Unknown; identical to SEQ ID NO: 5381
  misc_feature (1)..( 3000): 2750-1469P.txt file - cDNA_ID_1828496; gDNA_ID_1620784; Annot_ID_168067

SEQ ID NO: 20742 - DNA, 3000 bp, Unknown; identical to SEQ ID NO: 5399
  misc_feature (1)..( 3000): 2750-1469P.txt file - cDNA_ID_1828519; gDNA_ID_1620785; Annot_ID_50415

SEQ ID NO: 20743 - DNA, 3000 bp, Unknown; identical to SEQ ID NO: 5399
  misc_feature (1)..( 3000): 2750-1469P.txt file - cDNA_ID_1828519; gDNA_ID_1620785; Annot_ID_168111

SEQ ID NO: 20744 - DNA, 3000 bp, Unknown; identical to SEQ ID NO: 5398
  misc_feature (1)..( 3000): 2750-1469P.txt file - cDNA_ID_1828527; gDNA_ID_1620785; Annot_ID_50412

SEQ ID NO: 20745 - DNA, 3000 bp, Unknown; identical to SEQ ID NO: 5397
  misc_feature (1)..( 3000): 2750-1469P.txt file - cDNA_ID_1828533; gDNA_ID_1620785; Annot_ID_50410

SEQ ID NO: 20746 - DNA, 3003 bp, Unknown
  misc_feature (1)..( 3003): 2750-1469P.txt file - cDNA_ID_1828537; gDNA_ID_1620785; Annot_ID_50409
gattttttttagataagtaaaatttttgcaatctttatcttgattagtatttaaaatcaattaatttatgttttaagtgtaaactaaaataaggtagaaaaaagagataaaaacaataatgtgtgatacacttaaccatgattggtactttggatccactaatttatgttttaagaaaatgatattccattataatgtttcccggaaacaaaccgtgatttgcggatgttacaacgtcaattagttcaacatggctttacttaaggcaaaagactacaaattcaaatagtgagactatacagataataatattattaaaaattaagtggattgtttttcaaatcattaacatggtacaaaaattatttaaatatatgtatatttgaaataatcacaatttttcacaaaacacaactcattgctaaccagctcatatgctaaaaaagacaactcatttctccactcttttgacaaaaacagagcaccaaacattaaacccttcaaaaacacaaatctcaccatcacacgtaaaaaaagaaaatatgtctatgcttcttcttcttcttcttcttgtcccattcattactccatcttcgcaatcttccattcgaaacctcctcgaagctcgcggtttaccaggtggtttgtttccagacaacgtggagagttatagtctagatgataagacaggagagctcgaagttcagctacaaaatccttgtttcgctcggttcgaaaacagagtatattttgatcgtgtgattaaagcaaatttaagctatggtgggcttgttggacttgaaggtttaacacaagaagagctttttctttggttacctgttaaaggcattgcagtgaatgatccttcttctggacttgttctcttcgatatcggtgttgctcataaacaaatctctcgttctctctttgaagatcctcctgtttgttatcctcctggtgagtcaaagtttgttcctcaaaacgttttagtgtttaatgccaagtgttttatttattggtaacatatatatgatcttgaacagaatatttttgtagtaataattgtatgtttttatttgtaggatctataatggagaagttagaaaaaagcaagatggatattcagctcaagagatgaatgagtttttttttttttggggttgtgtaagattcaaaactcaaacttgtctctttgaaacttgaacaaaaaatgtgtttttttctttcttcttttacctttttgttcggggttgtttgggaaaccgtggaaagtgtcgggagatatgtgtaaaatctggaaagaagggaggaaaattttggaactttgtataaattatggggtccataaagtaatcaattttgtcacttgtcaattatttttcttttctttatatagagggaatatagagtactttagatatttgtttaacttttgctttaatttttgaggaatgatgttttcgtttaatcattatcctctagcataatcattgacatagaattattctttgaatggaagctcaaagctgcatttgttaccaaacaggcaatcacagctgttaacctaaacacaactgacggattataaaattctagcactgaaatacctatttaaaactttcactcatttttacacaagaagtttaaaaaaaaaaaaaatcaggtagatatttcgggtaaaataaatactcccatttgtaccaaaataaatgatgtttaacttttttacacaaagatcagaagttattatatttttttccgaaataaaaacgtaatttatttatttatacatattcaataaatgataaaataaaatataaatagtcataaggaaaaaatataaaaattttgcatagaaaaaaaagaacacgggtcaatttcaaaccaccaattattctgatatcacagatgtcaatacgcgtcagagtgtgatatatgttagttatatgcgattttagtaacatttttggaattttcagtgttgaatatcacatgtatatcgttgatcaaattattttagtaaacatgttttcaccagttttatttgaatttatagtcatttcaccaattgattctagaatatatttaaaattcttaaatgatataaaggtagttgaaattagataacctaacattttttatgttaaccaaactttttaattaaaaataatatatttataggcacaacctattgtaaattttttaatttacatagttttaagtaaacgagataaaagaatcagttggtgatcttcaaatcggataaagtgttatgagtgtataggagattttgatacaaattgaattctttttggagtcatatattttgtctatgctcaccacagcatcggaagatcttccatcacaaaacagttcacatttgtggtggacacgagagatgaagaatctgtctcaaggtttaatcactgtggtattatatagtaaaaattttatgatgatattaaatcatgattttggctatgttaaaatttgaggtttttggttctaaggattttttttgctagatttatgttaatatctaaagtttaagaaatttgataataattatagttacgtgacataattcaaatttatgatgaactacatttactatatatagccctcgagataataatgttatacatttatttagtagatatattattagataattcaaaacttaaattacattattttgtttatatatttcatattatgttaaagtttaattgataaatgatatttttacgaaaaatttgtataatactaaagataaattttaaaaacatcaatttcgttttatttttattaatagtacataaagaaaaataaataaattaaattaatttgtgactattttggtatatgatcaatgctcgtctttttaagtagtaatcgtgtctgttacaggtgaatgaacccaacaaaaatcttcgacgagcatcttctgctttcttcatctctgaatgatcaatttctagaatcagatcggatatttcgatg

SEQ ID NO: 20747 - DNA, 3000 bp, Unknown; identical to SEQ ID NO: 5395
  misc_feature (1)..( 3000): 2750-1469P.txt file - cDNA_ID_1828541; gDNA_ID_1620785; Annot_ID_50408

SEQ ID NO: 20748 - DNA, 3003 bp, Unknown
  misc_feature (1)..( 3003): 2750-1469P.txt file - cDNA_ID_1828549; gDNA_ID_1620788; Annot_ID_50447
tgtattaaataaaatctttttttattcaacacatttaaaagctcatttacgtcggtattaatcatattagaccaagaccaactcggtttcataagagttaagatgaaactagaagcacgaacactacacaccgttttcatcaaccccaactgagagataaacggcaaggctttcgcaattgaaattctcacagtggttaaaggcacttggatcgatggtgccttaggcttcattcatcatcttgctacataaccgtagaggaagacgaataggtttgatctgccgaggtaataattaaactgcaattaggtgagttcatgcttcttcttcttttaactgtttcttgatttttagtaatcttcaggaagcccttacatctaattttagttgttctatctctttccattacgatatctgttttgagtctctcaaagggcttttctttcatgtgaaaatttctaacatttcttaactggaacttaaaaggagtattttgcaatttatcagtattttgagaatcgcatccagattaggttgatacaatttatctcgttttttcactcgaaattagatggttgtttgtgggactttcaatattcagtcttggtaaattttgatgatgcagattatatataattgcgtgaagaaaagagaaatggtgggtggcaagaagaaaaccaagatatgtgacaaagtgtcacatgaggaagataggataagccagttaccggaacctttgatatctgaaatactttttcatctttctaccaaggactctgtcagaacaagcgctttgtctaccaaatggagatatctttggcaatcggttcctggattggacttagacccctacgcatcctcaaataccaatacaattgtgagttttgttgaaagtttttttgattcccacagggattcatggatacgcaaactccgtttagatttgggttatcatcatgataagtatgatctcatgtcatggattgatgctgcgactacgcgtaggattcagcatcttgatgttcattgttttcacgataataagatacccttgagcatatatacatgcacgacgttggtacacttacgactccgttgggctgtcttgactaatcccgagtttgtttccttaccttgtctgaagatcatgcattttgaaaatgttagctatcccaatgagaccacgttgcagaaacttatctcaggctctccagttctagaagaattaatactcttcagcactatgtatcctaagggaaacgttttacaattgcgctctgatacgctaaagagactcgatatcaatgagtttattgacgttgtgatttatgcacctctactccagtgtctgagggctaagatgtactcaacaaagaactttcagatcatcagttcgggtttccctgccaaactagatattgatttcgtcaatactggtgggagataccaaaaaaaaaaagtgattgaagatatcctcatcgatatttcgagggtcagggatctagttattagtagtaatacttggaaggtatacatcttaacatttgagcatatttgtttaaaaatattcctccacaaaagtttctcaccgtaacatttttttgttcacttatgttaccaggaattctttctatactcaaagtcaagaccattgctccagtttcgttacatatcccatttgaatgctagattttatatatctgatcttgaaatgttgccaacgcttcttgagagctgcccaaaacttgaatctctcatattggtaatgagtagctttaacccttcttgagagctcctatttacacatattgtttgagataacctcttatatgtatctctctactcaatttgttttcttttatttattcttttgttcctgtttttgcaggaaatggtcaagaaccaatccacgcgacgtcatggggagaagcgagaaccaaatgtgatggtttcaacagtgccttggtgtttggtatcgtcgctcaagtttgtggaattgaaacgttcaatcccaaggtatgaaggagaaatggagctagtaagatatgtcctgacgaattcaacagtcctgaagaaattaaggctcaatgtttactacacgaagaaggcaaagtgtgccttccttacagaactcgttgcaataccaagatgctctagcacatgtgtagtccttgttctttaattacttgaaaggtattgatgaacttttcgtttaaggtcaatcttttggtcgttaaattagttgattttcggaggctttgagccacatgtaaattttgcagttaagtccttcttatgctggttgctgctcatgtaataatcatcaatcaccaagtttgtttcgaatttgatggatacttccaccaagtcgctgtcaaatattttgtatgctcccatggataattattttgtatttttgtaactgcatggtgattccttacatttcaggcttgttagctttgcaattttgttatttgtattttggtttgagttaattacgagttggattgttcttcttacctactttatggttcctctgaataatctattcgtagtcttatcaaaaccaaatccaaaaaagtacttgtgaatctatttcctttttaattattgcgttcataaatgaaaatgacaccatttttatcatagtgaggagctcaaatttcaaaacttttgatccgagacatctaagtgtaccgaaatttgaaacgggttatgtctccggtgtaatttcgacggcggatttcgtcgattacagtcgtcgccaccgtatattaatacacatttggaagctcaaataatgggcttcttgcttgaagcccattgacgtcggtactattgtatttgcaatgattttaaacgtcgtcgtacaagtaataaatcagaacccctaaaacccttttcatctctccggacacttcttctcccgacactttcctcttcaaatcccaaacggctatctgactttggaagaaagagagattcagagtggagaatattatg

SEQ ID NO: 20749 - DNA, 3003 bp, Unknown
  misc_feature (1)..( 3003): 2750-1469P.txt file - cDNA_ID_1828549; gDNA_ID_1620788; Annot_ID_168222
caactcggtttcataagagttaagatgaaactagaagcacgaacactacacaccgttttcatcaaccccaactgagagataaacggcaaggctttcgcaattgaaattctcacagtggttaaaggcacttggatcgatggtgccttaggcttcattcatcatcttgctacataaccgtagaggaagacgaataggtttgatctgccgaggtaataattaaactgcaattaggtgagttcatgcttcttcttcttttaactgtttcttgatttttagtaatcttcaggaagcccttacatctaattttagttgttctatctctttccattacgatatctgttttgagtctctcaaagggcttttctttcatgtgaaaatttctaacatttcttaactggaacttaaaaggagtattttgcaatttatcagtattttgagaatcgcatccagattaggttgatacaatttatctcgttttttcactcgaaattagatggttgtttgtgggactttcaatattcagtcttggtaaattttgatgatgcagattatatataattgcgtgaagaaaagagaaatggtgggtggcaagaagaaaaccaagatatgtgacaaagtgtcacatgaggaagataggataagccagttaccggaacctttgatatctgaaatactttttcatctttctaccaaggactctgtcagaacaagcgctttgtctaccaaatggagatatctttggcaatcggttcctggattggacttagacccctacgcatcctcaaataccaatacaattgtgagttttgttgaaagtttttttgattcccacagggattcatggatacgcaaactccgtttagatttgggttatcatcatgataagtatgatctcatgtcatggattgatgctgcgactacgcgtaggattcagcatcttgatgttcattgttttcacgataataagatacccttgagcatatatacatgcacgacgttggtacacttacgactccgttgggctgtcttgactaatcccgagtttgtttccttaccttgtctgaagatcatgcattttgaaaatgttagctatcccaatgagaccacgttgcagaaacttatctcaggctctccagttctagaagaattaatactcttcagcactatgtatcctaagggaaacgttttacaattgcgctctgatacgctaaagagactcgatatcaatgagtttattgacgttgtgatttatgcacctctactccagtgtctgagggctaagatgtactcaacaaagaactttcagatcatcagttcgggtttccctgccaaactagatattgatttcgtcaatactggtgggagataccaaaaaaaaaaagtgattgaagatatcctcatcgatatttcgagggtcagggatctagttattagtagtaatacttggaaggtatacatcttaacatttgagcatatttgtttaaaaatattcctccacaaaagtttctcaccgtaacatttttttgttcacttatgttaccaggaattctttctatactcaaagtcaagaccattgctccagtttcgttacatatcccatttgaatgctagattttatatatctgatcttgaaatgttgccaacgcttcttgagagctgcccaaaacttgaatctctcatattggtaatgagtagctttaacccttcttgagagctcctatttacacatattgtttgagataacctcttatatgtatctctctactcaatttgttttcttttatttattcttttgttcctgtttttgcaggaaatggtcaagaaccaatccacgcgacgtcatggggagaagcgagaaccaaatgtgatggtttcaacagtgccttggtgtttggtatcgtcgctcaagtttgtggaattgaaacgttcaatcccaaggtatgaaggagaaatggagctagtaagatatgtcctgacgaattcaacagtcctgaagaaattaaggctcaatgtttactacacgaagaaggcaaagtgtgccttccttacagaactcgttgcaataccaagatgctctagcacatgtgtagtccttgttctttaattacttgaaaggtattgatgaacttttcgtttaaggtcaatcttttggtcgttaaattagttgattttcggaggctttgagccacatgtaaattttgcagttaagtccttcttatgctggttgctgctcatgtaataatcatcaatcaccaagtttgtttcgaatttgatggatacttccaccaagtcgctgtcaaatattttgtatgctcccatggataattattttgtatttttgtaactgcatggtgattccttacatttcaggcttgttagctttgcaattttgttatttgtattttggtttgagttaattacgagttggattgttcttcttacctactttatggttcctctgaataatctattcgtagtcttatcaaaaccaaatccaaaaaagtacttgtgaatctatttcctttttaattattgcgttcataaatgaaaatgacaccatttttatcatagtgaggagctcaaatttcaaaacttttgatccgagacatctaagtgtaccgaaatttgaaacgggttatgtctccggtgtaatttcgacggcggatttcgtcgattacagtcgtcgccaccgtatattaatacacatttggaagctcaaataatgggcttcttgcttgaagcccattgacgtcggtactattgtatttgcaatgattttaaacgtcgtcgtacaagtaataaatcagaacccctaaaacccttttcatctctccggacacttcttctcccgacactttcctcttcaaatcccaaacggctatctgactttggaagaaagagagattcagagtggagaatattatggaaggaactttagatgaagagaatctagtcttcgaaaccaccaaaggtatcaaaccaatcaagagtttcgatgacatg

SEQ ID NO: 20750 - DNA, 3000 bp, Unknown; identical to SEQ ID NO: 5428
  misc_feature (1)..( 3000): 2750-1469P.txt file - cDNA_ID_1828580; gDNA_ID_1620788; Annot_ID_50438

SEQ ID NO: 20751 - DNA, 3003 bp, Unknown
  misc_feature (1)..( 3003): 2750-1469P.txt file - cDNA_ID_1828587; gDNA_ID_1620788; Annot_ID_50436
agcccaacttctttccaagaaaatgtaatccgaaaaccacatcgaccaacctatgatctgtgaaagacttgtaatgtttcagtaaatcattaaagagagtaaactaaaaacaggaaaattcaacaaaagatcaaaagaactcactggaagatacttggcttctttcttcatgatggctaatgagcttccaagacaacctacacgctgttatatgattaatcagagacagtgtttatatttctccaaatttgaaaaatcatgtttcagtgaaagacaaaaacacctgagccatgacccatccaataagccaatcaatgtcacttcgatgattgcttaagacaagtgcgtgttctttccctgaaatttaatatcaagattaaaaagaatcattatattcaaatactgaagactaggttgcataaattgatctttaccaattaactctagagtctctgcatcgacgtataaattgatctgcagcaacaacaagacgaatcacatatcagactatgatacctctatgtaaaccacaacaagattcatgaaaatcaccaacctttatacaagcccaccaatcaaacaaccatatgagctgcaaccaaagtaattccgcaacatttttgtttattcttctatacaaacttcttgagaatggacgaacaatgatgaagaacacaagctggaaacagagaaaatgtgtccaaaaacctttagttgacacaagtttcgattttataacagacattatagaacataaaatgtttcagctatgtctcttccattgagaagacaatacaatgaagatagacttcttttggtatcagagcaaaacaagttttaacaaaaatggatgacctgaatgatgttgacgatgagccctgagatcaagaagaggacaccaacagggataaagacaagagccgcagggatcttcatgtctgagagagataaggaacaacacaaagcagcaacagaagaatatgaaaaattgttgaagaagacaccaacagaggatgactgttatctttgttctcaaattctttttgggagattagagaattgaaaataaggaaaatccttgttgttttgacgcaagagcgtttttcatgctctattttaagcccatcaaagctatgtctctctctcttacaatatttggttgccaaacacatggagacatgtgcgcatgtaaagctctcccatgaagtaatagagtaaaatgcaattaaaaacagcaaaactcacatatgtcataaaatttgattttggcggtttttgagtttatttttaacttcacggttgttaaatccggatttcacattggcaataagtggtgagatcaaccttccttatatactactaaagtccttttccatctttctaatatgtgatttttctccaatgttaagttttatggagttttaattcagaatcaattgacaaaaagtagaaaagcacatgttccttatatactactcaaatcatttcccatctttcgaacgtcggatttttctcaaatgttaagtttcataaacttccaactcaaaatcaactaacaatgtcttgaaagttacacgtttcttataaactactcaagtcccttcccatccttccaatgtgggatttttctccatacatccccattcccctcgaaataatggctcttctagccactaatctcgacataatccatcatacctctcgagataatgctcgtttctagctatttcacggaattgggctttattttggacaatcaattagtgagggtgatcaggtctcttttctgggccagattagcagggtagggtgtgttcggactctgatacaatgttaaattcgggtttatggactttcaattaaaaatcaattggcaatgagttgagagacctacatttcttctatactactcaagttacctatcatctttttaatgtcggatctttgtccacaaaaacttttgcaaagatcaaaaaacattaatcgtcccatgactctagaataacgcccgaaccattgcaagtggttcccttgtaaaatgctgcaaactgtccagcagctagagtgctaccttgaccaccttcaaataggtgtacaaccgcaacatgtgtagaaccaaaggtgtgcctagaatttttaatgccaaagtaagaaaattaatttcatgttctttttcttttggtacagtacttggtgggattcaaaaatgtacatactatatacaccaaccgccaaaaaatgagattcaaactacagtcaataagaagcaaggaagactaaatagagggagctagtgattatctgacaatcaaatcaagtagacaaccccgatggatgtcctctccctacataagggagttcagttcttactagcactttgagctccaaaacaaattcaatatttgaattttcccaaagcctggtcaagcaatatatggtcaaatttaattgaatgtttatataaaaatttatggtaactgtagaaaattgtaaactattgttaaatattttataagaaatataatacaaaaatttaagcaatatatttacttatttaggtctgggcatatgagtattctgggagccagaaattttagttaaagtttatatatatataatatttaattatatattatagtagatgatatatttaaagaatagattattgtttacatggtctagagaattgttttttttttcacctaaataaaactaaaattatattttttatatgtagtattgagtttttgaccatttctcaacaaactaacaagcatcactggttgtggataaatatttgaataaaaagaactctgacttttgatatatagttttgaaaatgacattatttccctctcactgtcagaggaaagaacgacgaaaggacgaattgttcttccgcgtatttactcatatatcccttcttgatcgacgaccatccaccatgaaaagggatcttccgttggcctcgtagatttaatttatcgacatctattcagaatg

SEQ ID NO: 20752 - DNA, 3003 bp, Unknown
  misc_feature (1)..( 3003): 2750-1469P.txt file - cDNA_ID_1828626; gDNA_ID_1620790; Annot_ID_50479
atagaaaatttaatattatcataaatgtaaagaacttgctaatcaagttatgatttttgtataaataatcctattagctaatgaataaatagagaaaacctgtattattgctaaagtttcctccaaacttatcagacaccaatcgatgatgtataatataccatttttcataacgtgattctattatttttaccattcacaatatttatcatacatttatatttgattttcatgtgtatgttatatttgatgcatgtggaaaaaataattcaaaattaaaaaaactacaaaacgtttttcttattatatcacaattatttaacaaaaaaaagttttgagctattttgtttataatgtttttatgcttttcaatcctacatttcactatcagaaaaatgaggccaagttataaaaataaaaataaaaactaaacccaataagcccattaaggcccataagtcaatacagcaaaaacagctcatctttgctaaaacgtagattactgatttaatctaccggaatcgaaaggcaataccaaacttccggtgaaccggaatcggatccatttgacttgccgtagaaattaggaaattgattacagtgttcttcgagaatggagaagaaggagatggagaagttgtgccaaaggtgcaaacaaagctacacagatctttcaaacgaaacttcctcttgccgttttcatccttccttcttcgtttgtcgtcgtcacgatgaccagaaaaggttatgtctcctacaaaccctaaatctattcactaatgaagaatctcacatcccaagcagcttgattcgctaatttataatggcaaagcacaaattgttgagatgggttttgaaagccatccactttattgtattaaggttctggatctatagctaatttagttagataccttagattctttgtagccaataattttgaagtgatagatgatcatgatctcagtttaatggctatttgtgggtcaaaggtcatgttttggttgatttgaaactagctcttagccttctttgcagataattagctactgttgtatttgccttgcccatttcaaactctttaggcataatcatgaagctgtttaatgattgtggtcactcttaaacgtcgaatactcttaaccactgaggataaaaaattatctcgacaagttttcaagctgtctagtggcctacactttgttctgctagttgaaaaaatggtttagtcgacggttaatagcataaataaagagtggtgaaaaatacagtttagagatttatcatctgattctatgttgcgtgttttatcttggtaataaactttggactaggaaggaacgtaggtgtctctgttccgttattggctcctttggttatttacttacttcctctgtttgtgattctctctgttccatgcattgtagttacccacatagcatagacttaactatcttttgttgagcttttatcgttatgtgcaacgaatgagtttattttggtgtttatggttgttggttttggcattcatattcttgctggtacctgatatttgttatttcattttaattttaaggtgtttcgaaactgaatatatatttattccaaaccatgtttaatcgacttgagtatgatgcatctgtttgatttctactttttactaagaagtggaattaactagaacttgttttttttaatcaataaatgaaggtactatgaattgaaaccagatgatccaccgtatgctgccaagttctatgattgttgcggggcagaggatcctaatgcaccaggttgtgtcacaaaccctcacatttcatatgatgactgatgtatgagtgagagctctcataagcctttttttttccataaaaacatcatgtaaataatcttaaattattgtagccttcttaggagtaaaagacttagcttgtgatctctctgctgggtactgtcttgaaccacttcttgcattgcacacagctacagagtgagctgttgtgttacagcttttgtcggttttgtgaataggagtgtcagaatcatttgacgtgagaaaattccggaacgactaacgattttatgtttatttgtaaggaatgttcttgtttctatggttgctttaaaaagagtcaaaactttatattctttttatgaacaccaacaacaaaaatctaaatcagacatataggttaattaactaatgcaagtaaatgtggaaaaatttacaaaacaaatttcagaagatctagaagtaatcttgagacagtacttatgagaaataatcttgcactatcatccctcttttctatgaacaccaagatttctgatgcacttataatttcttattttgtgtcaacaatagatatccaaacaaaggtagagaaaacatttgaatgtggacaaattataattatattaataaattgactgtctttaaagtttaaactaagtttagcagatctcattaagagaaaaaaaaaatcaacatgattgagtagagcacatgaagtccacatgacacaactccaagatctcaaactctctggtcttaaatcagatcgttagagagatttattctcacctccattattaaataaagccaacttgttttggtccacttcactcacagcttttattattcttcttttttcttttgtcatcataatatattactccccaaaaaaaaaaaaagcaaaagcggtgagaaagaaaggagagagagagggtgaccactatggagacagcgcaacccattactcattattagtctctcctaccattcttttgcctaaagttcaagactttgtgttcttctaacaagacccttaatcgtaagttcaagactttgtgctgttgtagtcctgtaagaagaagaagaagaagaccatgaaatcgatctgacttctcgcagcaatgctgaggatttagctgcatttattactctttttttgtcaattcaatttctcttttctttgaagctcttctcttgcaacaacaatg

SEQ ID NO: 20753 - DNA, 3003 bp, Unknown; identical to SEQ ID NO: 20752
  misc_feature (1)..( 3003): 2750-1469P.txt file - cDNA_ID_1828626; gDNA_ID_1620790; Annot_ID_168269

SEQ ID NO: 20754 - DNA, 3000 bp, Unknown; identical to SEQ ID NO: 5457
  misc_feature (1)..( 3000): 2750-1469P.txt file - cDNA_ID_1828630; gDNA_ID_1620790; Annot_ID_50478

SEQ ID NO: 20755 - DNA, 3003 bp, Unknown
  misc_feature (1)..( 3003): 2750-1469P.txt file - cDNA_ID_1828666; gDNA_ID_1620790; Annot_ID_50467
cagatagagtgacacgaatttagcttagctaatcaaatcctcacattccttatcttaaataaccttcgaaaaaagtgtgatccacatgtctgtataaaacgaaccgattagattgtgacaacaatacattccaacaatttatccatcacttttccatcctccaaaatttttgcagtaaaatctcttttcactttcaaatcaattatgtcacatcccaccgtagaacaactacatgctttccatgcacaagaaagagagatattctctaaactagttcaaaaactccgaagaccaccagctgagtcacttcttgtcatggccacatggctttggtttgaagactttggcttcggaaacattttctccatcatcacggtttttagcgatctactcattgtagatctcgctaacgaggctgtcttgtgctttcggtgccttgaatctgaccagcccccaaatgatgtcagtcagatccctctcaccgagagattcatgaaaaatgacatatcccttcaaataatccacaatcatcgatacactgccattacgggaataaagaactttttaaccactatttgttctagaatattctctgatatccttcaacgagttcttccatcttcatcatcctcattcatcaccaatctccgccaccctctcatcattcccggtttccctcatccaacttttgggagcatcaacgtattgcctaatatcgttgctagggataatcttccaaacgcaaattcatttctttttcctcatggtctttggggctggaacgctaaccatgtcgcgactgataaagaacggacggtatttctaacgttttctcgtggttttcccgtgtcacatgctgaggtgattcatctcttcaccgagatatatggagaagattgtgtcgaaagcgtttacatgccagaggacggtggaaattcctccaatgacaacacaaattgcaatggtcatcagcaacaaccactattcgcgaagatggtcttggactcggttgttaccgtagatcgtatactcagcggccaggaaaaacaaaagtataagatcaatggaaagcatatttgggctcgtaagttcaagaataataaagacggtcttatctaattaaataaagtcataaggatttttagtttctagtttttcaatttgctggtgtcaaatcccttatcttatattgtagtctaataattagaaaccatatgtaacgtttcgacgatggtatcttcacttaatttgacgggaatgtgtttcacttaagtttgaggtttgaggtgactttagatatccaatatatttcacatttcttttaagcaagagtggtactcaatatttttatgcactaccatatctctaatgttttctcaacataaaatataattcacacgtttaaaataaatagcttttgatcaaccaagcttctaacgatactacgctgatttgggggaaatcaccatcatcgtcaccgtcactgtcaccgtcggttcctcctttgaatgaattttagtaggatccctttgatgtcattgacaaccgccatcatcatcgtctctattaccaccgttgatgctgccacgagcaccactgacgttaaaaccaccaggactaccaccacaacaaccactatcaccactaacaaagagaccaagttttttcataaactaccttccatgtttaattactatagtttgaatatagagtgctagtttcttaatttattaataaaaaaatggtagtcttgcacaaatttttcttctttataaagaaagatatcacaaaattttatcaattaaatttattgaataaaacaaaagattttctctcttctattgtttacctttctttttagtaagtaattaagtctaaatgtgcaagaaatccacagataataaattcaaagagataaactttgatgttgttagaaatggaggataatcatacaatagacggatcggtttctcgagtaattgtttttttattaaacggattataccaaatttagaccgattttcaccaataatcaaatcaaacagaaccgaaccaaattaccttcattaattggaaaaaaatcgaatttagccaaaaataaccaagttaaccggatttttttaaaatgaatacagagattatcgacagtggaaaaaggaaaagaactcgaaaagaagaccataaacgcagaaccataagcatacacagacgaatgttaagcgattagttttaacacatttcataggtcttttaaatgtatattatcgagtctttgatatcgagaacatatagttttcgatatcttttagtgtttttggatttgtggacctgctggggttaaaagaggtgtgttggaagagaaatgaagccaaatgagtcaagtgaagtaattggagatgcagagcagtgcaaaagcgtcatcactaattagtttggccgcctctgatagaagacttcctaccgatagatctttctcaactttgtacacaagatagagtaggatataatctctttattgatcaaagtatgataacaaagtataacaatcaaggcacatcaaatcaatttataaaccctagtcacgtttcaagaatccaaataggaaatacacaataaatattgtcttgtagagattgcaaatagttgttaagacgaagaacaaactatttttatttattacgtgggtcatattcaaaattgaataaatgtaaatttactgtaaatgatgcacttttggataaatcctgacaaaaactagatttatatcgttcataaacctttcacatatcagccattgcaaccatatgaagttttgaaaataagcttgtaggtgatttttgggaggatttactcacatgactaaattgggcccatgagtgaaagtgaagcccatttgtaaaataaatgtcacactacacacaaaaaccctaaaaatcatttcagtcttctcaaggtttttgaaatttctatcttccatttccatctgatgaatctctgacgatg

SEQ ID NO: 20756 - DNA, 3000 bp, Unknown; identical to SEQ ID NO: 5439
  misc_feature (1)..( 3000): 2750-1469P.txt file - cDNA_ID_1828690; gDNA_ID_1620790; Annot_ID_50459

SEQ ID NO: 20757 - DNA, 3003 bp, Unknown
  misc_feature (1)..( 3003): 2750-1469P.txt file - cDNA_ID_1828706; gDNA_ID_1620790; Annot_ID_50452
tacaaaaaatgtctacattgatagcataacgtagtagcacaactactcaactattattgaagattaattgtaatttttaattttgtatgatagtattttacaaatgttagtaaataattttattaatatagaatttttattaacgctatgatagaatttttctaaccttgaaaactaaaatactcataccgccaaacacttagacaaaaatttctctttttgcatcaaaattatttttgccatattttctcgagaaaaccctaaaacttaaccatcactcctaaagctctctcaaaccgacgaatcgattccgggagccagtgattaaactcgccgccttcgtcgttgaaggtagccaccgtcgttgaaggtagctgcgacacataacctcttttcggccctaattcaccgattaaaccatctctttgagtcccaaattgaaggcatgtctctctgaatatgtagctttatttcttccctttcgttaacctagcttgtttttttttagctgtcgtgaagctcgacaactattttgtttcttaaagtctgaatttatagatttctctcattcgatacttcaaagtttttatcttttgcatgcccgtgttctttgcaaaattataactatttgtttgtgtggtttgatttaggcgtagctggataaataggatgcacaattttgctttgtaaaaatcttagatttttagataacttgtattggcctgataacttgtattgacatgttctcgagatttagaagtttttgttgacattctattacaacaatttgtattgacttgttttttgaatttttaaatcttttcggtgcttgtaatgacatggtctttaaatctttatattatttttggaacttgtcaaacacattcttgcataaacaaacacaaacaaacacatgaaactagatatactcattcaatatttttgttttgcaagtgctgctgtgtaaataatgagaatttgaagctgatatttggctcttattacacgacaggttagtaccatcttaaacattactgtgacttttgtcttgaacattattgtggattattatgtgttgaacatttctatgggttctgtaagccaatatatagcatgaacagcccattggaaaataatttcattaaactccggtacaccggaagttctagatcgaagagaaatagaatgaagaagctaacaaacttttattattaattaacagaatgttacaacaacttaatcaacaatgtcattaactaagcttatatacataagattaaaccaacatcaataaccagaaataaccaatatgtaaaccggtccatatttgcaataattatatctcagaacattcattaaattgttataaatgccatacgtatggcccatatatttttaatactaaaatagcaattttggtgaagaattttccgtaaatccatcacgaatgttagtaggtatgtggtcatgatggatttgttgttttgttgttacagtttcaattacgagtgattgattttaaacccgttgttgatagtttggcaactcattgctatgagttttggtgattaatgatcacataaatttttgaaatttggttgaagaattagcagcaatgaaataaacatgaatttactatcgaaacaagatgttatcaccaaaatatgttggttttaccacaaacaaaaatgcctgatatatctttggtttagaaaagtaagattcacataacatgtattggtacacgtgtcccacctcctttcactgtagatccgcccctatgttgagcagacagataaaacaacacgagcattaaatagatgggacattccatagcccacaagcaatttcacgaaattaaatgagaaatgggtcaagattggatcactcgaaaaactgaggaaaaaaagaagaatacgtaaggagttgaaacggaacgtggactatgtcagcccgaagaacacgtttaatgactatggccccatgcaggaccattcccctttttttgaggtgttaccctgttagatccatatttgttttgaacactatcaaaaaatatttgctaaagaaaaacactatcaaaatatgttacagtattctcttccgttttgcctaaactcgaactcataactttaaacctcctcttttaagattaccatatgcatgtacataaactggtttaacaccaagacaccaaattttaaccacaaaacaccaaacaccaaatacgttggatatcttaacctatttcttactcacttaacctttgtgtgtgtgtgtgcaagtgtattactatatatataaagtaaaatatatgcatatattgttaaaaatatcacattaataatggagacggtttataaaagataagaagttttttctttcacttattgttagttaattttgaataaaacaaatcataatttcacatagtattaaacctatatatgtattacttaaaaaggtaaaatttgatacgagatgaataaacaaaaaaaaatcaaccatttcaaatttacatgttaaaatatctcgatttggatatagtcatatagagatgattttatattgatatataaatcgccttcacttattggcaattagtattgagttgaaaatctataatttttctacatgcattgattcaactattatctttcacatcatgcattaaattagcttgggttccatcgtacattagtgtatacatatgccatcttcttcatcattagataatttttcttataaaataaatgcaattataacaatttgattggatatgtcttgtcatttagttgcggaaaaatcttgacgtctcttcttgtctgaagtcttaagtatataactggaaagtccgtattggagttcaacaaaagaagaaaacgaagacttttagttagatcctacattactgaactcattatatatatctggtgagacattctcctatatatgcagtttcaactttcaaagccagcaaataataaacagaggagaaatatg

SEQ ID NO: 20758 - DNA, 3003 bp, Unknown; identical to SEQ ID NO: 20757
  misc_feature (1)..( 3003): 2750-1469P.txt file - cDNA_ID_1828706; gDNA_ID_1971986; Annot_ID_177751

SEQ ID NO: 20759 - DNA, 3003 bp, Unknown; identical to SEQ ID NO: 20757
  misc_feature (1)..( 3003): 2750-1469P.txt file - cDNA_ID_1828706; gDNA_ID_1620790; Annot_ID_168239

SEQ ID NO: 20760 - DNA, 3000 bp, Unknown
  misc_feature (1)..( 3000): 2750-1469P.txt file - cDNA_ID_1828748; gDNA_ID_2926140; Annot_ID_138983
tcccgttacttcatcaaatctcttgtacatccaatctcgatagaaaccgccaccaccgccattattgaagtttcccgccattataccataaactaaacttatatttttttcttcgaaatcgttttttatttcttttgatgttgttttgatttgttggtgaatgagaatgaagagtgtcgtggattatatagaggattttttacaactattttacgactaaacactgtagacgctcagaaattaggtgtacctacccagcaacgcgaaaaacattttccaatggtattatacgacaactatgcgactattggacgacaaagtgaaaatagtcgtagtatcgtcgcctgttttgcgactaatgtttaaagtcggatatgtagtcgtcaatatacgactactttacgactacttatttttttcagtaatgtcgtcgtcaaatagtcgtacttggacgactatttaccgactaaagcttgtagtcgctaaaatacgactatggaacgaccaatttgtctattgtcgtaacgtcgtcgtccatcagtcgtaatatagtcgcaaaaaaggacgaatacattgttagtcgccttgcgtagtcgtcgtttgcctattttcttgtagtgattgactcattctctccatacatgagccaagctttgtaccccggcataaacccatccccatataaatgcatccaaacttaagataccagaataactcttaaaattagttatgtagaacacggacaatacatttgttttgatttgatggttactggttggtttgtcgcaaatgccatgaattgtttaagaccttctgtatattctggcgttagcaactccgtcaccggatcacgcatgggctggtccatccatgatcaaaaataattaaacggattcgaagaaaccatttctctctggttctattttgttgcttggacgattttgtcaatgagggtagaaaaaataaagatgagaattatcaatttttccgacgagtttttgacggatgtcagacgagttttcgactgattttcgttggagatttgatgatttttttataaataactatacgcacggctatttgaccggacggctacttaaccgagtgtattttgttggaattttgtcggaaaggtacaacatattctgacgaatattagaggtgtcaaaacggatatattttggtcggaaatccgtcgaaatatttggtcggagtttcgttggaaatcactgacgaattgtcgaccattttgaatccataggaaagtttcgacggtgttttgacgggaaacatgtcgtcagaaatccgtcggaatatcattacgaagccgtcgaaaatttctgactatttatttaacgtcggaaaatttgtcaaaaaagtctttcagcacaaagaagagctatacaatggattttgactcggttcctctcaacaagacaaataaggcttttgtgcgtcgatcccttagctcctaattcagattttttttctagattctctttatttctaatcaatttacttattaattcgttcttttgtttatctccctatgtttttttagtttttgaaggttaaaatcctgccaactttagtattatactatatatttcttccttgtatttcacctttggataatttcatgaattattcagacgaaaaaaaaaaaaaaaaacaatattcgttctttgtttgggaaagaggcccaataagggcccaactatttctcacctatcgaaaacaaaaaattctgaaaattgttcgtcgtcggtacgacggagagaaaacgtcttccaaagacgaattgaggcggtggaagaagaaaaaaaaaaatcaaaatccaatttgatcttcaaagtagtgaagaaagaagagaagcaatcgaaattctctgacgatgttgttacaaccccaaagatcctcttatcgattatcgtaattcgtagaaaacgaagcagagagaaaatgggaggcgaagatgataaagataagaaatggaatcctccaccaccgcagcagaagccggactcaaggccttgggaagtcctcgcggcttttgtaatctgcgcaaccgctactactttcgccgtgagtcaaaattcattagttttgttttcgttcatatctcgaaattgtgtttaagaactgtttaaagagtttgataacgttatagttgataaagttgtagttattcaatggaaacttataggctctgattggtgatataaagtgtgaatttcataggctttgcttgaggtcagagtagctttagttttccggttttgacgtgctttcgtgcgtgctcgtacgcgatgattgatggttttgaaatgattagttagagagtttgaaaaggttatagttgattcttttttgttctgacattcttagtagtaatggaaaattataggctggtgatataaagtgtaaatttcataggctttgcttgaggtcagaatagctttagttttcgggtttttacgttctaacgtgcgtgctcgtacgcgatgattgatggttgagaaatgattagctagagagtttgataaggttttacttgattctttttttgttgtgacattctaagtagtaatggaaaattataggctctgattggtgacatatagtgtgaatttcattggctttgcttgaggtcaaaatagctttagttttcgggttttacgtgctttcgtgctcgtacgcgatgattgatggttttgaaatgattagttagagagtttgataaggttctagttgattcttttttgttatgacattctctgtaagtaatggaaaaattatagagactgtgattggtgatacaaagtgtgaattttcataagcggcgtactttaagcgagattgatcttaatgtttgttggtgtgagggtttgatgattggttttagttgtgtcaatgttgtatcgaattatgcttgagaaagtagctttttggttttctgtgctttcgtgctcatagtcgaggattgatggttgagaaatg

SEQ ID NO: 20761 - DNA, 3000 bp, Unknown; identical to SEQ ID NO: 20760
  misc_feature (1)..( 3000): 2750-1469P.txt file - cDNA_ID_1828748; gDNA_ID_1620794; Annot_ID_50489

SEQ ID NO: 20762 - DNA, 3003 bp, Unknown
  misc_feature (1)..( 3003): 2750-1469P.txt file - cDNA_ID_1828785; gDNA_ID_1620803; Annot_ID_50526
gctgcttgttgttgtcaaggcacacatgtttattctttatttttgtcaaatatttgaatcaagatcagctactattctaagaaactggctatttctaaaataacactcacgaattagccattatttataaaatggtaacggtatattcgagattccagtccatacatgttattaataaagaaagattggatctccatataaaaaatagctgtctcttacattgtagcactagctaaagatctttcaatactacgtacctagtcatacaattctttgaatatggttttaaattgtatgtgaatattattaagtgagaatagtatcgacataacaagtatgaaatcttttatttctatatattttatttaacaacctataacaaacatttcacttcaaattctcactatatgtagtccatcatcaactactttcttttcgcatatctttgaagtttttggttttactaaactaactctatcataaaaggagaaagctttaaatttaaccagaaatgaagatgcccgtggttgtacaattcttcataatctctcttctcctcacatcttcattttatgtactttcaagcgctgattcatgtaagtgtatacttaatctagttagttattttttaggttatttatcattttgaaactagttgtctgaaattctaagatttgatttgtgatggtgataaatgaattagcagcatgcggtggaaagtgcagtgtgagatgctcaaaggcagatcgaacacatgaggagtgccttgaggactgcgatatatgttgccagaagtgtaattgtgttccttcggggacttatggaaacaaagatgaatgtccttgctaccgtgatatgaaaaactccaaaggcggatccaagtgtccttgaacattctttgaagatcctcatcacatacatactatctacgtactatatgtatggaaattacatctatatatgtttgatgtatgaaataagttctgtgagcttaatgaaaattttgttatcttcaatccgattcctaaacacatcaagaataaatcatgtcgaggtttatatttctcagcttcaatttcactaaacgaataacttgggatactatgatggaatgcagaattgagaatttactctctcaattgtcttaaattcataatccaagatctacaaggggtaagtattaggactaaccgattaagggtttaataattatgtaattcagagactctaacgctttgcatcgaccaaatactacattgtaacataacacaaactcattggatgtgaaagtacaaagtagtatgtctttataataatttgtttccaaggaaaaaagacgagaacaaaaactaaaacaagagaaagatcatcccatgatatttaaatagagaatcaatctacaaaaagacggcaacctgattttcaaaacaagaacagtagatcagaggcaagccggatagtacataaaaaagactcaaacccaaaccaaagaggctttctccaactagaacgtaagtctttttttgagtcgctctgttttcgtttgtggaggaaccatatcaagtttcgacgctcacaagctcatactcgatcagcgaaagattgttatcatccttcacggtgatgtctgtgggctcctctgcaacttcaacacgtccccatctatcaactgcaagcctcatagaacccttgtacatgtcgatcttcgcattacgcagagtcactacactgccttctttcatcatatccactggataaaaatgaataatagcatcagtcataaatctataaaaagtacatgagaaatactcaaattatgcaaacaactaactatttccataaagcaatccactctcctgctattatctgtttcacagattcacaaccagtatagactataaagatgccaacttagaacagaaacttgccattaaagaagctaactgagaagagaagcagtctcttaaaagaccatcacaaaagcatttattctctcaccttggtcatttcttgcagtaaagattatgattccagtctcatcaccaactaagcattcggcaatccgcatctgacgtgactgaggacccatgggacgacctcctcctctctgcatcaccatcttcgtgttgacaactttcacattcagagagtggccattggttcctggtctcaactcattaacctttgtgaacacaggcttcctcaaagcagacgttgcctcagccatttttataacaaccctacaaaaattagccataaacaacaacatctgctgtgatcagcacctaacaacaatttcaatatctgattagacaatcaaaacctcaaatgcgatcaaacaggtttaagctatcctcatttctcacataagaaacgttttaacaattcaacaaaacaatttcattctccatacacaacaaattcaataaaacgcagcaacatagataatgaaagctaaattacacaaaagatcatatactttgatcccagaaattcacggaatctcagatcggagaaatgaaattgacgtgaagaaaagtgtagtaacgttaggaagatggaattgaaacaagaaaaaagctagctagggtttttggaaactcacgtactttttgattttgagagaagagacgacgacgatgactttagcgattagatctgtggaggcgatatacacaaagacgcggcggtcttctttataactctagaactcagatattaatactcaccgtagatccgtgacctcaacacgtgtcatgtttctgaaacatcttcattaaaactacccttatatttttttatatatttaagattgaccttataactttgactaatactgattacaccctctattctccgaatcggttatcaaaaccaatttcactggaccgtgatatcagaaaccggttcactgaggtgggcgagattttttgttgtcactctcctctcctcgttcttcgatgctcatccattagaggaggagccgatgtttctgcttccatg

SEQ ID NO: 20763 - DNA, 3000 bp, Unknown; identical to SEQ ID NO: 5580
  misc_feature (1)..( 3000): 2750-1469P.txt file - cDNA_ID_1828789; gDNA_ID_1620803; Annot_ID_50525

SEQ ID NO: 20764 - DNA, 3003 bp, Unknown
  misc_feature (1)..( 3003): 2750-1469P.txt file - cDNA_ID_1828805; gDNA_ID_1620803; Annot_ID_50521
tcgtcggatcttgacatttccgactgtggaaccatccgaatcaatctccatagtcaccctattggactcactgattcaactcgccggcgacattctcacattcaagtcgaaacacttctctaccaataaacaaagcttcagagaaactctcaggcggatccaaaacctacttgttgtcttcgaagagattcggatccggatcagaaattcgagacgctacttccatgactctgccgccgcgtcgagcctcaaggagatccacgtcggcttccaaaagctcaagttccttctagaagactgcacgagagacggagctagactatgcatgatgatgaactcggatcaagtctcggatcatctccgggtcctgactcgatccatttccaccagtcttagtgcgtttcctgtcgcctccgttgacttaacgaccgaagtcaacgagctaattgatttagtggtgcggcaagctcgtaagtacggagtccaacctgaaacaaatgataaacgggccgtgagctccattaataggatccttgctctgtttgtgaacagagtcgtcccggatccggatgaaattaacaggatcttggatcacgtagggatcagaaaatggggagattgcgttaaagagataaactttctcggagaagagatagatgcagaacggttagatgagaagaagaagaagagtagcgatcaagtcgagcttctcagtagtttaatgggattcatatgttattgcagatgcattatacttggacggatcgagagagatgatcatcataatcatcatgaagatggtataaagaaagatcatgacttgatccgaggattgaaagttgaggatctcctttgtccaatttcactagagattatgacggatcctgtggttatagaaacaggccacacttatgatcggagctccatcactaaatggttcggatccgggaacatcacgtgccctataaccggaaagattctgactagtaccgagttggttgataacgtatccgtgaggcaagtgattcgaaagcactgcaaaacaaacggcatcgttttggcggggattagtcggagaagaaagagtcacgatgacgtggtcccggagagtttggctgcaaagggagctgggaaactcatcgcaaagtttctcacttcagagttaatcaatggcggtgaagagatgatttacagagccgtgagagagattcgtgttcagaccaagacaagcagttttaataggtcttgtctggttaaagctggtgctgtgactccacttttaaagcttcttagctccgtagatatcaggattcaagaaaacgcaatggctgggatcttgaatctttccaagcacgttaccggaaaatctaagattgcgggagaagggttaaagatacttgtagagattctcaacgaaggagctaaaacagagacgagactatactctgcttctgctctgttttatctctcttccgttgaagattacagcagattgatcggagaaaatccagatgcgattccgggattgatgaatatcgttaaaggagatgattacggcgattccgccaaacgtagcgcgttgcttgcggttatgggtttgttaatgcaatccgataaccattggcgtgttctcgccgccggagctgttccgattcttcttgatctgttgagatcgggggagattagcggcggactcacggcggattgtttagcgacgttggcgaagctggcggagtatcctgatgggacgattggggtgattcgtcgtggcggtttgaaactcgcggtgaagattttgtcttcgtcggaggattctccggtggcggtgaagcagcattgtgttggtctgattttgaacttgtgtcttaacggaggacgtgacgtcgttggggttctggtgaagaattcgttggtcatggggtcgctttacacggtgttaagtaacggcgaatatggaggaagcaagaaggctagtgcgctgatcagaatgatccatgagttccaggagaggaaaaccggttcggttgaaccgaatcttcaaagaggacggttcgttcacgcctggtgattttggtacacagtaactcttgagtattttaaagagttatttaccataaagaaaactaaataattttggttaagggtgaaattcttttattaatttttatgtaaagggtttagtgtttgtatatttagctcgggttttattttcataaaccaaagagctactgggatggcaataagcttcagtttttttaagaagctgtgtccatattccataatgtaattataactgaatcaataaaaactattacaattaaaaaaaaatacctaacttttttgttttgcatgtttcctaaaactaacattacaaatttcttggtccaaactaaagacaagaaaagtacctagctttctttgaggtaagtcctattcactcacatgatgcactaggttggaaacgcaaaatggtgtttgaagcagtggaactcgtttgtttgcaataacagggataaggttgtttaatctagttgaagtcgcaaaatgttgtttgagatctttagaattagcatctagaaatctcatatttcgtgtgacttacataaaaacttattttatgtatataagtttaatcaaaactacgtcgttttaatctttttaagacaataaacaatgttacaaaatttgtttgttaacatttcaaaattttaatataaaatgccaattgagtttatgctataaaattaattcgatcgtttttatgttcgattgattttgaattggaagcatgctattagtctacatataaacttttcaaatgtagttgttaattaatttgaatttgaaagcccacaattcaattcgaatttagttagttttgagttggaagcccactatatcgcaattatattacaatttaatgtaaaaaaagcgatgaaaaaccagaaagatttcagaccgaaacctaaataatattgagtaagtttattcgaagaagagatg

SEQ ID NO: 20765 - DNA, 3000 bp, Unknown; identical to SEQ ID NO: 5568
  misc_feature (1)..( 3000): 2750-1469P.txt file - cDNA_ID_1828817; gDNA_ID_1620803; Annot_ID_50517

SEQ ID NO: 20766 - DNA, 3003 bp, Unknown
  misc_feature (1)..( 3003): 2750-1469P.txt file - cDNA_ID_1828829; gDNA_ID_1620803; Annot_ID_50513
atctcgttgacttcaatctggttagattcactctctgagagtcacttattttagggaaatatgtactatagtcagatatgtaatctgcttaaataactacacaatcataagattctggtacagactcagacaaataatactaaccgcatgttcaagcttgatactctgtcttttcgtttggtttggtaactatttttactttgttatcttttcaaaggtttatgacatctgcaaaactctagctcatcattattttcaagagaagctcccagtctcgctgtcgtatgttcaagcttctgtactcctgtgtttgggcttgcaggagtcagatttctcgagcatcgaggtataacatatctactctttaaaataaatcgatgatctggaccagctgaattatgtttcaccacacatgtggagataaatttcttgacacatctggttgttctaaattggatcatgacgttgacttacagagacaaatgcagttggagaggggccaaatatactctcttctattgaaggttggaaagaagttatacaaatatttgaatggaatcgcaacaaaagagctcgaatccaccttacctcggttgaaagatgtaagttcagatgggaaaacttacataacatttccatgttcttttgctcagtcataatattccctcatttttgaaaattaacaaccctaagccctaaatacatacacgaatatcgagctgactgaaatgattcatggttgcttttggttgcagagagtgcttgaacctcacaaagtatcagtagacgaagatctcagggagggagcaaaagaagttgaggtaatcgcttctgtttccgtgcatgcgtatattttgttttggtttccatgtaaaatcgaaacaccactcacactctcaatgcttgggtttaaaggaacaaatgagggcaaggatagaagaattgttggaccctgagctacttgaccaatttgctattggggacaaagaagctgaggctttgcaaaagtcgaagatctcttcaagtggtcttatcagtatagagtccaccaaaactgataacaagaaagagaagccaagtggttttgataaatcagccaaaaagagaggcaatgataagcattcctccacatccaacaaaaagagaagagcctgagatggaggttgatgtcaacaattgtttttttgtaacagtgaccagaaaattttgatctttggtctttttacgaatttttgtaaccaggttgaataatttattaaaattatggtttgatcatacaatttttttaaaaaaacttacagattctgtttgagcattctacaaccataatacaaagttttctattaactataactatattgtttatctactgcaatgtgtgaaactggttcacatctcggcagcaaaagacttcccacatccacaggtttgtgtagcgttagggttcgagaaagagaagcctccaccaatcaaagcatcgctgtaatcaagctgcattccaaaaagaaagagcatgctctttggatcacaaactgcaaaagaagtgagtacaaattaaaaacctgagccttcaattcacagatgtaaaaatactttactgcagaagacaacaagagactgcaaaagacaacaagagactagaagtctcagttcaagaatcggcagctaagtagtatataattcaagctgcacatcaaaaagaatcaactgaccatctacttgacaataaaactttagcctatttgatcgaacaatctcagccttttttttatttggatgcatacttgaacacagaaactgacattcatattgtaagtatggcaagtctacatcatcaagaaactagctgatcttactctcagaccttattatctcagattagaagagttgatcctacatagtgatggaatagtttttacctatagtgaatccctggtattcgatagtggaatcatctggtcttgcatttgctctgttttcaaagtccatcgtgtaggacatacccgagcatcctccttgtttgactccaattctcaagcacaaatcttccccacgttctgatctcatcttactcagatgcttaagtgcattttctgacagagatatcgccggcttcagtccctccattgcaggtgcagctgagatattcaagagcacaagtcactacactttttgaattcaagagcagaacctcactacacatatctaagtaacagctattaccatctttttaagaattctcagacatcaccaacgaaagttatcaatttcaatagaaagtttctaattttaaaaccagaatggcaataacaacaaaaacaacccagaaaaaataaaaaggactctcataggaaaataaagcagagcaattttgtgaatcaattcgaacctggaaccgaagcggatcgaacagaaaggcggtttctccgattgaggttgagattcacatatgacaaagaaggaaacgaaatcgaattacatgaaaccacagaacgtagacttgtgttggagatctttagaccaagaaaagttggatttgaagacgtcgtgattccagtagcgaaagccataatcttctgagaattgaatcgccgagctgaggaattaatctctctgctgattcaaatgcgtgtagtagaagaagaccaatgaaaaaaacaaatctttttgcataacaattttttaagtccacatgttatttgttttcaggtaggtgattgattatttttgttatgaaccctaataaagtcgttctctttcgaatctatcgggtcataaatttaaacccgatttcgacccggtggatagtcgggtcacacccgtacctaaaggaatacacacacacatagcgcgaaggaaacaaacttcatcttcatcatcgtctcttctcttctactccaattcgtctcttttagtctcttacactttcctaattcttcagtggttggttttcacacagcgagagtttcaagcgtctatgcgtaattaagcagctccttaatg

SEQ ID NO: 20767 - DNA, 3003 bp, Unknown
  misc_feature (1)..( 3003): 2750-1469P.txt file - cDNA_ID_1828849; gDNA_ID_1620803; Annot_ID_50506
catacatagttcaaagagctgaacaataagatgtcataaaaaattccaaacgtttgtgctctttgtaattgtatcttaagtagagacaagacactgagacccaggaaggactcataactcttccaactaagtccacactaaggcctttagcagagaacaagaaggttacctcctgtatccgatccaagcttcggatattatcaagagtatccagagaaggtgaaagccctccatgcaaacagaaaacctacaaaatttgatgaagtcaaaaagctgtacttagaaaaagatgtatcaaacaccaactgagaaagaacagctctaacctgactctctatgagggcggtaagaggaagataatcgaaaaggtctgtaaaatacttccagacgttagcatttccgtacttcctcaagcattcgtcataaaaaccatagctgaaacagagaagcaaaacatgcatcaaaacaggatagtactttgctgatcagccagaaaccaatgaagaaaagtacgattcgctcaaatataagcttatttcaaaacaaaagcttacacttgagtaatctgccgactctcgtgattccctcgtaagattgtaagtctatccctgtatcgcacttttagtgccaccaatagagaaactgtctctactgaatagtagccacgatctgcaaagaacaaagcaagacaatgagaaaccaacaacactccttttaaactaaatctagctgtcaccatcttatggtacaccaacgaatggttaaagttccaaggatctaaagactagaattcaagggaagtgcaataatgaaagtgagcatcaacaagtctctatattgggaagtttcagtacctaccattccaaaaaaaaacagaacccacaagtaactcactctagataaataaaaaggtggatacttttccaagaattcaccattttggaatgatccaaaaacacagatctaaaatgagaaaaaaaagtaaaaaccccaaaaataaaatcgaaagaagaagaaagacagacctacatagtctcccatgaagaggtagttagtatcaggagcgttgccaccgatacgaaagagctcaataaggtcataaaactggccgtgaatatcgccgcaaacggtaacaggacacttcaccggctgaacattatattcctcgacaaggatcgctctcgcttgatcgcaaagcgtcctcacatccgcctccgataacggtttacactccatcagctgctcgatctgacggtccagatctccgttcgacggcatcttgaaaagccaccaccgatcctatatacgaaaattacggcggataaagaagatgaatcgccggagaatctatcggccagagctaagatatccgaatcggagagatcaaatcctcctagcttctctggtcttcgatagttcgatgtctctctctctcacctggctgagaaaaaatggatattcgttttttttttttaaagactaaaagtgggtcgtgtccaaatagacaaagtataaatgttttatgacccggttaaggttcggttttgtgttaattttattagtctcgccaattgttataaaacttatgattgttttttttctttggttcaaaataaaattttgagttttagttgttttttcttctgttaaattcgttggtgttttcaacttaattctagttgttttcggtcaaattatcaaaaaaaaaaatgaaaaaaaaaagagagaattgagaccaaaccggatcggatttgaattgtgaaccgttacacgtgggtagttggagcagagctattgtcatttgaacttgtctaaacgataagtatatatggacaaatcatctcctcctctcatccggtaattataattagtcaactaatgttttcatattatgttttagatttgacaaatttgcttttaagtttttaatgttgacatgatcgtcgactatgaggcaagttcctcgtcgaacaaatgggcctggagaatctggtagagcggcccatggtaacaaaaataaaagaaggggcgttccgagaattgaactcgggacctctcgcaccctaagcgagaatcataccactagaccaaacgcccattgatgatagctctgacaatacatatttatatttagaaaacattttgaaccattaattttgctattaaattgatgcaaatcaaacctaattaaagtttatcatctaacacagtatgaaaattcatagaccaaacatttttcccttgcatattcttcccacttgtaagaaaatgtgaccgagctttttaggtaaaattaggatattatactttacttactacaaacgaatattaataaaccagatttagtttgaatagactggaatattatgtttcgtttttataaccttaaatcaaatcctcacttacgcataggtaatgaaagttgaaagaaaaaaaaccctaactctgctttttacttggtttttgatttacataatattaaaccggtaagtttgatttggaattgaaaaataaaccaatttcgtacgtaaccttccatttagctccgaaggttctgattacatacagacatgaagatttctttgggtatataagcaaaacaagctcctctctttttcttcttcttcctcgttccgttgccttaccctcttccctcctccgcttccaaaatcagcgagagagggagacacatagagagacagagagattgctcctaatcagaagcaatctcaccattgaatcatctattttctaccaaaaggaagcttcttttgcttttcattttgccaagtttccgtctaaatctctctactttaaaactccggcggccaacgtttccaccgatcctccgacttctttccgagtttcatcttctaacaaaggaacgaagaagctctcttcaccgtttgagtaacgtgatccggtctacaaaggttttaaatcaaaatctcttgctcagaatttttcctcgttttttgtgatttctcttaagattttccgatg

SEQ ID NO: 20768 - DNA, 3000 bp, Unknown; identical to SEQ ID NO: 5557
  misc_feature (1)..( 3000): 2750-1469P.txt file - cDNA_ID_1828853; gDNA_ID_1620803; Annot_ID_50505

SEQ ID NO: 20769 - DNA, 3000 bp, Unknown; identical to SEQ ID NO: 5557
  misc_feature (1)..( 3000): 2750-1469P.txt file - cDNA_ID_1828853; gDNA_ID_1620803; Annot_ID_168713

SEQ ID NO: 20770 - DNA, 3000 bp, Unknown; identical to SEQ ID NO: 5623
  misc_feature (1)..( 3000): 2750-1469P.txt file - cDNA_ID_1828875; gDNA_ID_1620806; Annot_ID_50553

SEQ ID NO: 20771 - DNA, 3000 bp, Unknown; identical to SEQ ID NO: 5600
  misc_feature (1)..( 3000): 2750-1469P.txt file - cDNA_ID_1828875; gDNA_ID_1620806; Annot_ID_168874

SEQ ID NO: 20772 - DNA, 3000 bp, Unknown; identical to SEQ ID NO: 5623
  misc_feature (1)..( 3000): 2750-1469P.txt file - cDNA_ID_1828875; gDNA_ID_2926172; Annot_ID_140167

SEQ ID NO: 20773 - DNA, 3000 bp, Unknown; identical to SEQ ID NO: 5600
  misc_feature (1)..( 3000): 2750-1469P.txt file - cDNA_ID_1828875; gDNA_ID_2926172; Annot_ID_199584

SEQ ID NO: 20774 - DNA, 3000 bp, Unknown; identical to SEQ ID NO: 5622
  misc_feature (1)..( 3000): 2750-1469P.txt file - cDNA_ID_1828883; gDNA_ID_1620806; Annot_ID_50551

SEQ ID NO: 20775 - DNA, 3000 bp, Unknown; identical to SEQ ID NO: 5622
  misc_feature (1)..( 3000): 2750-1469P.txt file - cDNA_ID_1828883; gDNA_ID_2926172; Annot_ID_140165

SEQ ID NO: 20776 - DNA, 3000 bp, Unknown; identical to SEQ ID NO: 5608
  misc_feature (1)..( 3000): 2750-1469P.txt file - cDNA_ID_1828916; gDNA_ID_1620806; Annot_ID_50540

SEQ ID NO: 20777 - DNA, 3000 bp, Unknown; identical to SEQ ID NO: 5608
  misc_feature (1)..( 3000): 2750-1469P.txt file - cDNA_ID_1828916; gDNA_ID_2926172; Annot_ID_140154

SEQ ID NO: 20778 - DNA, 3000 bp, Unknown; identical to SEQ ID NO: 5606
  misc_feature (1)..( 3000): 2750-1469P.txt file - cDNA_ID_1828928; gDNA_ID_1620806; Annot_ID_50535

SEQ ID NO: 20779 - DNA, 3000 bp, Unknown; identical to SEQ ID NO: 5606
  misc_feature (1)..( 3000): 2750-1469P.txt file - cDNA_ID_1828928; gDNA_ID_2926172; Annot_ID_140149

SEQ ID NO: 20780 - DNA, 3000 bp, Unknown; identical to SEQ ID NO: 5605
  misc_feature (1)..( 3000): 2750-1469P.txt file - cDNA_ID_1828932; gDNA_ID_1620806; Annot_ID_50534

SEQ ID NO: 20781 - skipped

SEQ ID NO: 20782 - DNA, 3000 bp, Unknown
  misc_feature (1)..( 3000): 2750-1469P.txt file - cDNA_ID_1828943; gDNA_ID_1621163; Annot_ID_57155
taaacaaaaggaaaattttcttgctttctcttttgtttggtttctccgtcgacgataccaaaggcgattcaacttgatttgtttgatccagcgttttgatcatgaaatcgggagagcaaccacatatactcaatatacaaccgccagaatgatgatcgacgatgagattgttcaccaaatcaacttcaaaccggatcttgtggttatattgttgaattctttgtaacaccaggagcttctatcatgtgactatctcatgagttcttaccaagaggtagaatccagctctgtctcaagtatatctcttttaatgcacttggagttttctgaaatttttgctcaaaaaacatggttgtggcaaaacagagcctttatctgacatagagatggcgcttaagaacaagctaataaatgatatgttgtcttaagttttagtttctatctgaatgttgcatgtttggtcagaatgtacttcaccttctagtatttcggctttaagttttagcttctagtatttcggcttttagtatatgtgtaataactttgagactgaatgtttggtctgaatgtttgtgtttggtctgaatgtttagtctgaatgttttctgtttatggattaatgagatgagtatttgtgtttggtgagtatttgtgtttggtgaatgtttggtctcaatgttttcagtttatggattaatgagatgagtatttgtgtttggtctgaatgtttgtagtttacggttttgtttcatctgttaatgtcatgatttgcttcattttgcaggactgggaagaatagaaattgtgccaacatcaattgtggaagataccagattctttaaatgtatgtactgttgtgagttttatcgattaatgagtttggtctgaacttaaccatatccattaatgaatgaatgtatgtgtttggtctgaacttaaccatattgattaatagatgaatgtgtgtgtttggtctgaactcaaccatatcgattaatagatgaatgtgagtgtttggtccgaacttaacaattttggttacaatcgagtaatgagttttatttcatgagtttcatctattaacttatgtacttaaccattttttattttttttaagaaaccctcttaaaaattccaccattgaaccataaaaattataaaaaactctaaactacaaaactatcaaaattaactaataaacaattcgaagaaactcatattaaaaaccaaccaatgtggatgctctaagtaagcataaagaagaactatcacgtgtacagcttaaagtcttaacccgcaaatttctctagcttatcgtggttgattcacttcatcttccctttcacatttgagatatcactgctttaatttcctgaaatctagttgaaaattgccagatttgttaagttttatgaagttctaactcaaaaccaaaataaactgatcaatatgttctttatatattgtttttggtccgatcgcactttaatgggattttttaacaggtttacatcatacttagatcttggatattcattgattagctctgtttgagctgtgtttagtacatgttgaagcaaaagtggtccaatacaaattctgaattaaacttaattttgttaagttgactccacattttatcaatttttttcttgactaacgtgaatttttcgtgtgtgttaaattaccttaattatattgattatcaagtatcaatggtgcaactggtaaaggcaaagtctacaaatcgtctttttggtctcagcagttgatcattgggatagacaacttctgatttattaatggttaatcaaagtatctttttattggaaggtaatggagaagttcacgataggtcttatatgagttttgctagttttgtgtgtaatacttaaagtttaacaaaaaaaattatcgctgttaaatgtcatttagaattttttttagaaaagaaatagaaaaaacttaaaaggtagtacatactctttatgtaagaaataaatattaaatgttataaaacaatttaacaaatggcgtgattatgtgagttataaatttgatattttttgttttcaacaaatttttagtcttgtacattccattttatcaaagaatttaattctacacacttgtttttattgatgatatctaaattctaaataacaattatttagtattaaaaaaaggaaaaacataattcttccatgatgcgttaaaattcttaaaatataatataggtattcaaaaatttattcttataagctcatcattttttccattttttatgtttttatttaacaaatgaaaacactatattatagatgataaatataattttatccaattaaattaatgttaaataaattatatttttattttaaatttcaatgtcccgttttaattagtattattatctataataaatgattttaaaaaataataattcatgctaaatataatgttatcccatcaaattaatgttaaataaattatattattattttaaacttcaattaactttttaatttagtattattagccataataaatgtttttcttaaaaaacattaatgcatacaaaatttaattgaccaacaacacatgtaaaaataaatttgttaattttttttttaattaagggaacaaaatggatatataacttagtatatgcagattttttttttttagaaaatgacagccatcaaaaggcgcgcagccaaaatggatatataacttagtatatgcagatttttttttttttttgcttttttatctctttaagaagaaaaaaaaagttaaacattttctcaacatgtaaacatctgatcgacagacttgacatatgacacaatcttatgaattaaccatattttatataataaaatagaaactattttctttgttacaaacttttcatttatatatttccccacctttgaatctgatccaaacttgtaaaattttctcctcaaattttgttgctctactgctacaacaatg

SEQ ID NO: 20783 - DNA, 3003 bp, Unknown
  misc_feature (1)..( 3003): 2750-1469P.txt file - cDNA_ID_1828943; gDNA_ID_1620806; Annot_ID_50531
gtttaaacaaaaggaaaattttcttgctttctcttttgtttggtttctccgtcgacgataccaaaggcgattcaacttgatttgtttgatccagcgttttgatcatgaaatcgggagagcaaccacatatactcaatatacaaccgccagaatgatgatcgacgatgagattgttcaccaaatcaacttcaaaccggatcttgtggttatattgttgaattctttgtaacaccaggagcttctatcatgtgactatctcatgagttcttaccaagaggtagaatccagctctgtctcaagtatatctcttttaatgcacttggagttttctgaaatttttgctcaaaaaacatggttgtggcaaaacagagcctttatctgacatagagatggcgcttaagaacaagctaataaatgatatgttgtcttaagttttagtttctatctgaatgttgcatgtttggtcagaatgtacttcaccttctagtatttcggctttaagttttagcttctagtatttcggcttttagtatatgtgtaataactttgagactgaatgtttggtctgaatgtttgtgtttggtctgaatgtttagtctgaatgttttctgtttatggattaatgagatgagtatttgtgtttggtgagtatttgtgtttggtgaatgtttggtctcaatgttttcagtttatggattaatgagatgagtatttgtgtttggtctgaatgtttgtagtttacggttttgtttcatctgttaatgtcatgatttgcttcattttgcaggactgggaagaatagaaattgtgccaacatcaattgtggaagataccagattctttaaatgtatgtactgttgtgagttttatcgattaatgagtttggtctgaacttaaccatatccattaatgaatgaatgtatgtgtttggtctgaacttaaccatattgattaatagatgaatgtgtgtgtttggtctgaactcaaccatatcgattaatagatgaatgtgagtgtttggtccgaacttaacaattttggttacaatcgagtaatgagttttatttcatgagtttcatctattaacttatgtacttaaccattttttattttttttaagaaaccctcttaaaaattccaccattgaaccataaaaattataaaaaactctaaactacaaaactatcaaaattaactaataaacaattcgaagaaactcatattaaaaaccaaccaatgtggatgctctaagtaagcataaagaagaactatcacgtgtacagcttaaagtcttaacccgcaaatttctctagcttatcgtggttgattcacttcatcttccctttcacatttgagatatcactgctttaatttcctgaaatctagttgaaaattgccagatttgttaagttttatgaagttctaactcaaaaccaaaataaactgatcaatatgttctttatatattgtttttggtccgatcgcactttaatgggattttttaacaggtttacatcatacttagatcttggatattcattgattagctctgtttgagctgtgtttagtacatgttgaagcaaaagtggtccaatacaaattctgaattaaacttaattttgttaagttgactccacattttatcaatttttttcttgactaacgtgaatttttcgtgtgtgttaaattaccttaattatattgattatcaagtatcaatggtgcaactggtaaaggcaaagtctacaaatcgtctttttggtctcagcagttgatcattgggatagacaacttctgatttattaatggttaatcaaagtatctttttattggaaggtaatggagaagttcacgataggtcttatatgagttttgctagttttgtgtgtaatacttaaagtttaacaaaaaaaattatcgctgttaaatgtcatttagaattttttttagaaaagaaatagaaaaaacttaaaaggtagtacatactctttatgtaagaaataaatattaaatgttataaaacaatttaacaaatggcgtgattatgtgagttataaatttgatattttttgttttcaacaaatttttagtcttgtacattccattttatcaaagaatttaattctacacacttgtttttattgatgatatctaaattctaaataacaattatttagtattaaaaaaaggaaaaacataattcttccatgatgcgttaaaattcttaaaatataatataggtattcaaaaatttattcttataagctcatcattttttccattttttatgtttttatttaacaaatgaaaacactatattatagatgataaatataattttatccaattaaattaatgttaaataaattatatttttattttaaatttcaatgtcccgttttaattagtattattatctataataaatgattttaaaaaataataattcatgctaaatataatgttatcccatcaaattaatgttaaataaattatattattattttaaacttcaattaactttttaatttagtattattagccataataaatgtttttcttaaaaaacattaatgcatacaaaatttaattgaccaacaacacatgtaaaaataaatttgttaattttttttttaattaagggaacaaaatggatatataacttagtatatgcagattttttttttttagaaaatgacagccatcaaaaggcgcgcagccaaaatggatatataacttagtatatgcagatttttttttttttttgcttttttatctctttaagaagaaaaaaaaagttaaacattttctcaacatgtaaacatctgatcgacagacttgacatatgacacaatcttatgaattaaccatattttatataataaaatagaaactattttctttgttacaaacttttcatttatatatttccccacctttgaatctgatccaaacttgtaaaattttctcctcaaattttgttgctctactgctacaacaatg

SEQ ID NO: 20784 - DNA, 3003 bp, Unknown; identical to SEQ ID NO: 20783
  misc_feature (1)..( 3003): 2750-1469P.txt file - cDNA_ID_1828943; gDNA_ID_2926161; Annot_ID_139737

SEQ ID NO: 20785 - DNA, 3000 bp, Unknown; identical to SEQ ID NO: 7784
  misc_feature (1)..( 3000): 2750-1469P.txt file - cDNA_ID_1828945; gDNA_ID_1621163; Annot_ID_57157

SEQ ID NO: 20786 - DNA, 52 bp, Unknown; identical to SEQ ID NO: 5598
  misc_feature (1)..( 52): 2750-1469P.txt file - cDNA_ID_1828945; gDNA_ID_1620806; Annot_ID_50529

SEQ ID NO: 20787 - DNA, 3000 bp, Unknown; identical to SEQ ID NO: 7784
  misc_feature (1)..( 3000): 2750-1469P.txt file - cDNA_ID_1828945; gDNA_ID_1621163; Annot_ID_173755

SEQ ID NO: 20788 - DNA, 52 bp, Unknown; identical to SEQ ID NO: 5598
  misc_feature (1)..( 52): 2750-1469P.txt file - cDNA_ID_1828945; gDNA_ID_1620806; Annot_ID_168834

SEQ ID NO: 20789 - DNA, 3003 bp, Unknown
  misc_feature (1)..( 3003): 2750-1469P.txt file - cDNA_ID_1828945; gDNA_ID_2926161; Annot_ID_139735
attactgcaaaatctgtgatattttcgtccacaagaaatgtggcgagtcctccgaatatatcgagcatccatctcaccccaatcacactcttcagcttctaagtactagaggaaatagccatgactgtgatttatgtggaaagaacatcggggatctattctatcgttgtgagatctgtgacttcgacatggatctatactgtgccaagtatccaccaccagaggttattaacatttccaagacgcatcaccacaagctcaaccttctcaaggagctgatccagtttgactgtgatgctaagtgtggcactaatgattaatgggtttccatacaaatgttatgaatgcgatttattcttccacaaagattgcgtatggcatccgccagaggtaaatcacactttagaggtaaaccactcttaccactccttgcaccctcttaagcttcacactggtcaactaccgaattattctgaccgaaaatgtcgtctatgcgcaaaagaaattgaagttggattgttttatcattgttctttgtgtaatttcaccttggatatgtcttgtgttttaaatccaccacaacgatatctttggaatttgaaagctcatgaccaccaactcaccctgctcccaagtctccgttcttttttatgtagtgcttgcggtttgaatggcgaccgaagcccttacatatgtgttcaatgtgactttatgatccatcaagtctgtcttcatcttcctcgtgtcataaacattaatcggcatgatcaccgcgtctctcgaacttctgttcttggtgttgttaattcggtatgtggagtttgtcgccagaaggtggattggacttgtggaggtttttcttgtccgaggtgtcctggctatgccgctcattccctatgtgctactagagaagatgtgtggaacggaaaagaactcgaaggagtacccgaagaaatagaagatatagagccatatgtggtaatagatgacaatacaatacaacatttcagccacaaagagcattacctaagactccacgttaatagtgttctttgtgatgacaacaagcggtgcagcgcatgcacccatccaatctgtctccaatctttctacggttgtatggattgtgacttcattctccaccaaaactgcgctggatttcttagaatgaaatggcatgtgctacacaatgaacgtcttactctagttactaatgagactgaagtctttaagtgttatgcttgtgagagatggtccaatggtttcaggtaccagcaagggtataaatcattcgatgttcggtgcggttcaatttctgagccatttttccatccaagtcatcccgatcatcccttatattgcattttaccttacggaaaaatattctgcaatggttgttacaagttcaaatatggaatgctcgtgtgcgttgaatatgaatgtaatcatttaatatgcttcaattgcgctactctaccaccagtggtaaagcatagagttgacgatcatcctctctcactatgctatggtgaaaaggctagtggtatatgttggtgtgacatttgtgaagccaaagccgatccagagatatggttctacacgtgtaaagaccaacgtgctagtttacatacaagttgtgtgcttggagacttttcagggctcatgccgggaagcacactcaagagtgcgagcaattcatctgaggtgctgctcaacaatattgtatctcgtccattttgcagctttttagagctcatgccgggaagcacgctagagagtgcgggcaaatcagttgaggtggggctcaataaaagtacatctcgtccattttgcatctcgtgtaagttgcattgcatttttcctatcatcttgaaaagacttggaacctcagatgaatacttttgctctattctatgcatctgaaagcaagatgtctagggaatggggttctcttttagatttcttgtaccattataagttgatttccttaatgtattatttatctaagaatcttgcagttttagttcgatatgatctagctgtttcaaacgtgttatgcctttcgttttctattataaaacatcaccttagaaaatgaagaacacactactatcggtcttgtctgttcataaggtatatttaggttacattgtgcataaatgaagaaggatattgcttcataaaagctggagcagcaatctatctatataaaaggaagcaatatccttcttcattttattgtccatctagaagcaatatcctagaacaaacttcgattttggatgttcgttgattagctctgaccgttgactcggatcataagtttatgtagaccttaaggtttcggttttgagctgtgtttagtaaatccacggttgatcttacaaataacaatagatggtcaaattgtagatgttgtagtagtagtagccatttttctttaaaaacttttaaataacaaaactcattctcatcgtttaaaactaaaagacacaaatgaaaattattaatcaattttaaatttagttccaatacaatttttgaattttcggtaggcaaacataattttgttgagttgactccacattctaatttttttttttttttaagaaataacgtgaatttttcttgcgtgttaactcatcttaaaatcattgaaaagtaatactccaagttgaccttaatatacttggcgtcaaaattggcttcattgtgcaagttgttcttttttttttttgtcaaagaattgtgcaagttgtgatcttaataagttgattaggactggcaacttctgtcttatttaagattcattatcataagtgtaaagtaatgaagaagttcacgatagctaggtattatacaagtttaattaatttcgtgtgtgctacttaaagtgctacgaagaaactttgacttttctaatatatatttctctatcttgaatccgattcaagcttgtgaaagtctctctgcaaatcttgttgctctgttgctacaacaatg

SEQ ID NO: 20790 - DNA, 3003 bp, Unknown; identical to SEQ ID NO: 20789
  misc_feature (1)..( 3003): 2750-1469P.txt file - cDNA_ID_1828945; gDNA_ID_2926161; Annot_ID_198794

SEQ ID NO: 20791 - DNA, 3003 bp, Unknown
  misc_feature (1)..( 3003): 2750-1469P.txt file - cDNA_ID_1828950; gDNA_ID_1620807; Annot_ID_50572
ccttgtaccctatgtaacatgtcttgttagtataaattttgggtcatgttgtgttgatgactctttagcgcatttcttattgacaaaaggtatggaattctctagagacgctggaatgatgatggagaataagcggaatgtctgctctctcggagaaagcagtatcaaacgccacaagtctgatctctctttcagttccaaggttttgcttatcctagctagttttcatggatttctcggtcgaaatagtcttcggtacaacaaattgcatggtaatgatccgtccatctttgttctcttaatggcaaacaggagaggaaggacaaggttggagaacgtatttcagctcttcaacaaatagtttccccttatggaaaggtaactttgttttttttggcaagcaaatcaaaagaatctgtctctcagctcatacttttctctaatgttcacagaccgacactgcatcagttcttctagacgcgatgcattacatagagtttcttcacgaacaagtgaaggtctgcagttcaataccaagcatgattcattcatctttatctgagttcccatgttcttttgtacaggtgctaagtgctccgtatctgcaaacggtacctgatgctacgcaggtgagtatgatcttgaatctcaacttcatttatacttagttcactagttctactctgcatctgacagatcttcacttggaacttgaataccttgcacggactgattttcccgtcttttgtaaccaggaggagctggagcagtacagcctgagaaacagaggattatgtcttgttccaatggagaatacagttggagttgctcaaagcaacggcgctgatatatgggcgcccgtgaagactcctctatcaccagctttcagtgtcacatctcaatcaccctttagatgaccaattcgactaatcacctactacgatctttgtgttaagcctaaaaaagaatgaccaattgttatttttctgatgatgcctctgtaacatatatagacagagagcacatgatgttggtttagaacagctcatggttggcaatgattgttattattattcgactgcttaatgcatccccttactttggacttgtgtaatatgcccaaacaggaaccaaatgattttaatgcaaagtaatctttatcccaaaaaatgcctcagatatcttaagcttttctttgtgtgattcttacctacagcatccaatacattattctagatctaaagacccaaggcaagctttctttcagtgctgaaggtatgatcgtggatttccctaatacatatagctttctttcagtgcttgtaatagtgccaaactgctgaccacagaattaagattatcctttcataagaacattggattaaatacattaccactgagaattgcaaaggttcagaacatacagactgttgataccaagggaccaaatagcttggacaaagataagataagtcggtcataatgtgtttttaactactagattgcaatgctttggcatatgtaaatgtgacagggaggatcatcctcttcagctctacatgggataaaactaacttgctgcagtaggcttgaccttctctcgcatatactgcagtagatgttcgcgtttccagttgtcgattctgcaaaacaagcaaatcaagaaacaaagaggtcagctacaaccttggaggaatgaagttgtgttgctgatagaggatgaggtgttaaagacatcacttattcatgctcacaacgagaaaatcctttcaaaaaccaatttaaactagaggtctaagtaaatgatacagcagaatgtaacagagcaacgagagagtgagaatagaaactgctgcagatccatggatagttatatttttatctaccaagctaacatggatatatcaggtcaccttgaacgtcttaaatcaggtcaactcgttcccccacccaaactctaatactaaagattctagcaaggagttgagcaaagggggttataaagcaacttacctaattgattccttatgttcaccgtcttcgtcgagcatgatcaacttgggtggtgagttgaaaatgtactgaactttgacgctagggaacttttctttctcttcttcaatgaaaccaacaatttcaggatagaaaaccaacttcctcatacacacctctaatatagcgccagaataggtaacctgcaatggcaaaaaaatgtaaacttctcttcattcatatccatgttataggagatgtttctgtattcatctaatctattcccattaaaattcaaaagcactacaaattacatgcctagtgatcgtaccttgctcatggaatcctcagaatcatcagcacaacatttcaagcaatcagataccaactctgcaaacaagatcaatcaatataagataaccaatttagtaattccactcctcaaaaccaactttagagagaatgatctagctcataaaatacacaaaaactaaaatatagaatcttttgggggaaaaaaagcaaaactgcagtaattgagatcaaataaagcacgcatagaaaggcacgaaccttggtccttaacgtattcagagagtgagtggcaatcggagcagagtgcaagaccgctaaaccctagatcctcacattctttagtgctgagctgctcttttgctgagatcgtcgatgccaatatcaaaatcatcatcgctgataaaacaaccatcttcgccatctctctctgtttcatcaacagatcaaagtcttcgcagatccgacgctactctaactaatgtcgctgccttgctatgatccgatccggtcaattccggttttttaagtatccgaaaaagcaatcttggtatagaggaaaccatctccggttataaataaaaaagtcttaaccgacgtgaaaagtgttaaaaccccaattcacattagcctgttgcgatctaaaacctctaaaaccctagaatcaaaatcgcccattcgagatcgagagagacgatg

SEQ ID NO: 20792 - DNA, 3003 bp, Unknown
  misc_feature (1)..( 3003): 2750-1469P.txt file - cDNA_ID_1828953; gDNA_ID_1620807; Annot_ID_50570
ggattgaatgagtgtcttcaaagagaagagagtaacaagaactattgatgtcacaacgcaaagggtgtagaataagtcaaggggttggaaacagaaagatgttgaaaacttgggagtgtttatatatttaaatttttgaaaggctttttaaagtttgtgttgctaatgctatatctaaaagcccaaagtaataatgtaatggaatagaaaagaatccataataaataggaaaaaacaaagaaaaagtacctaatccggtagccacaaggaaaaaagaggacaagaagatggtgacaacaagacaaagaccgaagccgcgtaggaccccaaacgtaccttttaaataaaacgctgattcctttcggacttttgcgtcgcacggtctgtgccgctgtccccacaaatctctattttttacacacgcaatctctacctctgcgtctgcgtttcgaaacgtgactcttctaaccgctccacgtgagtgacttttagagcgagtttggtgtccgaaaccacgcgtgcgcgtctcctcaacgcctgagtctctctatgaagttgcattgacgtcagaaaaattaaatttgtcttacttgaaacataaaaatttacagtagtaaattatcattttcataacacttcatttattctcttgtagttaaacaacggatatactaatgaaatgaactcgttcaatctaattaaaatctcattattaatggtagacgctagagaatctcattattgtaggtgttaatttatgaaaataatacatcactttcaatcactgatttgattagattgatggattttatatacagcccatgtttttaacctctctagttgaaattttggttgattttaaagagaagagaacaaaaattcaaagacgaaaaaagcaaaaagtggaaagtagaaacaaaaagactgatggtgcagagagctggtcaaatatgttgacaaaataaaataaccttacaatgtcactatcatcaataaatgaaaaaatagttctctctatctatctataataataataataaaagcaacttctacctgggactgatattaactacgaagacctctcactctctcaatgggttgtataatagctgtcaaattatgatgtatttagtcacaagacaaaagactgattctgaacactaaagcctaattagggattagtctttactctttagtcatctgtttcatctttattattaaagtttgcaggagttgtagtagatggtgtgggggcaatatatgcagaacatgcatgcttccaaaatgtcctaactacgtcacttaaggttccatttttttctatctaaactaagaaatacttatgtatctattaatctacatctaattggttgtcaaaaaaaaatgtatcatagaagtctttggagcacataaataaaacatctggagattttctgaacataatgtgaggtcaagaatttgtgtgcaaaattacaattttcaggcatgagtggctctgattttgaccatttgaataaatttgtagcttgttataacctttacactcgtaaggaaaaaattatcaaaaaatattgatagtcgataaaattgaaaactctagatttatacaaatcaataaataaatttgaaaataattaaatgagaagtaaatgacattacttcacccaaaaagagtctagacgaaaaagacagacataaaaataagtccccttctatttgtttggagcataaacaaaaacagacacagtttcttctctctctctctctgtctctttccttttctcacgccgagatttctgcgactgctctaatcttacgaccttataagaaacgacgcttattttcactctgcttgagctcttcatcgtgtcacacagcacgatcttggacgtcgttttaagcgcaaaacaaaggaaaaagactgacgtttatacatactaaatactggtttggagttttgccttttggactcagaaaactcaaaagagagagagagacatttctgtatcttatcgggttttgtgttgtcagaaagaagctcaaggacaaaaaaaaaagcaattatttttagggttcaaacgaagcaaaatttggaactttcagaagttgtgggtggtggcttcttgaacaataaagctttttcttagactcttcttccaatttgtgactctacctatctctctctccgtaagctctttctctctctctttattcgttctttctttatttgctctgtttctttactccatttttggcttaattacaccaaatttagtctgctaaaagctaatttcaagcataattacttatctctcctcttcttgttgctaaccttcagttggattaggttttgatttcgtttatacgacaatccccgtgactgaaaaagttaccaactttgatagatatcgttaccagattctactcatagttttgttattgtaatgcaagaagttgagttcttgtttacattaacttcaataattcactgagagtgactttttgttctcctctgatccgtggaggattctctatatgtgttttgttttttgggggggttttctcctgtttttagggactctattgattcatgcatatatgatgttattctctgtttatgagtttatgcaaataatctaagcaaggtatgataacatatttaatctttttgtttgagcttataattgtgcttagaaatcttaaaataatgcttaagctgatgtgaacttgaggcctagcctctgaccacaaatcctagcctacttcgttgaccatacctttgtcttggcttaatattctaaatttctcttccaaatcctgtctcccaatgcattggttggtccaaaacaagatcatcatttcatagatcttgtaatctttctggtctgtaatttgctctaggatggtaaccttgtaccctatgtaacatgtcttgttagtataaattttgggtcatgttgtgttgatgactctttagcgcatttcttattgacaaaaggtatg

SEQ ID NO: 20793 - DNA, 3000 bp, Unknown; identical to SEQ ID NO: 5627
  misc_feature (1)..( 3000): 2750-1469P.txt file - cDNA_ID_1828988; gDNA_ID_1620807; Annot_ID_50560

SEQ ID NO: 20794 - DNA, 3000 bp, Unknown; identical to SEQ ID NO: 5627
  misc_feature (1)..( 3000): 2750-1469P.txt file - cDNA_ID_1828988; gDNA_ID_1620807; Annot_ID_168905

SEQ ID NO: 20795 - DNA, 3003 bp, Unknown
  misc_feature (1)..( 3003): 2750-1469P.txt file - cDNA_ID_1828996; gDNA_ID_1620807; Annot_ID_50558
gaagaggctcgacgactagtgacatcactagaagcgcgatcgtcatatgagtatacatcggactatccagcgcctgcaaatggtttttttagttggagaaattaaataaaattgaataacgctgaaattttactatttgaaaaaaaacaatgaaaattattgctgacaaaaacaaacatactttgttctatgagtaaaataatgtttagaagaataatgattccttgacaaaaaaaaagaaagaataatgattaatgaaatatttctctaatgttttcactcattcgtatgttattcaactttatacttccctagactcgaaaagtgtcatatgcaataaaagaacgttgattgattgattagtaccttagtatcgcgaccagcattaagaacgacgagcgataaagttcccttggtgttcataagggctcctatagcgaatgcgtcacgcataggtatatgcataaataaagaggtgattacggtagtcacgatctttactaagaaggaagagcagatgactacaaccatcatgaacttgtcagtaaactggagcatgaaaccaatatctgctcgcaacccacaaatgatgtagaagagaggcataaggatcccggaaaggaagtcatggagcttctcctcgatcatgttacgtatgatgtggtcgtgcggaatggagagaccgaacaggaacgccccggttatggagtggaccccgcatgcgtccgtaatcaggccgcataggaccacacctcctaaaatgaaccaaacgtgagtgtctccgacgtgacctgccttcacggtcttcgcgaagatccatgcaattcccggacggatcacaaagatgcagaggaggacgaagattgcggtggtgattatcacgaacggcatcattttgttccatgtccctttttaaccaccaacaaaaaaaaagaacaacgaaaaaaatcatcagaattcttgaattaccatgcatatttttgctatatttctttttcgaggaaaaaataggattcattccattttcggccagtggatatttattttaacggttgtaggtttttgggtatgagtttgagttttggcatggggtcccaaaaagtttgaactaattgtaggaatctttacctgatttgctaaaagaagcaaacccaaaaacaaggaggacccatgtgcacaaatcagtgacaatggctgcacacatagccgtacgacccatatcggaccgcaacagcttaagatccgcaaggatccttgcaaggtcagggaagttggtacaggctagcgcgacagaccagaagacgcaaccagagatgatcttgtctggatggccatttcccgggagatagtaaagaaaggcaccaaccggtaaagcaacaagaagccctgtaaaagcaatgatgaccggtttgagctcggtgatccgcaccatcctcaggtccatccctagaccaaggaggaagatgttgtagacgagagctaagttagcgaatgtctcaagaaccattgtgaatctgtaggggaatacatgtgcgattatgaaacgtgtgttcccgagcacacttgggctaaataataatccacactgcaaaaatacaatcacaacaaatcaagacacatacggaactagagagctaaaaaattgatgtagcaaaaattgcatacgtacgaggatctgagctacgaaaggaggaagatacaagggtcgggttagatagtagaggacacgatagctaaggttcgcgacaaagagttgcgttatgaagaacggaagggaagaggctagcgtacttccgctctcccatcccttttgttctctcttctcaaagagaagactttggtcataacacacaatctttccaaaacgcgattcttcaatatcatagttaggatttgtcacattaaggggggctccggaagacatctcctcctacgatggctggtcggaatccccaaaaaaaatgacaatactatctgcctgaacccaacgttaggttcagacgaaacattgggttcatatagactgcaataacaactaatttgcaacctcttccaagttttagttcagacgagatggctaattatagatgatgtattagttgtcattggggaattcattaaccactcgttttaaaatgggcttatcagatttatgtttttgctgttaggtgcttttttaaacggctggttgaaaatgatcacttgtttcaacatatttttgtccgatttctaattgtacggttacaaaatctgcgaataaattattttcaatcaaacttatagatgttttttttcttaacaaattatacaagtttttttctttctttttttttgtttggcagttcttaacaataataagatagtttagtctattattaatttattattaacataagacaataagattcctttttaataataattaaaatagacaagtagtagaatacaataaatatgcaacgagaatttttttattactataatgcaaaagtatcaaatcaatccagaatccagatcttctggaagcaaagtagttcacaagactttgtagagtaaagacagataagttttgaacagactgaagcaatttttagattcctcaagtcaatttctctccccaaacagcttccgtgaatgacaaattgctaaatctaagggtaatactctgttacagtttctctcttcgctttcagtttttcgtttttctgcaattccaattacttctaagctctctctgtccttccttactatggagatttgataaacaaccaatcagatttgctgacgaaccccatttatcatctagggtttgcttcagaatgcttttgaaacattaaagttcaacacttcagcacttgggatcttaatgctgtttcttgtttactctgatctaggagtgtagcttttaccatttacttgtgtctgtttttggtgctgttgtttgatctgtaatgcatacttcaattttcttttcttgtagattgatttcaagaacaagtcatg

SEQ ID NO: 20796 - DNA, 3000 bp, Unknown; identical to SEQ ID NO: 5625
  misc_feature (1)..( 3000): 2750-1469P.txt file - cDNA_ID_1829000; gDNA_ID_1620807; Annot_ID_50557

SEQ ID NO: 20797 - DNA, 3000 bp, Unknown; identical to SEQ ID NO: 5625
  misc_feature (1)..( 3000): 2750-1469P.txt file - cDNA_ID_1829000; gDNA_ID_1620807; Annot_ID_168903

SEQ ID NO: 20798 - DNA, 3000 bp, Unknown; identical to SEQ ID NO: 5624
  misc_feature (1)..( 3000): 2750-1469P.txt file - cDNA_ID_1829007; gDNA_ID_1620807; Annot_ID_50555

SEQ ID NO: 20799 - DNA, 2932 bp, Unknown; identical to SEQ ID NO: 14982
  misc_feature (1)..( 2932): 2750-1469P.txt file - cDNA_ID_1829007; gDNA_ID_2684237; Annot_ID_192471

SEQ ID NO: 20800 - DNA, 3000 bp, Unknown; identical to SEQ ID NO: 5638
  misc_feature (1)..( 3000): 2750-1469P.txt file - cDNA_ID_1829007; gDNA_ID_1620807; Annot_ID_168899

SEQ ID NO: 20801 - DNA, 3000 bp, Unknown; identical to SEQ ID NO: 5666
  misc_feature (1)..( 3000): 2750-1469P.txt file - cDNA_ID_1829019; gDNA_ID_1620809; Annot_ID_50580

SEQ ID NO: 20802 - DNA, 3000 bp, Unknown; identical to SEQ ID NO: 5666
  misc_feature (1)..( 3000): 2750-1469P.txt file - cDNA_ID_1829019; gDNA_ID_1620809; Annot_ID_168983

SEQ ID NO: 20803 - DNA, 3000 bp, Unknown; identical to SEQ ID NO: 5703
  misc_feature (1)..( 3000): 2750-1469P.txt file - cDNA_ID_1829038; gDNA_ID_1620811; Annot_ID_50609

SEQ ID NO: 20804 - DNA, 3000 bp, Unknown; identical to SEQ ID NO: 5692
  misc_feature (1)..( 3000): 2750-1469P.txt file - cDNA_ID_1829042; gDNA_ID_1620811; Annot_ID_50608

SEQ ID NO: 20805 - DNA, 3000 bp, Unknown; identical to SEQ ID NO: 5692
  misc_feature (1)..( 3000): 2750-1469P.txt file - cDNA_ID_1829042; gDNA_ID_1620811; Annot_ID_169076

SEQ ID NO: 20806 - DNA, 3003 bp, Unknown
  misc_feature (1)..( 3003): 2750-1469P.txt file - cDNA_ID_1829058; gDNA_ID_1620811; Annot_ID_50602
gagtaaattttatttttaatttaacatacatatatgagaaagacgtgagattgtatatactgcaaaaaataaattgaatccctttgtacatcatcaataggataacaagtatatgataataattttgtcgaaatgcttacccacatattaaatcgtcattgatatgaataatgttaattattggattttaatatacacttggaattcttattattagtagttaaaaatcccactagcacggatcttatttgttatacgcaaaatatagtaaaaaaagaagctacatatttagattcatgtaaaaataataaccacataagacaaatttatgtagtagaaaaggttgaaacaattttgtacaacttttaagaattgtcaatataaactaaagcttcatattagaaaaaattgtttttattttccaaaacaaaaccaaattttcattagaatatatgctgtaattagaaagtgtcattgtattcttgctttttctaattcagtcttcttatttttgcaggagttcactaacaatagtgatcacaaatcaaccaacatcaaaattacacttatcaaatagaacatgaatctaaaaaaagataagaatactaacaaaatcgaaataaatgagaactaaagctcctcacatccttcttctctgcacatgtcaagaatatgacgtatattggcggtggcgttgatacaccaatttgaaaccaaccctaaacttaaaaaaagtttaaacgagatgaacacctctctatttaggagctcgttaatatcttgcttagacgtcacatgagattgatggtacatgtcatggagtaaaataaaatcttctcttctctgtgtctctgatgaggtcatggagtatgggtagctttatgataaaataggaacttgtttcagagtatttagaagtaagttatttctattttctatcatgaaaacatttcccaattttgaatatcttttatatactctcatggctgtgtttatcaagatcatcaaaggcgttttctttttccccaccaaaggctccttcatcaccaccaaaggtaccatcaagatcaaatcaaattcaaatggtatcaatggctccttctttcacctcactactaatgactttttcttcttcaccaccaaaagcctctccttgcctctccttgccaccaaaagcctctcctcggctctcctcgccaccaaaagcctctccttggctctcctcaccaccaaagccgaatcgtttgctctacttaccactatcaccaataaagtcagttatgtgtttcaaaacaaacgaggaaggggaaataatagacttctttgatatatttattgaccatttggtctcaaagaatcatcacatccttacctgaagagagagcgtgaagtatggttattgggttgagttggctttagaagcactgtttgatattgaagttgagtttgagtctagtatggatgaagataagatgaaaagtaaaagttgatttttcaaaatgaaaagtgctccgtttggtaatatatatatcttggagaaagagatagtctatatggagcgtgaagaacttttagaaaacatttcttatttcaatcttgtggagcaaaacaagaagaatggtcttcctcctcctcaagaaagaacatggaagtcactagagcataaaggagtcattcttccattgccttaccaaaaacacaacgttccccttatctacgataaaaaactcttaagaatttccaatataaactaaaacttcatactaaaataagatttgttttttctttcaaacgtaataaagaacacaaatatgtcaaaaaaaaacaatcgtgatatgttgataagaaaatatcaaaactatggtaaattttaagattatttttatagtttatttttttttgataatttcataaattctcaacttcattttttcttttattttcttcgttttaaaataaattctcagattttatttagggctcaaaagatccaagtatgaggagtattatttacataagttatattaagcggtttagtacgaatttttcgtgccaaattgttcgccttaacatttgtataattcaaaataccgaattaaaccaaatgtttttctgattcgttaagatatttgtaccaaaaaaaagaaataaccattttatttaataatcactaaaaaaacataagcttaaacttattattataaaaaatctttaattaaaaacctaatctactataaataggaaaattcaatttttcttgaccaaaagaaagtataaaaatacataaaatggcaagaaatctcatatgttttaatcccgaaagtataggtgataggatgataccctaattttgactgtaagaaattaggggaaatccattttgttaccaaaatctcttatcatgtttcaattactttaaatgcatgaatacatgccaaagattttgttattaacaacacaaacacttgattatatatctccttggtataatatacagaacagacacaatcttaggctcctccttctctcgctctcttccctctgttgctcggaaagctttggcctttttggttttcttatggctaattctcttctcaaaactattcgtatctgagagagattgagataataaatatagagagagatccaaaccagaagcaatctttttttgtttgtctctctgtgaagattcgtatcatttttctccggcaaactaacggcggcgatccactcttctctatagcttctattatgttggttttatcttcttctttggaagaaatgaacaagtttggttttttcgctttcatgaatgtgatccggtctatataaggtttgtatatataatcaaaatctagtttttgatttttgtttcgattttttggcgatagatctggtttgtgtttgttgtttaagagagagggaagtttttgaatttgtgattttaaacttggcttgttttcagggtacttagagtttggtgaagcttgaatctaagagatg

SEQ ID NO: 20807 - DNA, 3003 bp, Unknown
  misc_feature (1)..( 3003): 2750-1469P.txt file - cDNA_ID_1829062; gDNA_ID_1620811; Annot_ID_50601
taccggggatgaagaaagaagaggttaaagtagagattgaggatgatagtgtgcttaagatcagcggagagagacacgttgagaaagaggagaagcaggacacgtggcatcgtgtagagagatcgagtgggggattctcgaggaagtttaggttaccggagaatgtgaagatggatcaagttaaagcttcaatggagaatggtgttttgactgtgactgtgcctaaagtggagactaataagaagaaggctcaagttaagtctattgatatctctggctaagccaatttagcttgatttgagttctctctgggtcttgactttgtgtgtgtgtgtctctgatgattatggttcttcgtttgattgtagttttaaactaataatcaatggaagctagtaacttgtgtgacaagtaaatgtatggtggagaaatgtgtgtatttggattataatagaaatacctattttcatctagaagctcaggatctagttattgataattagagctcgaaactgagatggatcttattgtttggatagttgttttaactattcaggatcttattgtttggatagttgtttaactatttataactagagatcgaaattgagatggatcatgaatttcattgaaaattaaggctaaactgtttggctagttgtttaactcttaagcatgtatctggagatatctttattcattgtttgattttgacattgtggttcatcttgtttgatggagactctttgtaggaaatcgctttggccaacaccaatgtgaactagtctggccaatttagttaattgattgatcatcatattgtttttggcatttttcagaacgtgtaataacagtgaaggaattttgaggtacctgctcaactgaatcagattcaggagggttttaggagaggtaatatggaagtagcaatgcttaagaaagataaagctagagctcttgatgatctgctgaaaatcgactaaggaagccaatgacaaactcagacaggaaaaaactgtaagaagaagaagaaaataagagaaaagcaacaaagctatggaaagcttaactttggatttgcaagttaagtatttttaaagcaagggaagcattggagaagatcttgttgatatgtcaaccatagcttgaacattgtggagcccaaatgaaaaggtataagttggctgcaaaagatacaaatgaaaactgtggaaaaattcttgaagactgagataagtacacactcaaaatgagtttttcaattctaagactatgtgggaacagcgagaacttcagttgtgtggaaaattgggaacttggcaaagtgaatttgtctgaccttcaggaaaatgagaagaagaagaagcatgtatgaaaaatacacttaaggaacttgaggagaagagtgaggatttgtaggaaagagttggagaagcggagactggaagcatgaaagtcgaggcaaagaaggttgctttagaaaacagaaagctcagagcaatgaaggttttttctcttgaaaaactcgataacttgtcaaaggtatatgaaagcttggtggatacaagtgaagcgtttttaaagcaaggcaaggattggagaaggtcttgttgatatgtcaaccatagcttgaacattgtggagcccaaattaaaagttataagttggctgcaaaatatacaagtgaaaagtaaggaaaaattcttgaagactgagataagtaaacacccaaaatgagtttgtccattctaagactgtgtagagacagcgagaacttcatttgcgcggaaaagtcgggaacttggcaaggtaaatgagaataaactgaaggaacttgaggagaagaatgaggatctgtaggaaagagttagagaagcagaaactggaagcatgaaatttaaaggaagcttgttggtcaacgaagtcaagccaaagaacattgctttagaaaactcagagcaatgtaggtttgttctcttgaaaaaatcgatgagtcgtcctcaaaggtaaatgaaaacttggagtataaactgcagactgaagaagaccgagagcttaattgacaaagaaaccaacctatagagcattactaaagaagctgagaagagctcaggaaaatgaaatttgctggctgaaggaatgaattagacattggttaatacacaaaatgcagagcactaatcaaagattagttgagaaaatagccaaacgcagagtttaagaggaagtcaatggagtcttcttatcataacaacattgaggagttgtcactaaaacttcttattccgggtatttaaatggcttcttcctccgcaacttctcactttccagaacacaaagacttataaacaaaccatccttcacgtatgtgttgaattgaaatgtgaatgtgacttcatcaacacaatgacttcaaaacccaacgacggtcttcctttcttttctcaccaataaaatgtagaaaagaaacaaagtacacaagaaagacttttcatttaacgatatctccactagtagtagctataactaaatggggtcatcgttattgactttgaataagaaatgttcaaacacttcaattattacataatatctttgcaataaaataacaaacgttaaagagccgtcgcattattagcacaaaaaatatcttttgtaaataaaaaaacaacgtaaaagagccgtcacatttgaataataaaacccatcttgcacataaaaaacacgactttttattatttttgattatttcaacaaagtatgaatagtcaacataaagaaaagtccgccttgatgttccttcctcactccctatttatccattttctaatcccaccctcttctcttcattcatcatcttcctcctctctctcttctctgtatcacccaactaaatcctcacgggattagatccaaagtctcaaactttgatccaaaaacacaaactttgttcaaaagacataaactttgagccaaagtcacaagctttcttggtgaacgatg

SEQ ID NO: 20808 - DNA, 3003 bp, Unknown
  misc_feature (1)..( 3003): 2750-1469P.txt file - cDNA_ID_1829073; gDNA_ID_1620811; Annot_ID_50596
aaaagatggctcctcgtcagaagaaacctaacaagtctgatgatgatgatgatttgcgtaggaagaaacagagctttttcaaacagagatttccaggctttaagaagaaagcctctgagctctctgttctctgcggcaactctgtcggtttcatctgttacggtcccgacagcgatcttcatgtttggcctcagtctcaagatcataacccacaagccctacatgagatcgttgccaagttcaatgccttgagtgatgagaggaggaagaatcatgcatgtgatctcaatgacttccctcatcatctcaagggtttgtctcgtgaggagttaaggaagcatctccttcaccttgactctcaattacttggagtcagggaacaaaagatagaaattcttaagaagacgctcacgggttcttccgaaaaagatggtgctagggtttcagagaactcggccatctccgatcacaagttgaagatagagcctcatttgaaggatatattgtcggaagatcatctaattagggtttcagataagaagctgggttcgtgtgatgtatttgacgagttggcttacgtggtccgcgggtcaaggaatttgaacgagaatgtttccaagtacgaatcaaaagatgcagataacacgggactggatcatcttgtaactttaggcggtgattatcttcaggaggcggcagcagaactttaccaaacttacaatctagggaatttttgtgatgatcatgtttgggatctggagtttgcctcaagactaccactacttcatacttttagcgatcctctcatgaccaccaatacttgccaaacgatgagcaccgatatgatttcaatttgataacttgatgactacgttagtgaaacatgtttctttcaccttttctcggtgattgatcattttttagtatctaaacttgtatgtttgctccaacacaaatctatttttgtaaagttttggtagtgttttcttgtttattattgattaatcaaacttttcctttctttctgttacttaaatgctgggcttgatagtagtataagaaatttgtccacaaagcacaccgcaaagttccaaaagctaaaacccttgtaccttggagtctctgcatgtgagaaaggaatatgagagttaaaaagagttttttcgtaagacaccaaatcatctacaatgacgatgagcgcaactttctatcagtgagcttgcaagctagcgttcttgacttcagaaatgtgattatgattaatagttgagttaatcttccttaccaactttaaagaaagaaaacaatcactatgtcatacattcttcaggggttaaacatgtcggatatgaaagtaaccaaaagaatcctcattgagataagcaagtaataccttccaacctgcgaaattgttcttgtctggtgattctaaacagaaagaatcttattcttgttttagctcttttgttctagactagacactagtgaaagtgaaatttcaagaaaggttacaggatcataccttttgtttggtggaaacagaggattctgaaattcctggctgtggtcacatacatacatcaatcacatatttactagtttctaatgagaaagttcagcttggattcagttcatcttctctcatctttaaggtccgaactatgtccaaactttggcaatatatttcaacaaagactctaacattcttatatgtgagtatgtgacgttgtatctcagtaacttgctcatccaactctctgcgaatattcagattcttgattcaggagctcccaaaacttcggaattccaaatgacgtacacaattgcctaaaacacaagtctcctgcttaaccatgaatagttgagtgaatcaaaatctcactgaacaacgttgtacaagaaatcaaagttcacgatcaaacttacaagcatatccatgaagataaatgagcgaaaactaattacttggcgtatatatcagttttgacgtttggagctgggaagaaaaatgaaactgcaaatcaaataatgtcaccacattaaattatttctgatcgtgtcattattcaactgatagctgttattatttctggtcaacctcttatttgttgtctcttagtaaaagttttcttctagattgaacaatgttttaaaattttgacaagaagaaaaattaattgtttaccgatttaaagacaagaaagatctaagttagtgtatatttaattaatgcagctttagttttttttgttatttggtattttgtcaacaattttttttttataatataatgttcattccacgatcttcggaattgtgcacatccgtcgttcaccaacataattcaaaggaaccagccaattaaacttagaaaaatattgatgcccatgtcacaacaacgaagaccgttgaaacgacggtgttttacacagccaacgaacaagtccagcatggcggtttttgagaaccaataagaaattaaatgtattgtttactctctagagtaaatttattaatttttaaagaattcataatattccataaattaataagtttactagcaacaaaaaggtctgaagtctgtatctgacgatcacgcggcctaattgcgcgtggcaatttcttcaacgcggattttttttttcctgccatttcttgcatcaacgcggattaaaaaaaaaaaaaaaagtgttttcggtaataacccgaaagagaaaatacgtatcggaaaaaatgcaaaattttcaaaaacatttaattttaattttaatttcaagccaaattcgggagcgactttccaaagacgaacaaagccattgaaacggaagagaaggctgctcctttggtcctctctgtttctaccgtcgattcagatctctgcctctcgcaatcgaatcaatttgtgtaacgaatcgacgcgaattatagtggtgaagaagtcgacaattcgattgttgtgtaagttgacgagaggattggatcggtgtgaattcctcctaaatg

SEQ ID NO: 20809 - DNA, 3000 bp, Unknown; identical to SEQ ID NO: 5697
  misc_feature (1)..( 3000): 2750-1469P.txt file - cDNA_ID_1829085; gDNA_ID_1620811; Annot_ID_50592

SEQ ID NO: 20810 - DNA, 3000 bp, Unknown; identical to SEQ ID NO: 5696
  misc_feature (1)..( 3000): 2750-1469P.txt file - cDNA_ID_1829093; gDNA_ID_1620811; Annot_ID_50590

SEQ ID NO: 20811 - DNA, 3000 bp, Unknown; identical to SEQ ID NO: 5686
  misc_feature (1)..( 3000): 2750-1469P.txt file - cDNA_ID_1829093; gDNA_ID_1620811; Annot_ID_169046

SEQ ID NO: 20812 - DNA, 3003 bp, Unknown
  misc_feature (1)..( 3003): 2750-1469P.txt file - cDNA_ID_1829097; gDNA_ID_1620811; Annot_ID_50589
ctatatattattttgaagattttcactcaatgcaaagatgaacctcaaaattacttttatcaatgacacatttttaaagagaaaatatataaagatatgaaagtagtcactagggactatgtaatcaattgtgctatttactgtttaaacacactaaaatatatagttttaatgtaattaagtaatcctacaactttcatgtgaaaattcctagtcaaatatttcacgtagtgagttatttaaagtaaaacagaataataggtatgcttatacgggtcgagttgctttattatgaatatgattatatgaatcaaaggatatgaatttatatttatcaagttaccacgttacgaccaaatttgggttatgggtttcaaatcttgaacggttcatggtattccgccgcttttgtcctatcaagtatggacacatttttcaaaagtacgctggtgccgaagtagtttgttgtggccttggttaactgtaccattaatgcgtgtttataaactacatgctaactctaataacttctcatacattcacatcaaaggacgatgagcctcatatacatacatagtgatcagagccatcctctaagcaaaaagactatcctttttaaaaaagagaatcatattaagggcaaaaattaactttcaaaaataattggccaagaagcgatgactaatgtttttgccaaaaataaaacaaaatctcaaatctcaaagcctgtttcatatctcttttaagaagagagaaagaaacttaggattccagaactaaacgtcgaaagttcttagatatcttatttcaaagggttctcctctgtcagaaattctagaataacagattatttcatcttaggtggactgtcatttcttctaactaggctagtagcaaatcattatgcccaatttaaagctaactcgctctccatctccattcgattagattagtagttaactttaaaccaccaaaaaattttatacatttatttgttagagaatatttggaagaattgggtggtctcgctttgtgccgctttcttagctcaaggatttttggattctatctacatgaacttcgttatcaattttgatgcttgatatttttgcctagagtgtttcagtttttttgtttttcttttctttttctagcagaattgtcacatgttatattcatattttgagtattttctaagaaacaattaggatgctacatagacatatttttgaaaagaattaagaaaaagtaataggttttggaattttgcaaaacaagcgagaagatgctacacttgattgttttcaacaaaaataccctcagaaataatggatgagattcacatgatagcactaaatcgctacaaaatctcttcactagtgtctcctccatagtcaaatccgagctccagataaaaacattacagattcatatgacaatattaattttgtcactcatatgaatttggttaaatatataatctaatttgaaaatacaaaaatcatgattcatgatgcacctttcaattcacataatgttgaaatacagaaaaaataattactctctcatttctttataatataagttttagaaagaaaccaaaaattgtctcataaagataaatgtagatttttttttaattttatctcctattaactagggttgaattaataaaacaactaatgaatatttattaaacacgaatatatttgtagtagtaaaaaaattcttaatatgtatgcaaagtctaaaaacatacaagttcactaatctctactaaattaacagctaaacccaataaatccgttaattatggctagtttagtgaatttttctcaaagaaaagctcttttttcaaagttaaggagactagagagcaagtcatttgcttgtggttggaaacaaaaacccaaagcgacgacacaattaaaaaaaaatataaagaggagaggagaaaaagaggcaagccatagccaaagggttcgtgtcggcttcaaccaaacactgacggtgtgtgtatacacctttacatacacacctttatctctctctctctcacatctttgttacaaatcaatcttctactgttttctttttcctcttcttacattattttttgacagcaattcttagtttctcttctatcccctttctgggttttgtttgaaccctagctcgctttggatccagtggttttaagttaaaggttcgatttttatttctgggttttgcttgttttgcttggttctgcttagtaaatgttggaaaaggaggagactttagaggatctgtagtcagatttgagctgggtttgtcgattttactaggattttgattttggggataatctagatcaggaatcgttactttgtttcatatccaaaattcaactctttttctcgttcctgatctaaaaatcgttccttttcaagctttctaaatgaggtttctctttggtggttctgaaattttgtctgtagctgttgtgttcttctcttagatttgattctgtatgataattttaggttctgagtttgaagtcttgtcattgtagagatggttttagtaacagttttggtgttgctttgtgtgaagttattaaggactaaaatctgttcatttttggtatgttattgagcaggttcttgtcttgcttttgctttatttgttctttctttttacctctttgtttgagtgattattggattttctcttcaaattgggtaataaaattttgagaatctgagtcttgtgatgtgctttagacacaatgtagaacaaagcagttacataaatggcccacatttttgtcagtaaatttatgaatggggttttaaatgtttctacataataacatctatcagagttttgtttgtctaaattagaggaggataggtccatcttcttcttttctctttcagaataacatttcaatcttatagttttctcttcttttgttttgttgcccaggtaaatttatcgaaagtaagtagattcctaatg

SEQ ID NO: 20813 - DNA, 3003 bp, Unknown; identical to SEQ ID NO: 20812
  misc_feature (1)..( 3003): 2750-1469P.txt file - cDNA_ID_1829097; gDNA_ID_1620811; Annot_ID_169045

SEQ ID NO: 20814 - DNA, 3003 bp, Unknown
  misc_feature (1)..( 3003): 2750-1469P.txt file - cDNA_ID_1829116; gDNA_ID_1620813; Annot_ID_50629
gtatgaggcaagagtcttcctgctacccaatagtttctaccaaactggagtctaggaatttcgagaacgacgttatcactctcacatgggatatattctatggagagaatatcaagacgagctgcacgcacttcaatgctatcaatttggttgcatgacatggacaagatccttaacgttttatgatcaatcttcaaatgaccactggggttgaagaaaatgatttgtaggataagaacctcgagggaggggcaagacgagatgacttcgttgaaaacatcaacctcagcaaagatttgaaacaggtcaaggtacttgagatttttacaattgttaaaagcttgtgcatcttgtaatatgtattgatatagcgagagtgttcttaggcttggatggttgaatgtctctgtggacagcttgagcacattgtcttcacctgttggtgcgaagcgaccattaaaatttgcaaggataagatttttggtgtgtttcatactagtcagtgattggatccaagaagcaagcatcccgtcttccaattggtatgaataatgggatattatgcaagtctctaaatggccattgtgcttgtttataacctgaaaaatgcaaaaatgattaagatttaaataaggacaaacaattatgaagagtctatgttttcaatttatacgtgtttctctttatatcgtatatatatgttgaattttatagaaaaattgttaatatgtaattttatgtatgtgtgtatttattaatctatgtagaaaaaggcatgagatcatacttctctagattattgatcataaatttgtttaacataagataacgtttcgggcgaaataccgttatttgttttaaatgtaacaatgtttcaaaaaaataccgttatttatttccctctaaataccgttaaataccgttatttgctatttattttattttttaaaaaaaacataaatttgatacatatacatgtctatgatttcacatttatatgtatgaaatttcttataagtcctcaaaggcaatataacaattttcatcttttaatccaaaattccttttatcaataactgatttaaacttgtaagattgaatattgagagaaaaatgaaaagaacctcggttataattgacaaaaaaaaaaaaaaaaaactcggttatctgattagcggcacgatctaataattgtggcaggacaatcccgttgatggtgatggtctttcgcatgtcaaagcaaagatttgacacttgtttccatgtatccccccattgtttggacaaaacacatgtctttatcgcttcttctgtggacaattctgataagattttggacaacatatcgtcaggaagttgattaacattatcgattgcatcgatactgattcttttgttcgatgatatagaggatgcattttgtaagagagacatgaatgaagaaaagagagtttgactcaaaaactaaggaaatggaagtatagcttatttgattttattgttgcaaagaggcacatcgtagagtatatatacacaaaaggcaattcaggttaattaattaccttcccgtttttcaattggagaattttgattattattttttgtctacatttcaaaatgagaaagaaaataatcatttaatacgtggaattatagtttagtaatacatggcatgaaaataattttatcaaattttatttcggcatcaaaatttgtgtgttttttttttttttttttgaaattaaacttattgttatgatgcatttattgagacattatttgatcgatagtagcaattttaggagagtgtctgttgtatatatatatgaactatgaagattgaaggctatttgatgtactgtatatatgtaatacttgggacatagctaaatatgcatattgtgtcaatttcttttacttatctagcgttttctgtcaaattcattttcagtttgtagattggtaaaagtgaactgagaaatacaaaatgtctttaatgaaattaggtgtttactatctagtttctaaacttttggtaattcagtagagcggcacaatttgcagtttcctacgaagagatgattatcttgacttttataattagcatcagatatccgatcgccaactaatccctacaagtaaatcagtccaaatagttaagtggtccgcacagaacaagtttgtttgcagtggaaactgaaacatcaaatatgtgcgagtttacatcctaacctaggttctttagtgaaattgatcctctcacaacttacaagtccaaacaaaatatcttcatcacttgagttgagtccatctatcgttactgttttcagacaaatccaatggtccccatatcagcggctgctctcatctccttcgacaagtccacattatatcttatatcgatctatgctattttattatacaaaattagaaacatttagtaagacatcgacacatcggtaattatgtttcatcttatcatatttatcgggaaaaaaaaatgattttctctattaaaaaaaaaaattatccttttttaccattatgtagttgaatttaggttgcttcttaattttttttaaaactgttcaatatttactcacacaattaatattgtgcctttttaaaaatggaagtcctaatttttgttaggctatcaattttgctgactaattaatatattatccataagaaattaacttttatttaggcaaatatctctgctaaacttggcaaacatttatcaaaatctacatttaatacctcaaaggatttcataattgtcttgccaactgaacccaattattagaggtcaaacttgtactactaactttaacaagtcaaagatattaataacttgtactctattcttatcatctcattgcccaaaaaaacaactataaatacttacacaaaacattaccaattcggatctacgattttcaattaactctcttcttttttttttttttttggtttttcatttaagtctattcaatcatg

SEQ ID NO: 20815 - DNA, 3003 bp, Unknown; identical to SEQ ID NO: 20814
  misc_feature (1)..( 3003): 2750-1469P.txt file - cDNA_ID_1829116; gDNA_ID_2684091; Annot_ID_189939

SEQ ID NO: 20816 - DNA, 3003 bp, Unknown; identical to SEQ ID NO: 20814
  misc_feature (1)..( 3003): 2750-1469P.txt file - cDNA_ID_1829116; gDNA_ID_1620813; Annot_ID_169154

SEQ ID NO: 20817 - DNA, 3000 bp, Unknown
  misc_feature (1)..( 3000): 2750-1469P.txt file - cDNA_ID_1829128; gDNA_ID_1620813; Annot_ID_50626
tttcgacatcttctcttaatctctttcatagataggtgaaggggcaacatgtgttgataagtgtgggggcaatgtttagatgatttaagcgaaaacaaagaaaatgaagcaaaaaaaagtggcacgaggttcaagattagttggaagaactagattgatgggaaacaactttcattgttgtagatgagcaaaaatgtcacgatccaaggcatcttactcgtcagtttacacgcatattctcgtccttcatcaggaccttctctgagtatacgcaagcatatgtaattcagtgcggtgcagaacataaagctcttgccttcaacatgtaacccccatccaccatcatcgttctgcaaattaagggagaaaaacagaactcatgtgaggatcttctctggtcaagcttcttctttaaaatctgctgcaagaatacaaggtgacgatagatatatcgaagaatctcttcacgatgctcagcatcaaatatctcctcgagatgtcctatgaatctgtgatatacagaaaaaaaatacatgcaggaaaattctctccgtttcattgattcctcttcattatcccttcaatttcttataatttctcgcgcaatagaaacctaaatctctaattctaaccctaagagtattcgccgatagacgtaaagtaagaatcgaaaggaaaacgaagaagaaacataccaatggaggaaggaagaagagaggtccagtgatttctccaggccagtgaccatcggaggcctgcaaagtcgagaagaaagaaactcctctccgtaacgcatccgtcgcgtttcatgagttgtgctttcgccgtcttcaaccttcaccggcgggatcacttgctccacttttgcctccaattcaaaaactgtgcctacagtcaaatcaactgagatcaaaataaaaacattcttcgcgttgaaaaggaaaaaaagaagaaaaaaagaaaaaaagggaaaggaataaaaacatggtgtgagtaattgcacatggcccattaacttttacggcccgaaattaaaaagcttcatttgaataattgttttttctttacattacgaagaattccttaaaattattaaataatacattttttttttttccccttaaaaattaaaatgatacattattaccctaaaagatgccaatcaaaaaataaagagagcttttcgttcatgtaccaatcaaaggtggtgtcaaataattgatgatagttgccgacaaaaataaaaaaataattgatgatagtcaaagacattactgtttatgaagaaggcttttctaaaaagctttttaattattgctgaaataaaaatttaatctcaactattaaaaaaatgcgtcttttacgagtgctaatttatatttaaacaccgaaaattttcaaaaaatctatttgaatttttgatatagtacatagttataagttaatataaatattagtcaatgctaatgattactgagtcatatgactcatgaatattaacgtgacatattttttaactaaatcgatgccgtttagttattttgaatttaattttcttttttaaaattagcaaaaattgaattcaaaatagcaaaataacgttggtttagttgaagaatataccacgtcaatacacatgtatcatttgactcaacaatcgttagaattgactaacatttgttaacgttaactcataattacgcaatacgtcaacagtttaggtaggttttttgaaaattttacatgtttaggtataaatcaacatttctcgtttataccgattgaaaaacacattctctaaatagtcgagattgaaaaaaatattttcccccattttctataatgctataatttattctaaacagtagacaaactcgtctttgatgcataccaataatataaaatatcgaggagacacattagtggatccttcaaggacgagttggtcgatttgagataaggaagacaatatttattgaccctctttggctttcaattttgtttgctaatggttagggtttattattatttttggtttaatatgatgcaagtttaaataggtaactcggtttggtttattttatttcgttggtttcgactatcacatcgatctataatgtcaaatttacaatcaaattcttttaaaacttttttttttttataacttattttagttttataaggaatatacggatttctcaaacaaacaagaaaaggtgttatttgaacacttggaaagaattcaaattttttttatagtagttttcccgttaaaagttcacataaaaatatatcatcaatgtaagacgatattcagggaaattgaagatattgggtgcctgacatgtgacaatatatgacagcttctgtcggtcctgtttcttgtttgtcacatgcgattgcttggggattgtgatttataaccacacaacttatggtactttgatatatgtaaatggcgacgatgattttttttctgttgatgattgacgtattattgtgaatcttgttttcttttatatgtttcgtctatctcttacaaaatttgttgatttccaacttttcatcattttagtttttgacaattatatatgtgtaagaggattggtgaatcatcagtgattttcttacttttcatatgctttccaactcttcatcatcataaatttttaatattcacactccctagactggtcacagccaaaagatctcaaaaatctgacccggacaagtatactaataaaaggaaaaaatattgggagatatagtgtcatgcatggtgtgcaagagaaaaaactattaattaatgtagcttattaatctagaacttgctatatactagaacaattaaaacgtgactgaaaatttagtacttaatctctacaacactataacatccacatatattaatttcttcaattaaccttgataagagttaaaaaagtaaaaaacatcgagaagagttgtagctgtggtcaacacttgagaggcagcacgatg

SEQ ID NO: 20818 - DNA, 3000 bp, Unknown
  misc_feature (1)..( 3000): 2750-1469P.txt file - cDNA_ID_1829132; gDNA_ID_1620813; Annot_ID_50625
gttgtttcgaacaaacatttttggttccaaaaccgtggtttcgacagatccggatgtgatccaccagattttccggcaagagaacacgtcttttgagctaggctatccagacatatttgtgaaagtatttggaaaagataatttgttcttgaaggaagtgttcatccacaagtacctccaaaaaatcactatgcaaattcttggctccgagggtttgaagcaaacaatgttaggaaacatggacaaagcaacccgcgaccatattaggtccattgctagccaggggagcttcaatgttcgtaaagaagttgaaaacgtaagtttacacatcttcatttttgtctttaccaatttcagctcgtaccaagaaaatcttccttaatattgcagttggtagtagcgtacatgacaccaaagctgataagtaaccttaaaccagagacgcaatcaaagcttatagataatctcaacgccttcaatcttgattggtttaagtccttcttaagactctctacttggaaagctgtcaccaaagccctcaaggtgacttaaaacatttcctttttagttttttggaactttttatatttagtaataataagtagcacatgttttctcaactaattgcttgttgtattcagtcacgcgaagaagctatccaggtgatgaaagacgttctcatgatgagaaaagagacgcgagagaagcaagaagacttccttaacacgcttctagaagaactggagaaagacggtagctttttcgaccaaggatcggctataaatctcatcttccttctggcgtttgccttgagagaaggtacctctagttgtactgctttggccgtgaagttcatatccaaagacccgaaagtgcttgcagagctcaaggtaatatataaagaaacatgtatatatggctatcgtctttaagaacaagtgtggatggatttgatagagtcatatatattgtggcacagcgtgagcataaggcaattgtagacaacagaaaagataaggaagctggagttagctgggaagaatatagacacaacatgactttcaccaacatggtagattaaatacccccatctatatatatacatatttgtatgagatatttacaagtggaagatatgacattaatctataggttagcaatgaggtgcttcgcctagcaaacacgacccctttgttgtttcgaaaggcggtgcaagatgttgagatcaaaggcaagtactacttggaagttatacatgtatgtataaaaatattctctgaatcactagaagaaactttaatcctgggcaggatatacaattccggctggttggattgtggcggttgcaccttcagcggttcattttgatcctgcaatctatgagaacccatttgagtttaatccatggagatgggaggtcttagtgatacacttactataattttcagctgctctattttttctctttctccatcatcctttgtaaacctatagatgggatttggttggttgtggcaggggaaagaaatgatttggggatctaaaacgttcatggcgtttggatatggagttagactttgtgtaggtgcagagttttcacggcttcaaatggcaatcttcctccatcatcttgtggcatattacgatttctcaatggtccaagactccgagatcattcgttcaccattccatcaatacaccaaggatctgcttataaacatctctcagtctcctaccaagtgaaccatgcatgcagtttccaaatcttaataatcagatcattatatgcaataatctcatttcctgcttccgcaaaatctctggagtctttttatatgtaatatgcgatctctataatttttaaaaagtatctatcttgtcaaatgagttaaactttgtttatatatgtcttgaatctgatcacatgcatgggttcctaattctatgtactctttgcggctgtttctgtactgatgacttaaaagtcactccaatgattcatatttttttttgtactaattgctccgttagttctatactcccaactacatcacgtacatagatgaaggaatttaatctgaaataataataaatgaataaataaataaatattgtgaaataagtcgaaaaatatggatgaagaagccatatcaattggtaatttatacttttgctgtcaaaaataaaataaaactggtaatattttttttccgctaaatttatgagttattgcaaatcgcattaatggactaatttatggtcaagtgcgcacatatacccaaacgttttgaaaacaataaaaacattactccatatagatttacgtttggacatagggatttgatggatttagtcactatttattactttatttgatggatttagtcactatttattactttatttgatggatttaaataacttttattattattatatatgactttttttaggaaagagaatatttaatttattataaattttgttagatgttaattttaaaatttaatgaaaataagtagaaaaatagacaaaaattatgtctagcttaatgttatgcctttccgatatgatgaaaacaaagtatgtcccatagatatttgtttaagatttttttttttttaatcataataccataatgaaatctaatgaaagtttgagagaaaaggcacatgtcacaaagaaaaggcacttctattagtttaattgaattttattttatttattatataagatttaatgttatctctttcaaaaaaagaatgatagaagcaaaaatgtatctccttgatagtttcaagatatttttttaatatataataaaatttaatagaagtttgagaggaaagacacatattagaagagggatgctaggtgtcatctttctcagtgtgagcttgcgttcagaaaccttacacaatatgatggcattatttatacgtgctccaatgttttacatgcatgttcttgttgactttctaaaaggtttgatacaaaatg

SEQ ID NO: 20819 - DNA, 3003 bp, Unknown
  misc_feature (1)..( 3003): 2750-1469P.txt file - cDNA_ID_1829148; gDNA_ID_1620813; Annot_ID_50621
aaatgattattgacgatttttaataaagtcaatgaagttaaaaacaaaattaggtaagtaaaacaagggacggttggctacagtgcgtttacgtttgcgattgtggtatacgtgttaggtaccatgtgtggctctcaacttctcaaacctttcatttacgatctagggtcattttcgtcattagatagcaatcgaatttgtatttgtaatgatattcttactatattttaataatagtcttttaatatgggatatgtaatcatttattgcacttgcccatatgcttaattagagatcaccgacacattccattattgtcacttgtgatcttgtgagagtgaatgattaactaaaatatttgtaattgatttgattttcctaatttctttgatcattaacatctaaagacgccttggatgatttgtgtgaaaaatagtttaacgggggtagagtagagaaacaaatttaattcagggaccattttagcaaacaacgtgtttaattgacaaaaggcacgtgagaccacgtgagtacttgttttggtttcttcttcatcggtccgatcagagagagagaatcgccggtgagaaaagaaaatggcgtcggcgatttctctttctctcttaaacggagcaacgcctttgaaatcgaattcgctccacaaatctagactcactccacttcatcttcgaactatctcttgttctagactatcttactctccctcgagtcgcgaaatttctctcaaaactcaatctactgttcctatttcgtgtaggcgtagtaggtttgacttcgttcctcgttgcggcatttcgtcgaacgatttgcctactgagaaaaagaagagctttggggagtgggttgagtttgtgggagaggcggtttcgacggcgtttccgatatgggtttctctgggatgcttgttgggactgatgagaccaagtactttcaattgggttactccaaattggaccattgtaggtcttacgatcactatgcttggaatgggaatgactttgacccttgatgatcttcgtggcgctttatcgatgcccaaggagctcttcgctggctttctgttgcagtattcggttggtttgcttctcaatgctctatctttagtgttcgattgttacgaattatgcacaagttagaagagaaatcgagaaagatgagatcttgaaggaaccggtatagatgatctgataataggtttgtttggtttggtaacataatcttgtggagtagttagagttattgcttgagctcatgattcctgttttatgatcttaccaaattatagttttgaaagagtagtattagagcatggataagttcatagcttgctgatgaatagtgttgcaggtcatgccactatcagcattttttgtgagtaaactcttaaatttgccaccacattacgcagccggtctcatattggttggttgctgtccaggcggtaaaatacaattctttacttgattgcattatattaacacttgtatggtgctctgatgcttttccgtttgttgtttgaaggcacggctagtaatattgtcacatacatcgcgcggtttgtaatccaaacaaaaagaaacgacttttgagttccataatacaactggatgatctgagtttcttttttttcattgtacagtggaaatgttgcgctatcagtgttgatgacagcagctagcactgtttcagctgtggtaagttactagattatgacattggtttttctattcttcttgtagataaagacaccccatttaatccattccgttttctagattatgacaccgcttcttacggcgaagcttgccaagcagtatatcacagttgatgctcttggattactaatgtcaacactacaggtttggttggttcagtctgtttcttattcggattagaacgagcgagtttttgttcattgactttacccttcttggctcctgtttgtgtgtggtcacaggtggttcttctcccagtgttggctggtgcatttcttaaccaatactttaaaaagctggtgaaattcgtctctcctgtgatgcctccaattgcggttggaacagttgcaatcctgtgtgggtatgctatcggtcagaacgcatctgcaatactcatgtctgggaaacaagtagtcttggcttcatgccttcttcacatctctggatttctctttgggtatctgttttcaagaatactcggaattgatgtggcatcatcgagaactatctctatcgaagttggcatgcaggtaactaaacagtatcttaaatgaaacggtaaccagagctattgaaaactcaatgtcaactgaggctttttttcttttcattttgtattggtgaagaactcggtgcttggagttgttcttgcgacacagcattttgggaatccactcactgcagtaccgtgcgctgtttctagcgtctgtcactcaatcctcggtagcgtcttggctggaatttggagacgcagtgccccaaaacagcttgaagactaaaaagaaagcaaaggaaagttcatgaagtcctcactgtgttactcaatttcaacatctttcaggaccatttagttaagtttgttgaacaaatgaaccaaaacgggttatgtcttgtaaagctttggaagatttttttttttttttctatgtctgagatttctcttgttattcttcaaagaattttgtgaattcgaaacatgaaaatcatattttgttcatcgtgaatcaagtgatgaggttgaaaaggctaatatgtaatttctaacatttgtggagggtagttttggggttttcaattaggaacagctagtcttggtcgcagaggataaaagacgttttaagtcgtcttctccaaatcgattttctttcacctttctctctgatttcaatttcaatttttgttcgtttttttcttccggaaaattggttgttgggtggatcaaagcttacgagatttgtacttttgttctggtgctacaagtccaatg

SEQ ID NO: 20820 - DNA, 3003 bp, Unknown; identical to SEQ ID NO: 20819
  misc_feature (1)..( 3003): 2750-1469P.txt file - cDNA_ID_1829148; gDNA_ID_1620813; Annot_ID_169141

SEQ ID NO: 20821 - DNA, 3003 bp, Unknown
  misc_feature (1)..( 3003): 2750-1469P.txt file - cDNA_ID_1829152; gDNA_ID_1620813; Annot_ID_50618
attcgattttgctctgtttgaataagtttccggaatttaagtagaatttgatatgcaagtgattgtatttggatcctagaacttgatcttatgggatcataatccatataaaaagtagactaatgctaatttacgttagattagagtgacacatcttgtttcctgtttaaggcgtttactaatcttatttggtttacttactgatgacttatgagtgatgaccaccacatacataaatttaaaattataggatgctttctgtttcaatatccaaaaagtatagtaatgatggtgtgtgttggttgagttataacatcatcaactattgattggataataatctcgtattttttagcactaaaagactcatttgcatgtaaacttttccatagaacaaatcacaatcttttttagtgataaatattgttacatctttttcaaaagggatatttttactcaatatagaagatctttggtagggtcctagtgattgtggattccgtgcctacttgaatgaggtcactgcagtcttcacgggaaaaagcattttcattcttatgcaatctctcgtttatctatctagtttggttgaaacagtgccacttggttacattttagtcttagatgttattagaacagatgcaaggtgtaagagattcttgttgcatagtcatgggagttttcttgtgtgtgtttttgtttacttcactcacatgtttcttggggtttcttaacttatatagttagactttcaactataaatttgtaaactacaggacataggcgtaaagcaaaagtgagagagcaaatcgtataactttatttttgcataaatatatgatgcccttagatttgctgtcttattaggtggaccaccggtttcttatactttacttttccttgttttttttttttttaattatcgacacatacaattggacgcattatgtgttgtccacgcacacacactaatactactgtgtataaacactaagtcgtcttcttcttcttctaccataaaaaaaggaacatcgtgtcctcatgcttgttgttagcttgggaaatcatgcgacagtttttgtttttaatctattttcaaagtcaatatatgaacagtaaggtttataacaaaaataattgcatccccgacaagaaagacgttgaatgatcgatcttttgaagccatttcttacttactgtacattgttttctaatgtgcatatcattcaaaagtttgacatttgttatctctgcaagagagtgtgttgtagaaagtcagttgtcgaatttacccccctttttcaaaagtcacattcaggtcactgcttggaaaagaaacactttttttctttctgactcgggtatccgattctcttttcttctgttgttactaaacaagagttaatttgcttgacagtagtcttataatctttgggaaaaaggttagttaaattgtattttatctggtgtctttgtgcaacattatagaagacactaacttaagcatcctcctttatgcataatttgatttgaccccttacttgttagtggttgaaagctataacgaatatcaaattggagtttaattaatcttattttcacacgtgtttttgacattgtggctaccaacaacatctctgtccataccaagtgcttgtttaacgtttacatgagacttcagtttgtttgttttttggctagttaggggtaaaaattccattcttcttttttattggtctgtaaaaaaaattccatttcaagtaagaagaaagggagatgtttctacgttgtattccccatagtcaaatctaacgtcagcttcggccgagtgagaggggtcaatttcattcagcttaaatccaacttttttttctatgtctcataaataaatttctctttggttacaaaaaaaagtaaaaaagtttggtcaggaagagaggagcgaggacccaccgattacgtcatctcgtctaagaagtaatcagaaaaaaaaaaacctaatttttaaaataaaaacatcttctcgtgattgcgaagtttgtttgtgtgtgctgtgtggtgaagggtgatctctctctccgccccgaatctccgggcgatgcgatttttatcactgttggtttaataatctacttcacggtggtgtgttttaaaataactgaaatagttccggtcgaaatttgtaggttttcgagattttttttttttttggttggaaaaataaaaagtctctgttttcagaccgaatcttttgatgtatcacttgcatggctgtgaaggctctgtgtagcctgtaaagcttacacgaggattttgttgctccccttaatttccctctaatatctctccttctctctctctctacgataataatgtcttctctgcaccgtttcctttcgccttctttctgtccgtttccaaatttctttcgtttcttctttttggctctatttacttgccatctctctcgatgataacgacatgaaacccacctcaaacaaaaccacattcacttattattagcctttgtttttttttgagtggccgtgaaggtgtgtgattctggtgccctttcttcctttttgtttccctgcttaaggtattcctgatttttttccgtttcttgggatttattctgtgccattttttttgtttctgtttccaaattcttggctagttaattacgacctcaggatcatgtggatcctgttctttttgttatcctcttcatcagtgtttgacactatcttgtgttttttccctctttttcaataaccttagatgcttattccttggcctgatgggacacaagtgatatcagtgtatggtgatagacaacgacattttcatattcttccttttttttttttcttctttaatgttatttatgtttttttacttgacacttggtttcttgatatgtcctgatttgctttgacaacaaaaaatgcaggttaccgttgatagagtggtgttttggttctgttttggtgtgagcgtatg

SEQ ID NO: 20822 - DNA, 3003 bp, Unknown; identical to SEQ ID NO: 20821
  misc_feature (1)..( 3003): 2750-1469P.txt file - cDNA_ID_1829152; gDNA_ID_1620813; Annot_ID_169138

SEQ ID NO: 20823 - DNA, 802 bp, Unknown
  misc_feature (1)..( 802): 2750-1469P.txt file - cDNA_ID_1829152; gDNA_ID_1564119; Annot_ID_148887
ttttttttttggttggaaaaataaaaagtctctgttttcagaccgaatcttttgatgtatcacttgcatggctgtgaaggctctgtgtagcctgtaaagcttacacgaggattttgttgctccccttaatttccctctaawatctctccttctctctctctctacgataataatgtcttctbtgcaccgtttcctttcgccttctttctgtccgtttccaagtttcwttcgtttcttytttttggctmwattwacytgccatctcthtcgatgataacgacatgaaacccmcctcaaacaaaaccacattcacttattattagcctttgtttttttttgagtggccgtgaaggtgtgtgattytggtgccctttcttcctttttgtttccctgcttaaggtattcctgatttttttccgtttcttgggatttattctgtgccattttttttgtttctgtttccaaattcttggctagttaattacgacctcaggatcatgtggatcctgttctttttgttatcctcttcatcagtgtttgacactatcttgtgwtttttccctctttttcaawaaccytagatgsttattccttggccygatgggrcrcmagtgawawcagkgtawggtgatarvcmamgacawtttcawawtbttcccttttttttttcttctttaatgttatttatgtttttttacttgacacttggtttcttgatatgtcctgatttgctttgacaacaaaaaatgcaggttaccgttgatagagtggtgttttggttctgttttggtgtgagcgtatg

SEQ ID NO: 20824 - DNA, 3000 bp, Unknown; identical to SEQ ID NO: 5725
  misc_feature (1)..( 3000): 2750-1469P.txt file - cDNA_ID_1829156; gDNA_ID_1620813; Annot_ID_50617

SEQ ID NO: 20825 - DNA, 3003 bp, Unknown
  misc_feature (1)..( 3003): 2750-1469P.txt file - cDNA_ID_1829164; gDNA_ID_1620813; Annot_ID_50615
acattgagatacttagtcttttctctgcaatgctttaagttttagatttcaatatcgtgtttcaccccagagctggaaatagtaacagtaaatttgcaattgattctggcgctgaagttggtttagatgatttacaatatcacagggaacagcggcaacgaaggttaaaatgacgcaaaaggaagcacaaggtgtggccgaaaagagaaagggtagaagaggaccacgcagtgtgattggttcaagtgctgctggttgtgtctgtgcttttctttcaatatatcaagtgggaggagcagctttttcccagcttttccggcttggttttgtttccagtttctgcactaaagtatctgacactgtctcgagcgagataggcaaagcttatggaaaaacaacgtgagtatgctactgttatccagctatagcctcttctgttatggtctgtgtctgttttctgtctgatgtatggcatggacttgtggtgtcatgacatgaatccaatcgacaactgaaatgatcttactaaccattgccaattcgcaggtatttagctacgacatttaagattgtaccaagaggaacagagggagctatgagtcttgaaggaacattggctggacttttagcatcattttttcttgcatctgttggctgcttcctgggtcaggtaatagtgttatttgctaccaaaatttcccttcacagcttctttatgctactaaagactgttatcattacacgatttttaaacttcttttccttttgatatcttgaacacagataactcctccagaagcagctgtatgtgtactagcttcccagattgccaatcttggagagagcataataggtgcttcttttcaagacaaagaaggattcaaatgggtatgctcacttcaatgaactctcttctttttgttttattgatctcactctgtctacttgttgtcaatgcaagaagatgataatcaaatgaatataccgtcacttcttgcagaaagactgatagataactggcttgagtggaaaacgatttccattcaatacagaattttgaagttttcgtcttatgaatccattccttgcaattagttaccaactaaacaagaatgcaatgatctcgactgtattctgtctcatgttagtcactattttgctatgtgtagctaaacaatgatgtagtcaacgtgatcaacataagcttgggaagcattgtggcgattttgatgcaacagtttatactccagaactgggtcaagtaaaacctgccacgaaggtcatgtattctcagtgaggttagattctttttttatattgttaaacacagccttacgtattcagtggtgttataaattatactctgttgtgtacaactagtagtccaacatcaatgaggggaaaaaacttctgggaccattgtctagcaattattggatgatatttatgtgaattaagtttgcctttgcaattgtcccgtagatagagaaacttataaaatttcttctgcttagggatccattcacgtgatttcttctatttccttcacatgaagtccaaattctattgcgacatcataaattgaagaacatgtaaaaaaagttatgtagcaaatagagaaagtagtgatgaaaatgtaagaaaaaagtttgaagaaaaggcaacaacaaagtaccaagaattggttgagaaagaagtcgtcgaagagtcgtgattttctcgaatacattcttcttttttgtcattattatgtcttgttcctgtcatctttagcaatattctcgacgttgcataagatagtgtttctggtggccaattttaatttagaagcctctagagaaaaatgcatccatcggcctagctgttaaacaagacagcgagacttaacaggcttgtttacttttagacttatgaaacatgaagaaaaattatacaatgcgttgcttctacgaacctgtggtccgcaataagatacgacaatggcccatgggccgcaacatctgtctaacacacagctgacaagtgtcaaaattcacacgcgctcctcaaacgcgtgtattttacgactgatttttacaccgccgcagcgcaaatctcgctttttctttcttaaagtcaaatgtccgccacggcgcgcctgaagaagactcttgcttgccctttttcttactttttttcaatgttttttcacttttttggttaaattctctaacatgggtttactactgtctcgataatagtagtaagtttgtaactttcttatttctggaactgatctagttctaaaatatgcttaattctttattaagttctaaaagaactactttaaaaattaataacctattattaattacgacaacatctaactaagccattaaatacaatattcatcgttttgcgtgagtccttcatacatgtgacgaatgtcccttccccacaaaggcacaaacctaacctaataaacaataccaaaaatggaataatttgatttttttttgaaatactatatgctagcgtagaatcaaacaaaatatgtaaaacgatatccttaaaacaaaatgtatactaaacaaatattagtttgccaaagtttgacgaaataataaaaacctaaatggttcgccgtgagtaagttcccatcttcttctcgaactttgccaaagtttggtattgaaaaaataataatattaagacacagagagagagagggagaagaggatctctgtgtgtcgtccaaatttcaaagtgatgatgttgtagctgtgtggtagcgattggcttacacgcgtcatactttaattagataattttatttccttattacttaccctctcttttctcacaaagagtcatcaccagctctgatcaaataaaagcgttttctcttcttcttgctttcacagttacccaaaagtgtgattaaatctttcttttttttgctttccttctctaatcgttggtgtgtacgctaaacctagatttcgctggattgtttgagtaatg

SEQ ID NO: 20826 - DNA, 3003 bp, Unknown; identical to SEQ ID NO: 20825
  misc_feature (1)..( 3003): 2750-1469P.txt file - cDNA_ID_1829164; gDNA_ID_1620813; Annot_ID_169134

SEQ ID NO: 20827 - DNA, 3003 bp, Unknown
  misc_feature (1)..( 3003): 2750-1469P.txt file - cDNA_ID_1829172; gDNA_ID_1620814; Annot_ID_50648
ggtacgtgagaaagtgacaaagcactaatattataaatcacatgccctctcattgacgccatgttcgtctcctattgcatcaaaccccatctgtctcttaatttttaatttttgttttaaatagtagttttattgttattattgtatagtaatctttgtaatttccttccaaaatctataatattttttagccgcaaatttatagtagatccactattgtgtgtgtgtgtgttttatgtttatagctgaggttattaagccacatgattacatgtgaattcctgtaagatattcgcacgatatttttatccccaccaatcaccaatctatgattcaaagtgtgtgacatatactgactttcgaaaaatgaaatgagtaagcaaataagattacggaaaaataacaatgaacacgttattaacctgcgacgacggtgatttataacgtggatcctctgtatttgcatgttccacactaatccggtcctaatgtttttcaccttcattgctgtttctttttggtcccttctgctaattgagatatcataagatattatatcctcattttcaatatataggatatttgagttaaaagcagatagtttaagattttttttctaaaacaataattcaatattaaatttttaaaaattcaaccaatcacaaaaaaactacataatctaaaaagtcgtaaaaaatcaaatacattaatttgtaaaacatcttatataatgaaaaaaaattaaactctaaaacatccagtatagtgaaaaagagggagtagtactcaacaactactaatttcataaggtttccaactcgcgatatagaaaaaaaaaactaaaaaagaatttgattagtgatcagattttaaacagtgttataaatactgtttttaacgttatacaaaaaagctggatatttacgctggttaaaaaagataacaatataatcttgaaacaaaatattttttgagataaatttagcatatttatgtattagttgctaaaaatgatttatttaaatataaattaaatgtgacaaatattaggttagtttttatgaatgaaaaaactcatttttacatatttgtactttttagtattttagtgagtttaacatcaagacaatcaatttaactatttttttaacgacgcatcttggcgggttctaccaacttaaataatattgttcgttgttctttattccatgcaagttaaattttcaagcaacgataaattatgatatttagttttgtcgtttatgaatatttattttttagtgtcggcgattaaactctcgttttaactaaaattaaaaattgttagttaatttaacatcaataacatcagattaatttgtccatcttcttggccaattcttccatcttaaatgaacattaactagtttgatatttcaatgataatcgcaagaataataatagaaaggtatttaaaaataatttcttagtatttggggagtaaaacataaatactattttttttttgtcaacacattaatactagtattaaatttgccaaattttatgacacatattggagtgttcttccattttaaatgattttttgttctctcacgtaaattgtttattaaagaaaccacaaaatatgatatcgattcttcattttctggttttaactattgcaccctcatttttaagtaaaagaaattgctaatataacttttttttttggtaatagtttagtttataaagaaaatctaccctttcaattatctatcaatgttgctttttaatcaatttttggaaggtgtatctctgcaaaatataaataaactttgtttttctagtaaatttagagaaaacaatgactaaaaaggtccaacttttacacgaaagtgatagacatccggaccactcttaactcttaatataaatttgaaaaatctgactttcatattattttttatctaaacgaaaaaaccaaaatgttagtcgtaatccatgttgcaatgaacggaccccataaataattatcctcccaaaaatctactcataaacgagtcatgacaatgattttttaattaatattcagatattgtttcctcagatctctaatttttccccagatacttccatccgaaaaaaattgataaaataaaaaagctagattttattaatttattttaactagtcaattttttttcttttatgagtttctaactttctatataaagtttcgaaaacattaccaataatcgtcgtaaatcactccccacctcattcatatttttagccgccagaagaactgattggtgtaaaatccaattttcttgctgttgtgagttttcacttctccgaggtaaaaaaactaatcccggcggtgagaatctcttgggaacttgctctgaacgaaactttttgttgcaataattgtaaccaaaaaataaagaagacaaaatctttttgtccttattgtagattccatcgccggagcctgtccgaaaataaaatttaactaaacttggcaaaattcattcaaaacgagtccaaatcaaatcaacccctatttcaacgcctctttttctccctgatttatatatcggagagatttcaaggcaaagctttctcatttcctcgtaattgccggcgaattctactaaaggtgagacctttttcattttcccagaaagtgaagcaatctttttggggttttattctctttagctttcttaactgatcaaactaaaaaagcaattctgttttttctttcttccctcctataggttagttactctgcatttttgattactgtttgatgatttttatgtttagggtttttaattgagcaaattcttctgggtttatcagattttatatttttgtgaattggttaagatttagatctggatttagatttttctttgtttcatggttgactgaaagtttgaaacttcaaatggagaatcactgaatctgactgatttgaattttggtggtgtttctagagtttgttgagcaatg

SEQ ID NO: 20828 - DNA, 3003 bp, Unknown
  misc_feature (1)..( 3003): 2750-1469P.txt file - cDNA_ID_1829184; gDNA_ID_1620814; Annot_ID_50644
aacctatcaaactaaaaggtgttagaaaatattgttggattaaatattataatttgtatatagtaaacattaaaaggtgattttattgacgtataataatctaaaaaccaaaaataaaggtgatatattgaatagaatttaactatttagtaggaaggaagcaacatgggcaaattgccaatttggtttataaaggagcccacatgtttaccttactattttggactttctgagttagtgtcgaaggcctttgggcccataaatggaccccacaaaaagacaggacaaaatatccttagaactcgccacgtagatatctcgacgtggagatctgaccacgtgtacagtttatgtcctgattttcgcaagagtgacgtggacgggtcatgatccgcttatattttcactttgtctacaagccaagtatattaaattgggcctcaaattagcccaatcaatatatcagtacattattaatcaaaggcccaagtctcacgctagcgatcgtcgacaacgattttgagtctttctccgaagtcgccggaatcgtattcgccgatccaattgtcgcatagaaactgtcatctccggcgagagactgatctctggtaagtcaattcgatttcgcgcgttttataacttctggtattttcgtattccgttgctgagagaaaatattgcagagattgcttaacatgaagctgatactttaaccgattcatcaaattgacaaaaatcgttttcttctttagggattgatacagaactcgtaggatgatcgatttacgctataaagaatgctacttgctcatctgtcttatcgtcttcataaattttgtgacttgttatagcgatgagagactgtaagtgttgttgaaaaacctcacattatccccaaactcatcaatttggattcttttattggtactgtagaaatgatgttatcaggtttctcttaggtttggtggaaaaactttatatgctgggaaggaactttggaaagagacactgccattgaaatctggatctcgagtttacaaattacaagggcttaagtcgaactcttggtatgaagtcaagatatcatacccagcttctgtatgtcaaatttgttatcttgttctatgttcttatgtttccaaggttcttgtgcttgttaaaaatctcatccttttttgttatgataacagataccggctctattttcgctgcaattactgaagaacggtgtaatgggtttgaaggttaaccatatgaggagattactaaacactgagaagttgatcttcaaaacagaaagtattgaagaagttgataacaaggtattgccatcttcttcagttagttcctaaaacttagaaagaagaacgaatacaagtttaggagtttgtttctgatttaggagggattgtatgttttggtgacggtggaacctgaaggaatcgtggctataccaaatgttaaagaaagaccgtccatcatttacaacataggcaagcttttttttctacttactatctcatcaatcttcttcttttcacaacataagaacttgtattaagtgtagtgcttcttctagagtctgaaaactctcatgttgacagtttgtgaagaacagctcttaggcatccctcactcaagctggtcagtggtggttttagtagttttgtgtctcgttgtcgcgttgattcttccccggttcctcccatcttatcttctgatcaaagatgtagatcgtgatcgttaagaagaagcatggttaatacagtttcctcacctctttgttttgttactctgttcgcattttgatgtttgttcatctaattttgtatggtttttagttcttacatgtccactgcctcattcatataccttaccttaccacaccgcactcaaagaagagtatataagtctacatgtgttagattgatttcatgtttttcagacgcgggaagtcctattctgaacttgtatggtttgatcgtatatagttaagtaacgcttatccgtttgaatttcaatccaacaaacaacattccacaagatgaataactctaaagtacaccgtattatcttttgggaatagggagtaattaattaaaagcaaagaggttacacatatttttaataaataaatgaatttttttttgttcatataatgtatgaaataaccgttaatttcccggcagtaatccgctaaaataactccaaccaactgtgataataaaagaaccaaactaggattcggacaaaaccacaatttgtgttctaattaattacagcgttaatcataattactagatgatttcgagtgggacccagggtgaagaacaactccttttgttttctctctctctcgaagaatttatgaatcataatcacgcatcatcgtcttcgtcatcaccaacttcttcaccatcatcatgaatgttaaaacttccataaacaaatccttccttgtccccttgtatttttctatctaaatccctaaaaccactcaaaatcatccctctttctctcctccccattttccccaacgcttgattcgaattcgtctctctcgttttctgttgttctaccaattgagcaaccctagaatcattcttgtgtacctaccggaaccgagtcttctcttcttccgtggcacatctttcaaagttttaaaccccttttcccctaacttcttttcatttttctgtttttttcccgggaaattttctctctctctctctattttttgtttctctcgtcatgatcattacttgtcaagtatgatcctttattaggtttctttggggccgatctcactttttctgtttctcaccctcttctcttcgaaggcccttgtaaaccctagaatctcctcttttcaaatttatatgttctgtttcttcatcttcaggtttaatcattcaatctatctctagggtttaccgggtcaagtcttaggatctgtctctatccatacttcatcaaagtttccgtctttggttctaatccatg

SEQ ID NO: 20829 - DNA, 3003 bp, Unknown
  misc_feature (1)..( 3003): 2750-1469P.txt file - cDNA_ID_1829191; gDNA_ID_1620814; Annot_ID_50641
ttctaggatttcacccgtggtagtatttaattgtataattatattttaattgtcattctaggatttcactcctaattctatcgcaaattattatcaacccaaaccagtcaattctaaaatatcacccgtagtaaaccatcccatattaatatcgattcaaactcgtcaattataggatttcactcgtggtagtatttaattgtataattatattttgattgtcattctaggatttaactcctacttctatcgtaaattcttatcaacccaaacagtcaattataaaatttcacccgtagtataaagtttaaatatttataatgtttaaatttattataaaagaatcaaaatgtgttttaaaaaaattaaagttttaagttttttttttttaatattgttaattttgtttagtgtttaagattatgtaattatattatgattgttattatatgtttttttccatagcatactatcccatgttattatccactcaaacccgtcacaccatataaccccgtcccgtgaaattaaacacaaatttgtcattttattataaattttaaatatttataaaattagaaacttcaaaaaagattaatattgacccaaacttcatcattgaattttgagtgttatatctaagatttctctcgcagtatatcgtcccgtattaatatcttttatattgtttaaatttcttgtaatatttaatttataattttttaaactttttaaagtttcaattttttaaaataaataaccctagtaaaacaaaccattttaattttggacacctcataaatcaagtttcatgctcattcgtaatcgaaatcattttggtcctttttatagtatggctcttgaccattgtccaatttttttaagcgatatagaacattctaaaatcgtaattattatccacccaaacccgtcctaccatataatccagtcccgtgaaattaaacataattttgtcattttcttataaatttcaatattataaaatttgaaacttaaaaaaatacaatatcgacccaatttttaagatttttcctgtaatatatcatctcgtattaatatattttttctatatttgtaatgtttaaatttcttgtaaaattcaatttataatttttaaaactttataagttttaaaattataaatatttaaagcattttttaaagataaactttataaaaagtttttaaaattataatatttaacatttgataaagttataatatttataattttttgaaacattttaaagttttaattctttaaaataaaaaatccgagtaaaatcggataactattttaattttggacgcctgataaatcaagcttcatgctcattcataatcagaatcattttggtccttttataatatgggtctgaaccattgtccaatttttctaagcgatgttggacattgtacacatattatttcttcataggttgaataatatatgtccgttttaaaaaatttgaattacatcatattcagaaaaaaatataatattttattaactatatatattttatataaattcaaaataaataaagtataagatcaaataaaattgaaagaagaattatatatttatgtttaaattaggtagaaatattttaggaaattagttaaggtaaataagaaatatggttagtttagagatattgtttatattaaatttggtaattaaatcattaattttcgtttttaattattagtttttaggtaacttttccaaaaactaatgttatccaagatcagaactgaattaaacatgttatccaggatctgaacagagttaagccgagtaaaacccacccatttgaattaattgttgaattatggctcaaatcttcaacattatcttcaaaaatcccctccaaacatgtatatatagatatttccattatgatatagttttcacatcttaactccaaatcatgaaacctaaattttatttccaagtctcaacatcatatattttaattatcatcttgaacttcttgttaaaaatataaaattaattcataaacttttctataaacctaagttttttaatattttttgtatcgtatttatactaatttcgatcttctttgtttcctccgtaatcgttgtcgtaatttcgtaaacctaaatttcatatagctcctttcttctatgtatatatgttttgtacaatgtttcatatatataataacaccctttggcaaaaaaaaaaaaaaaactttttcaatgtttatctttcgtggttattacatatagtagaaatcccaacattcaacaacaataaaaggttacaaatcctatatttaccaaaaattaagaaagtctaaaaagactaatagatacaaaaagaagaaaagaaattgtttactttttgagtgtaaaacaaattaaagttaaaaaccacataacatcccccatcccatcttttttactaataccttcctccattaacataagattgtctctcctctttcgaattgtctctcctttttcagctctctctctgtatctccttcttcttcttcttcctccagcttctttcaatttctccggctgctaaaccctagcgcgccgtcggagtccctgcgttctcataccaacctttactcgccgtcgccgtcgctgcagaactggtaagcatatgtttttttttgctgctctctgtattctatggaagctgaaaggtcttctcggcttgtttatctgtggtagttttgattaggatgaggttttgtagtaatagagtgagtgagtttgctccaattcttaattgcgtttagagatagaagagagagagagagagaagctatagtttccaggcggagaagaaagacaattcctttttgtttaatctggaatcaccaatagttagttatatacagtttttttatcttcttcgtttttttcttctggatttgttcttttgtccttgtcttgctgtgactgactactccacaacagaaatcgaagcttaagatg

SEQ ID NO: 20830 - DNA, 3003 bp, Unknown
  misc_feature (1)..( 3003): 2750-1469P.txt file - cDNA_ID_1829207; gDNA_ID_1620814; Annot_ID_50636
acccgtaaacatgtccgcttgactgctgtggatctgatggcttattctcacatggataacccgcagagtcctgatttcttgttagggaagctggaagaactggacccttttgttgaacaaatccgcgaggaaacactgaaggagacactgtgtcatggtattggatacttgcatgagggtttaagcagtctggatcaggagattgtgacacagctctttgaagctggacggattcaggtttgtgtgatgagcagttcattgtgttggggcactccattaactgcgcatttggtggtcgtaatgggaacgcagtattacgatgggagggaaaattcacattctgattatccagtccctgatctgcttcagatgatggggcgtgctagccgaccacttcttgacaatgccgggaagtgtgtgatcttttgtcatgcaccgcggaaggagtattacaagaagtttttgtacgaagccttccctgtggaaagtcagctccagcatttcttgcatgataatttcaacgcagaagtggttgctggggttatagagaacaagcaagatgccgtggattatcttacatggactttcatgtacaggaggcttccccagaaccctaactactacaatctccaaggtgttagccacaggcatttgtctgatcacctatcagagctggttgagaacaccttgtctgatcttgaagccagtaaatgcattgaggtagaggatgagatggaactctctcctctcaaccttggtatgattgcatcctattattacatcagttataccaccattgagcgcttcagttcactgttgtcttctaaaaccaagatgaagggacttcttgaaatcttaacatcggcttcagagtatgacatgattcctatacggcctggcgaagaggacaccgttcgaagattaatcaatcaccagaggttctcttttgaaaacccaaaatgcacagaccctcatgtgaaggcaaacgcgcttcttcaggcgcatttctcaaggcaaaacattggcgggaacttggcaatggatcagcgtgatgtccttctatctgcaaccagacttcttcaagcgatggtcgatgtgatatcaagcaatggctggctgaatcttgctctgctagctatggaagtaagccagatggtgactcaaggcatgtgggagcgggactccatgcttctgcagctccctcacttcacaaaagacttggccaagaggtgccaggagaatccagggaaaaacattgaaaccgtattcgatcttgtggagatggaggatgaagaacgccaagagcttctcaagatgtcagacgctcagcttctagacattgccagattctgcaaccgcttcccaaacatcgaccttacttacgagattgtgggcagtgaagaggtgaacccagggaaagaggttacattgcaagtgatgcttgagagagacatggaggggaggacagaagtgggacctgtggattcactgaggtatcccaagaccaaagaagaaggatggtggctggtcgtgggcgacaccaagacaaaccagttgctggcaatcaagcgtgtctcattgcaacggaaagtgaaggtgaagctggatttcacagcaccgagtgaaccaggagagaagtcatacacactatacttcatgtgtgactcttacttggggtgtgaccaagagtactcgttctctgttgatgtcaaaggatccggcgctggagatcgcatggaagaatgatttgttattcaggttagttccacagttttctggtcatagttttcggatttagattctgtacatggttgtagtttttgtgttacgaacttggctttactagattctgctatgtgcattgaccaactcgctttcatctattgtttgagtaatttgttcatcaatctgctatttttctgtttcgtctgttttctttttgcatgagctatgtattaggttttactcttgagcattgatttacttatctaggtattagaatacaggtatgctcatggtatatatatacctagtattgtgaaatgattgattgataagttagtgaacaatgttgatcagcaaattgttagaaatctgtataattggatggtgatttgatgtgtgctttggatggtgatttgatatgtgtgcatcactgctatatgaaaactgctttcttgaatcatgtctcataaaaatctcacatgatgttcctttaaaatagctgataatagattttgtattttgaaatccagaaaatgacacataatttctcttctttgcaggctatgctgattctggagagtgtgacttgtcttccaaaaagcctccgtaccgtttgggtctctgcaatcttagctctctgagaatatatattaaggtgtaatcgtttttttctggtcttttactattccaattactctttttatgtcgtgcatcgatttttaatcctatgtatggcttgtttctagttttgtttggaccaaactcgacagaggagccaatgtcaaaactacaatttgagtttgtgactttgaaagctgagattacttgaaagaattttaaatgcagcagtgttcattttgtaacatctgagttgtgtgatactggcttattgagtcaccgatagtttttccttaaaactaaaatgtactattgcaagtaaaaaccaaacaaaaaaaattcattcaaacttgcattataaccaagtaaacgtgatcaatagaaacttgcaaaatcacaaccaaaatatttgtccaaacaatatgtagtcaaaacagtctgttgtgttcataaaaaagtcatataacgatacaccaaaaagaaagaaacggaggtgtttggttggtagtatattcctcctcctcctctttcttcttctccctcctcactatatattttgaagtttattaacaagaaccaaaaaaagtcacactcgaagtctcacaccacaccaaccacttcttcttcttcttcttcttctacataaaacctaacgccatg

SEQ ID NO: 20831 - DNA, 3003 bp, Unknown; identical to SEQ ID NO: 20830
  misc_feature (1)..( 3003): 2750-1469P.txt file - cDNA_ID_1829207; gDNA_ID_1620814; Annot_ID_169176

SEQ ID NO: 20832 - DNA, 3003 bp, Unknown
  misc_feature (1)..( 3003): 2750-1469P.txt file - cDNA_ID_1829211; gDNA_ID_1620814; Annot_ID_50635
ctataaccgaaaaataatttccctatagaaatttaaattgcatattgtaaagaagatagttattcttcattatttattttttactgcctaacttgattaaaatttactttaaataacttaaccacaactaagcgattaacgttcataaaaagatactcatcctatattttcatattgaagatgagaatttttcttttccaacctactaactgaaaatgacgtgcttactaaaactctaatgatatgtcggtttcggtggtaagattcaataaatacaatacaagacacacattatctaatggctcttttgttttcttgcctacatattatgacatttatttagttttccgctgtttgtttatttagatctactccacaatagttgacgaagatatattatacgcgtaaatagaattgaaaaatacgttaatatacggagacgactttaatttgtagttgccattagtttggtaagcactagatcgacaataaagtgagtagctggtaaaactaattaacaatataccaacttgagttaattcgtcaaagagacagctacacaaataaatcaatcaataggcatgaactaactgacaatatatgccgcaacacgagctatatatatccgtctatgatacatatttttctttatatcaagcttttcaaatgtataggtataagaactcaattttatgattatcgcctctacacgttgtttttgtgcttttttttttctacttttgtatatatttgggtcatgcgtgaagcggtgagagtactttcggttggtggaatgtcacgatgagcttcatcttttgaccttatcaattctagtagcggttcctgacatggaaattcacgtatacatgatacgaaaactgttacatttcgtcactttcgtcaatatttctacgcatattattcatatatgttatctattttcttcgtatgtttcacaaaaaacgtattttggactttctagggtttgttaaaatctctaatagtttattcatagtatatatggaaggaatattgagacaatattactcgaaattttaattatgcatggatatattcagaccaaaatgtcaattagcctccgaaatgtataaaacaagataaaggatttatagtggtcaacccattattgttataataaaggattttgtagttaactatgatacattgtaacacatttgaattttgtggcagactagcgatgattttctgaatgacctttttcaaatcaattgttacttgtaaaaatttgtcattaacaaccgtaagtgataatcggtagttaaatattccttccatatatactaatcaaatgcagcggttaaataattgataggaaaaaaaacagcataggcattgttactttgtgtttacacttttgaataaaaagtattattaagtaaaacaaataaataataaaaaatattattaaatcttggaataaagtacaccaattttgtcataaataattaactccggcaaaactttaaagataatggagccacactatgtcacatgatcgatgctccctctaatccgcaataggtgcttacatggatgtttaaaccgaatttaggcggacgagagttcttagttgtttatatatacgtaatttgttttgttgtatatgtgcagtaacaaaaataacatcgctttaaaacaaaaaaaattgaagtggtttagcataattttagatattaattaatcttggtaaactcttaaaaaaacagttttgttttagaatattaaacaaaaatacataattgaatatgatgctcttgttacgtggatttccacacatggcctttttgggacattttgattttccacgtctcaatatttcacacgcctacttatgtgatgactgatgcgtgattagtcaattttctgtattaaattactgttttgtttgtttgtcaccattctctgtatttccttaaagagtaaaagaaagtaaaaatttagtcaccggttgagtttttttctttccaaacaagagttttaatgatggagtgagtttttcttgtactttgtcatgttgttatggtagttgattcttgttatatcgatatataacatgagaactctttttaatacaaaactataaattatacgtgttgcatgtttgaaaactatattatcactaagatcaatagatctctttagagatttgacaaaaataaacaaagacatatatataaattttttggatatttttatggactgcccagttttcacatgataacacatgaaccttcgtctcatatacatgtgccatcttttactaatctaagattgcattcaaagtaatcagcctccatgtcattgtcaccatttaaagtttttcccattccttgttcattattacacacacattatatttgtcagcgattattaatgttgaggtattaatattttgacaattttaattcttataataaacaaaaacacttgcattcattctcaaattaacaaacgcaaaagaaagcatgagaccattgtcttattacgttgggcttaggaagtatgtacaggcccagcccaatccatgtacagagtcggtttcgttattggatccatagtttcaaaacggcatcgttaaagttttccaccttaaggcggtatcgctagcttatagaaagaattcgcagtcgaataaacgaaggagtgtctcctttagtcatttaggtcgattattaggagatagaggacgtgagaagggagagatctgagtctcctactagggtttcttctactggattgattcgttgcagagagtgaagctaagaagagattttcgtagctgtttctgtaagttttttttaatctccgtttcctcgatttgggtgtggttttattagggtttatcatctctgggagcttcttcgtttcacttttggttcgtttcttcgatttgaggttaacattgtgtatttttttttgttcctgtttgatttggtttctaggttttcggattggtagatg

SEQ ID NO: 20833 - DNA, 3003 bp, Unknown; identical to SEQ ID NO: 20832
  misc_feature (1)..( 3003): 2750-1469P.txt file - cDNA_ID_1829211; gDNA_ID_1620814; Annot_ID_169175

SEQ ID NO: 20834 - DNA, 3000 bp, Unknown; identical to SEQ ID NO: 5748
  misc_feature (1)..( 3000): 2750-1469P.txt file - cDNA_ID_1829215; gDNA_ID_1620814; Annot_ID_50634

SEQ ID NO: 20835 - DNA, 3000 bp, Unknown; identical to SEQ ID NO: 5747
  misc_feature (1)..( 3000): 2750-1469P.txt file - cDNA_ID_1829219; gDNA_ID_1620814; Annot_ID_50633

SEQ ID NO: 20836 - DNA, 3000 bp, Unknown; identical to SEQ ID NO: 5747
  misc_feature (1)..( 3000): 2750-1469P.txt file - cDNA_ID_1829219; gDNA_ID_1620814; Annot_ID_169172

SEQ ID NO: 20837 - DNA, 3003 bp, Unknown
  misc_feature (1)..( 3003): 2750-1469P.txt file - cDNA_ID_1829228; gDNA_ID_1620818; Annot_ID_50676
aacgcaaaaacttttgcgctggagtgacaaagagttggaccgatgtttgcactcgagcattctcagatttatgcgagacagctcataggatcaacagggagaaacaattggctttagagagagagaaattcatagaggatatgaagaaactcaggttgagtctccaacaagaaaaatctaataggttaagtgtacaacaagtaaaaattgcttctcctcctcctcctcgtcctcatcctccagttgaagacgaaacagaaaaggcccttagagagaaagagacaatggaggtaaaagagaaggaaggtgtgctggcggcagatgatcggacggttttcctgacgttttcaaaagggtatccgatctcggaagcggaagtaagggtttacttcactaggagattcggggaagtgatagaagcggtagagatgcaagaagttgaagcaaacgagcagccattgtttgcgaagatggtgatgaaactgcagtgtgcgtcgatgatggatgagattgtgagtgcgaggtttagaaacaagttcaccatcgatggcaaacatgtttgggctcgtaagtacgttcgcaagaatccttatccagcttcatcctctactcatttttgagtgtttctgaacttcttatttacatgttgtgcttgttgatgttgtcgttgttgttgtttatctaataaaattgtgtcgtcaatcttattattgtgctacacattaatatatgtttaaattggcgagtacaattacttttttactagttggtgttatttttatatattttgaatcatacaatgtttgagaaatataacgccggaaaacttccaagaacaaatgtatatctatgtataattaaattcataagataaaataaaaaaataatatatgattggctaattatcagtttctatatatttaattattattaattaattgatagttttttttatttgtttggtcttttgttataggatatttgatttagtatagtctgtcaaataatcaagaagatgttgtgccaacatcctccattagcatcatcgctccgaaatgttttatctaaggtcatgttacttagaatttgtgttgaatgatttaattacaaaatctacatcgtaattatatttgagttttaaaaatgtatatttttatgttgtatactttttaaaatcgacgtagcaatttaattattagtcaaaataaaaatgaaaatatgattagttcatagataactgtatcgttgtcgtttttagaatttttgttattacgtgggatatactccatccgttttaaatgaagtgttgttttagaataaatgcagttttaaaccgattaatatactacaagaacaaggtttttcttttccttcttcgatgaaaccatattggtgttaccctttcttctttggatttggattcaaaatggttttagaaatagaaataaactatcattgactcatccatctagatggaaggtcgggataccttaaataataaaacacgtagaacacgtagtaataataatgattagaaactaaaagttaatcgtaatgatcaatagtatcttgccaaggttagaacacttagatgaaagtaagcttgacacatatggtatctgtggttatgaaaaacattatgaaaaagttgtgcacatgttgaatgaagcagttgcttatcttctttcacctatatttatttaataaaatgatgataggattaagttttagggtaaaccaaacaaggatttagaaagagtaggaagattttgttttataccctaaggatgctagtagctcatgccacgatataccacttatggcgtgacaatcagcaaagactcatgtaccgatcattttcaagataattgaccgacatgtgttcgtaatgccaaaccgaagaaagtttagaaaactcatgggtttgtggcttccatgggagtgaactccagatcaacccatctcaaacttgttttgtactctatctttttggcaaggacacagttaatctttttgtataaccgctacatttcattatttatgatatttacatttttatcaaaaatgattcacgaagattaggaatatgttttcttatcgcacttaccattaagagggacatcgaaaacattgcatagaagaaaacaacacaaatgatggtttgattaagtaacaatggcgtgaacctctatagcaggatttaggctaaatctttgctgcgagtacatcatgtgacccaaatttttaaaaacgtatcaatttatcaagagtatgaacttataaggggtaagtaaatgagagataacatgtttatcagatgaaatcaaccaaagttttttttttttttgttgcttccacatgcgcatatgtgaatacgtaaactgccgacaaaaaaaaaaaacattctttctttattgcgttttctaagcgagaatgtcgatgtgatcagttaatgcgaacgggtaaaattagatcagtatttataaaaacaaaaaggcagtggaaaatctagggtttctaatattaatagccttgtaatcagcattaacttagagatatttaaatctcaagtttcattgtcaacagaacttattagttattattactgttgagtgatgactgatgaccaacaacgagtacttgatctttattgaagaacacgcaaagaacaaatagctctcgtagctcagttggttagagcacccgtttagtaagcgggaggtcttgagttcaactctcaacgaaagcaattttttaaacaaatttacattttacaaacagaaaatctagcctgtaacggaatattgtcgttgtgaatattttctttttgcctggctgtataatccccaaatatagaaataacaaaagaaatattcgaaaactttcttaaaaatagattttgagaaaagaaaaaaaatggttccttgttcctaggagaacaggaacagagttgggtgttccttgtttcatctcacattgaaaccaccggagagagagataatg

SEQ ID NO: 20838 - DNA, 3003 bp, Unknown; identical to SEQ ID NO: 20837
  misc_feature (1)..( 3003): 2750-1469P.txt file - cDNA_ID_1829228; gDNA_ID_1620818; Annot_ID_169367

SEQ ID NO: 20839 - DNA, 3000 bp, Unknown; identical to SEQ ID NO: 5788
  misc_feature (1)..( 3000): 2750-1469P.txt file - cDNA_ID_1829236; gDNA_ID_1620818; Annot_ID_50673

SEQ ID NO: 20840 - DNA, 3000 bp, Unknown; identical to SEQ ID NO: 5788
  misc_feature (1)..( 3000): 2750-1469P.txt file - cDNA_ID_1829236; gDNA_ID_1620818; Annot_ID_169362

SEQ ID NO: 20841 - DNA, 3000 bp, Unknown; identical to SEQ ID NO: 5789
  misc_feature (1)..( 3000): 2750-1469P.txt file - cDNA_ID_1829243; gDNA_ID_1620818; Annot_ID_50671

SEQ ID NO: 20842 - DNA, 3000 bp, Unknown
  misc_feature (1)..( 3000): 2750-1469P.txt file - cDNA_ID_1829247; gDNA_ID_1620818; Annot_ID_50670
atcatagcataattttgttcttggaaagtatagtttggacaaaagatgtcgtgagacagagagtaggtcgttaaactatagatagcggtagaaactttgttgtatatcttttgactgatctgcttaaaaaatctgagctcatctctttgtttctgtaatatttcagaatgcggcattccaagaaattttgccacaggttcggcagcatatcattgatggtttcagccccaacgccttggacatgttcactagagagtttgacttctttgacaaggttacttctatatctggggtgttattccctcttccaaaggaagaacgcagagccggtattaggaggtagcattttaaatttgataaaaccttatcatgttacggatgtgtctgcatagtctaataatactctccatggcagggagttggagaaaattgaaatgcagggagatgacctttatttgccaactgctcctaacaagcttgttaggggtatccgtgtagacagtggaatacccttacaatcagctgccaaagtccctatcatgataacttttaacgttattgatcgtgatggtgaccacagtgatgtaaaaccacaggcttgcattttcaaggtaatcctccgcatgattttcatacaaaatttctatgtttttccttatagaaaatgccagtgcagaaaaaagaaaatacttctcctgtcagactctaccacttgtttaagtaaataaagtttggaaaacgttggaaaaaaaacgtagctagtggtttctggacattcagatgctgcgcccagttggtgagtttactgtgagttagatgattctctcttgtattcattcaggttggagatgattgccggcaagatgttcttgcccttcaagtgatatctcttcttagagacatatttcaagcagctggtcttaacctttatctttttccatatggagtactcccaactggtgcggaaaggggcataattgaggtaaatctcactctaaaatgtttaatatccttgctggatgaaacagatacggtggtatgagaactttcttgtatcaaataaggatcagactttttgttcacatctcttttcttcccttttgttacaggtggtgcctaatacaagaagcagaagtcaaatgggtgagactactgacgggggtttgtatgagatttttcaacaagactatggacccgtcggctcaaccacctttgaaacagcacgggagaacttcctcatcagtagtgccggttatgcagtggctagtcttttactccagcccaaagacagacacaatggaaatctcctcttcgatgagtatgtttcctatttttgcacattccctttgttctttgattctttccacttggtgcattggaaaaaagtttatcaaaacctctcgatggaaaaatatagtgttggaaatttcatggaagtaacacaactttattaccatgtgttatgctaatgcagcgtgggaagacttgtccacatcgactttggtttcattttggaaacttcgcctggtgggaacatgcgattcgagagtgctcatttcaaactgagccacgaaatgactcagttgctagatccctcgggtgttatgaaaagcaaaacatggcatcagtttgtgagcttgtgcgtcaaggggtacttagctgctcggcggcagatggatggaatcatcagcacggtgcaaatgatgctagaaagtgggttgccttgctttagcagaggagatccaattggtaatcttaggaaaagatttcacccagaaatgagcgaacgtgaagctgcacacttcatgattcatgtatgtacggacgcatataacaagtggactactgctggatacgacttgattcagtatttgcaacaaggcatcgagaagtaagaagaagaagagggaacttaatgatatccgaaaccagagttatataatttgcaggtaaaaaaagtttaagccatcgagtattccgatttgataattgttatctcctctcggttgggacattctgactaattgattacttaagaggaacttgaggattattatttttatgtttttgtcgtaggattttgctatgcacaaaaaaaaaaagtaacaaaagagagaggtaggagtgttgtggtgtggggattttcgataacttgagatgtaagctactattatatatgatctttgattattcttgggtggaaatggtcacgtgtttcttgataattccatgcgttgtataaaacaatttatttgattcaatgccggatgataaactcattacaagtatatcatcccgcatacaccagaacccaatttagttctttcagttcctctgcatcagaaatgaacaaaaatgtattctattaacatgtagaggtatttgtattcagtggatgaacactttctggttgctcattccgcttttctggttactcattccgcttcccggatactctcgtttggcttttctgaaatagaggaattctgaagctgccctaacaggtattcatcagtttgtgagcttgttcatctctctgagattccttctcgaggtatccatctaacttggacaatgataaattcgttattcagtggctcgtaaactgaaccaaggaaacgagttagtattcggatcatggaacttatgctgtccatcgcaatattgttgatcattcaacaactttggaatctctcctgaatggcaattgactcgggagtctgtagtgcatacttaaattcaaattgatttttagaacaataataacaattttttaagaaaataaaatttaaaatttcgaaaaaacttaccattcagtgtagaaaatgtctgtaagtcaactaatgactatgagtgacggagttaaaagaaaaaaaaaaaaaaaaagagatagagtacagagacaatatagaacgacagaacaaacagatctatcagtttactgactacagagaggatttgaactgagaatcgaagaaagtctctgagggttcatctatg

SEQ ID NO: 20843 - DNA, 3003 bp, Unknown
  misc_feature (1)..( 3003): 2750-1469P.txt file - cDNA_ID_1829251; gDNA_ID_1620818; Annot_ID_50669
ttctatcttgctctatgctgtctttttttgtgtgtgcaaacatatgcatatgcatatgctgtctaatgtctaataataattagttcatttaattaatatacatgtttgccaataaataccattaagtttattctatagatctctataaataagtaattccattctgaatttgcttgaggttcacatagacctatttcatagctacaaattttcaaaatatttattgactatatcagaaaaatgggtgggtatgccggcgggtatgtgattggtgcatttttatatattattgtttaaaattttcattatcaattttttttttttttttaattttctttttaacagaaagatttcttcttcagtcgattttctctcttctctctcatgaatatttcagagagcgatcgactgaactttttgttaacgtccggatcttttccggttatccaatcccgtttagcgggctatcttccaacatgcatcagctcgtattgtgatggatggttggtttgtgttcggtatcgatttgactttcacagtctcgatgatcggttttcgtcggcgttttcctgccgttttgctctcggttgttcatgaccgaataaaggttatgtcatgatggccaattttgggtcaaaatcacaaacttttgaaatcaatttcaatccctaattatcctaccttcagttttagcttctcttcccaaggccttcaaccgattgatcccaatctctcatctatgagatggccagatgggtgttgttgcggttaggcagttcttgtagcttctaccaacaagaattcacaatcagatttggatcaagatctgaaaggtctatttctgcttatccggtcttctgtcgagtaagtctagagatacatgtgtcaacatatcattgatgattccaaagcttcatcatcaaaggttcatcaagttgggtttgcaagtagatgttttagggggtgttattggtttgtgattttgaaagagttttaatgacttttaaaagatatagaatccaaaatcttgtaaagtctttctagaatcttgtaaaatcttcctgaatataattataaactttgatttgtgatttctccaaaattataacatatctccaaaatattgtatactattctctcctcttctataaaatctatctccaccaaagtgaaaatcacacgcataaacacaataactatggtattcgtaagtaagctacatgaacatggaactatccatgaagaacttgaagttttattttcaaatattttgttggatatttacttttcatgtgttggattaaaatgctttgttctaaaaattgtttgtgtgttaatttttcacaaagattatagaggagcacgtgtgggacctgagccataatatatatacagtaaaacctctataaattaataatgttgggaccttgaaattctattaatttatagaggtattaatttatttataaaataataattattaatttatagagaatttaggttaattttgtaatttttttaaaaattatgtttgaaataattttattttatttataatcattatctttctagaagtaactgcaaataaggataaattattgtgtccaaaaaacaacaaaaaaacagtttttgatgtagtaaaaatattaaaattgaactttactaaaaattagtataaattaataaaagtaaaataatagcagattcatatttcactaattttcttacatataacatatatatattttaagaagttcttacaattattaatttatgatactaatgggaccatatatttatataagattttttaaaaaattattatcttattaatttatcaatttgtgtcattttttacactggtcccaactcgggaccagaagaatttattaatttatagaggttattaatttatcgaatattaatttgtagaggttatattgtattgttcattactgttaatgagatttctgcatctgttcgtatcattggtttttgtttatatccaaagtcatgattcacaatctctctctttttatgatacttttcatgattttaatttgtgaagaaaagagtataaaatcataatccaataacacaaaattttaaatcattaacaatcatgaaaactgttgtttaagttaaataacacaaaatttgtaatgactttattagagtatgaatccaataagttcagatttataaaaaatttagattatttttttacaaatcaaaatttaataacaccaaaagtcttataaaatcttaattaaataacaaaagatttttcataacattttgtcactaaaaatccatataaatcacaaaccaataatacccccttaatttcttaagtcgctttattaactagggaggacgagtagatcagagttttccggtggtatggcgagttccgtcatcaacagcaaaattccgttctcggaaaagaagtaattaggtgttcagatgcttttcaaaggataattaggggttaattactagattttgcttgtttaattattgttttgtgcctgtaattggtatatgttttggtactttcggtttgtgttttagtttcgaggaattttcgttttcgccggcgaaatatccggagatttacatgtgttctccgatcaatatcgttgtatttgtgtttctcttttttcgtttgaaggattgaataaaagttacttcctttgttccttttagtttgattgtttagaaatttttttttttttaaaaagattgactttttaagtttttcatgcaatatttattagttaatattggtgaattgtaattttaaaaaagaatagttaattatcattagtttaaagttataaaaaactgtaaaacaataaaaaataatatatttataatcaatatttaatatgttttttttttaaacagttaaaaaaaaaaaagagaggaaatatattgtaaaaagaatgaaataatatttttaaccgcgtagtgcgatcatcttctccggccctaataatg

SEQ ID NO: 20844 - DNA, 3003 bp, Unknown; identical to SEQ ID NO: 20843
  misc_feature (1)..( 3003): 2750-1469P.txt file - cDNA_ID_1829251; gDNA_ID_1620818; Annot_ID_169357

SEQ ID NO: 20845 - DNA, 3000 bp, Unknown; identical to SEQ ID NO: 5791
  misc_feature (1)..( 3000): 2750-1469P.txt file - cDNA_ID_1829259; gDNA_ID_1620818; Annot_ID_50666

SEQ ID NO: 20846 - DNA, 3000 bp, Unknown; identical to SEQ ID NO: 5791
  misc_feature (1)..( 3000): 2750-1469P.txt file - cDNA_ID_1829259; gDNA_ID_1620818; Annot_ID_169352

SEQ ID NO: 20847 - DNA, 3000 bp, Unknown; identical to SEQ ID NO: 5792
  misc_feature (1)..( 3000): 2750-1469P.txt file - cDNA_ID_1829266; gDNA_ID_1620818; Annot_ID_50662

SEQ ID NO: 20848 - DNA, 3000 bp, Unknown; identical to SEQ ID NO: 5792
  misc_feature (1)..( 3000): 2750-1469P.txt file - cDNA_ID_1829266; gDNA_ID_1620818; Annot_ID_169346

SEQ ID NO: 20849 - DNA, 3003 bp, Unknown
  misc_feature (1)..( 3003): 2750-1469P.txt file - cDNA_ID_1829294; gDNA_ID_1620818; Annot_ID_50650
tattcttaacgagttagttactgcatattttcttattttatagaataagttgaattcgatcgtacttattatctgtacgaactactggttttcgatgtaatgcagttgacaacaccataagagtataaaacctaaagctgtcaattgggcttgaccatgaccaaatggtcttgtccagttggacattttttttctcttcacaaaaatgaccaagcccaaagtgaccaagcccaaaagtgaccaagtccaagagtgaccaaaaccaattatatatgtccatggacataaaaaaaatgtttaacatcacaataataatctaaaatgaccatgacaaacattgtaattagacatcataaaaacattttaagacaacattcttaagactatccataaagttcaacatgaccatcattcttcaatcttctcttctttctccttctcgttctcctctttgttctcttctaaatctgcagttacaaccattaaacaagagagtaaacaaatctctaaagcttaaaacaactatacaaacaagaacttgtttcatttaccttaagcttcttctttctcttcttctttctcttcttctttctcttcttctacttcctcttcttctccctcttttggaaagcctcgcagccaattccttgtgcagattaatgcttggatattttcaggaagaagactactcctatatttactaaggactccgctgcctatgctaaatgacgactcagaagcaaccgttgttatcggaatggagagaacatcacaagccatgcttgataactccttaaagcgacaagagttatctttccaatatgctaggacattaaaatgtctaaaagcagccatatctaatgttggttcacctaaatatatgtccaattctgattttccactactaccaactttttgagagacaaatgcataaaatccctgagaaaaaattcacacaaatggagcatatgagatacaaagctgccagatagaagtctaaaaccaagcaatatataacacttcaagtctatcaagcttaaagcaaatcaagtgcaaaaacagattaaaactacaaaaacagtggctaagtaagaatttacttacactgtaacctgccggaatgtcttcttccaaagtttctacttgtgaagaggaggtgatgctacttggacgtttcttgtaagctttaaaaagcttatagatcttcgaacgcacatgagccaatctggacttactagttaatcgatctagagtactgaaacaatattccaaacatttcaacttaagtcttggatcgaatacagctgcaattgcgagaatgtcactatactcttcccagtatttttcaaacttaagagtcataatttccaccatttgacaaatagtctcatcaactgaaaactcatgagctctcaaccaacactctatcttccaaacttgcataaaatataagttggctgtaggataagaagaacccgaaatcagatttgtcatttcagaaaatggctttaagaattcacatatcaactctcctctactccaatgaccaactagtcaaacccgtttctgaccgtggatctatttaggcgtagtccattaaaaccatggtttagttgggctagaatttaattgtccacaacaatattggttgggctaagcccatggtccttttgaccaattgacagctctaataaaacctgtagataacaaaacaacacaagttttatatactataattaattgtcttctcaaagaacttaataggaagcaaaaaccatgtttgtttcatcccatttaaccaccttaaaatcgagatcaaacaattttacatatgcaagttcaacatacctccaaacatttagactcaagacgtctatccctacatacaaaatctccttgccctctttttttttgggtatgccaaaattttgaatatacgccaaactactttccaaatcgtttgcataacaaagatgaccataatctttttccttacgacgtttgtgaggtccactgtaatcatctggatcaagactctgatatagatatcttaaaccatatactatcgctaaaccatttagagtatcagtagtccatttattatttttaatggaccaaacacataaaattgagctgaaccgtatcaatccattaaaacttctgatatccaatattattataaataatactaaaaaactccttatgatactatatgaatatcacttatatacatgctcttatatggtgtgtagttttcatcccatccatgtagtcttctaaaggcgctgaccatgtcagtgatgacataagtccaacaaaggacatggttacgttggtctcgaatatactccgagacatctttgagcctttctctgatttcctcgtctagtagtagaaaattttctagtactcctgtctcctgatatcgtctaatatataataatatagttaaccttaaggcagtcaatcatcaatacgccatttatcctactaatttaactcatccaattggtgctacactattgacgtttgaaggttgggatgggtgtaacatatatcgcggacatgccttatccataaatacacttaaaattagtataaattttctgacttgccttacctgagtttgattattttcttagtaaagtattttgatattataatttggtagtaatataatcactataacatgcaagaactacaaaaccagaggtctctcaaatggacactcatttaattgttacgatagtaaatgtcacccatcaatgaaacctaagtcaattggatgatttgggcccaattggacctaattcggcccatttaatattccctcttttctaacctttgtttctcctcttgcttgctcacccttttccctgaatcttaagaattactaattcccggcgagttttcccggcggcggctagataatactggtttctgccagcaagatcgaaggagataaacttcgtaatcaaaaagtctccttctgataaaaagatg

SEQ ID NO: 20850 - DNA, 3003 bp, Unknown
  misc_feature (1)..( 3003): 2750-1469P.txt file - cDNA_ID_1829302; gDNA_ID_1620821; Annot_ID_50711
ttgacctctacattgtggaagtaaaagataggattggagtggtgtggatttatgttgcaatgatacttttgatgaaagtttcattttttgttatatagtagcttagttgagtgctagtaaaataaatgagatccattggctattgttggtgttataattactagaaatcttggaaaattttcaggatctgatgaaggtgtatatgcttgggttgttgctaatcatgcgctcggttcgcttggaggtgaacctttaaaaacaacgggaattgttgaactcggtggggcttctgcccaggttttatctcttgtcaaatctgttattgataagaaaatatgcgtatgatgccatttatcaggtttaggataaacctttacttgtatggtaatagattaattgtgagtgatgactgtttattcattcgtttaggttacatttgtgtcaactgagcttgtgccttctgagttctcgcgtacgttagcctatggaaatgtctcatacaatctctacagtcacagcttcctcgattttggacaggtaactcatgagagcagagttttttttttctctttgagaagttttgttcttggttggcccttttctgaagtttggtgtttggaaacttaatgtagttttgtccctatttactacttagtgatctctgattttctaagattcctcaagattgtagaccgtgttaccaaaagaaatgatttttgtccatactaattttcaaaaagctattaattttagtcgcctctgcaggatgcagcacaagaaaagttatcggaatcactatacaactcaggttaatttttgacaaatccttaaaataattgctctttggagttcaagcagttgaaataaacttctcttccctcaaaactcatacagtgtttcaatcctagcagctgcaaactctacaggggaaggaatagttcctgacccttgtattcctaaagggtatatccttgaaacaaatttacaaaaggacttacctggattcttggctgataaaggcaaatttacagccacccttcaagctgctggtaatttctcagagtgtcgatctgctgcatttgccatgttgcaggaagaaaaaggtaagagcatcattgttggtataggtgaatatcgttcctgtgtacaattttcttatgggtgcagttttggcacttttgtatacagggaaatgtacttataagcgttgttctattggatcaatattcacacctaatcttcaaggaagttttttggctacagagaatttcttccacacatccaaggtatataatcctttcaatttcatgttggtcgatgccaagattccgtcagaatgtgaggagaattgtttgaacattggtctttaatttctgtctggatcagttctttgggttgggagaaaaagagtggctgtctgaaatgattttggccggaaagagattctgtggagaagaatggtcaaaattgaaagtgaaatatccaacatttaaggacgagaatttgcttcggtattgcttctcatcagcatatattatctcaatgcttcatgatagtcttggtgttgctcttgatgatgaaaggtaaatgttattgcacaagttcaagatcaatcaatgttggttttctgtgacaaagatataaacaaaaagtcgaacctatgcttgttttgtctacagaatcaagtatgcaagtaaagcaggagaagaagacataccactagattgggcattgggtgcttttatccttaatactgccacagccacttttgattacagtggtaaatctagaaaaattcttgacttgagtaatgtagccaaatacaaaatatgacatttgttactatataaaacaaaattgtttcagataaaacaagtaaattattaatcatgtatatgtatttacgtcaactcgtgtttggagcttcagtcttcataaatctctttttgtgaattagttagctactataaaaaaattaaagaccaatttgaattagcttgtgtgaaaatgaaaatgtttaggaagctcagtccatgaagctatctgtgttgaagtgtattacaataatttctcaacaatcaatgagacaagatcaagaaccgtttatctgcaataacttctcaacatcaatgagggacaagatcaagagacgattgtgatggagaaagaaagtcaagacaattatgatgtgatttacactgtcaacacgtgtatcatatactgtagtcctcgataaaattaatactataaagattacagaccgatttaaaattcattaccacgatatgcatgaggacaactatttgatagtttttttttttatttttatgatagacaactcacaactaattgatccgatgcacaataatgagcttatagtatttatttcgacatttcgattgttcaagtcggatttcggagatggttttgtgatatttggctcgatcaaaattgaactcttgatggggatcataagctaaaccacgaaaatactcatgcttgcaataacgagtaggagagaaactgacccattgctagtgattcgtgtatccttgtgttaggttacacacgtttttttaaccactcaagtctacgtcacaaaaaaaatcaatttaccactaatattttatcttatcctcaattattgacccgtactataatttattttatagactagatgtagaatatattatataatagccaatagggatcggtgggaagagattcatttctttaagttataggtctggagcggccgttttgaacttctgattattaaatcagattctagactaattaagaagcaggcacaaaaagaaatagattacgtttcttattttcttgcgttgttttcactacatttattgctattgcgttacgtttttttaaactacgtttattgcttaatgctagtatttgattatcttgttaatataattttcgttacggttctttagacgttaatgcaacgatcccatgctccttcctgcaggttgaaaaatg

SEQ ID NO: 20851 - DNA, 3003 bp, Unknown
  misc_feature (1)..( 3003): 2750-1469P.txt file - cDNA_ID_1829306; gDNA_ID_1620821; Annot_ID_50710
caagataagagacacataaatacataattaagacttttagcaaaaatacataattaagatctaccataacaacgaaactgaaaacacgtaaagatataaattagaacttagaaaactggatttgagatggacagcttcctctaggcaaaactggacattcgataaactcagttcctgacgtatcaacacaaatatagatctgatgaagctgggcattacgctccggatctttgttacattctattcctggcgtaaatccaattccatcttttatcgcgttggtgatcttatccagattgtagaatccatcatccggattaattcctacatttacgaaaagaaaatggtcactggtgagtttaaaatgtacacatgaatagtacatttatatagtgatttattagtgtatataccggagtttttgaggatttggaggagatttgctttttgtttgagtttaagagcattttcaaagtactcatgttggtccattacggattcggagcatgtaccgtgtttctcccattcgtgttcccaaaagttgaacccttcgttgcttggacatgatagtgttggccaattctttttcaaactacttacgagatccgatatctatacattcatatacatgatagctaataatcgttgtttaagaattagaagaaaaaattacactatcaattatatatacctgagatctatcaaattggctatcgggatcacaatttgatggccatgaaccaccgttataattaggccatagaccgtggataccaaaatctgcagcgggtttaccggatgttggatagcaacaagcacgcgatgtatcgcaataggctccaggccactgcagcaaattcataaaatttcacattcagtttatatatgtactttgtcaaaaagaatgaataaaatgattactggatcttagtttaaaccagaatatatatacctgaagaacgaagtagaagaaatcaaagtcttcttgaggacgtgaaacgaaaagaccttgaaacactagaagcttgaggagaacgttaacacaaccctttgctcccatctttcttctcttcttttctgcgattgcatgattaagacgtttcggtttcaaaatttatagacagataaaaatgccatttcccttgtaataccatttttaattagttattcatctacgtgattagttaagagattggcatattctcttaagtaattcatttcatatttccgaccttattgaaaagtcatttttgtacgttttacaagtagacagtaaactcaatctcagaatttagtaaactgattgttagaagtttttttattttatttggtagcccttcattacgcgcaattgtcactatatatgtcacaatttttaattaaaaaaaaatagttaaacatgtagactagtttttgagaaactttatgattacaagattgttaatttacactatgttagaggacttttatatcccataccgcaattgcatggtatccaaaggatcgcagaccaactatcacttaactaaaaatataaaaggaccaagtcgatcggcaaatcgatccgagtggagattaaacaaaaaaggattgacttgaaaatatttccaagggatatccatttctatgcttaactaattttaaaatatgggaaggaattatagtatcaacgtacgttacaacttacaacatgtgagcacgtgacccaagcttcaagaaaatctcaaatattttatttatttatttttctaataaaaatgttaatatttcattagaaaatgaaaaagttaggaattacaagaatgtaaaacctatactttggtctcatagcaaaaaagaataaaaaacatggaagcaaatatcaatcggtccatcgacatcaacaaaaacagttaagcttttgaaaacaatgaatcgatacaacaattttaatgaatcgcatataagacacctcaaagaggaagataatgctgtcaaacggcaaaggtcgaaacaatgaaaacccaagtggatggaagcctttcaccggtaggccgagaacactgagccgtcaacggcgaaacacacatagcacacgaaaatctcaaatataaccaactaatgtacattttaacatggaattatgaattatatgctaattaatgctttgttaaggatccatccatattccatagcttagcaaaaaaggatccacccacgattagcgttaaacttaaacttaaacatgtcttatagtaacactttaacagaaataagcaaacatcatataaaagagctagaacatagaaaattaatcaataatgaaggagaaggaaggtacgtggaattataatttaattaggaagcactactaatccacttcccgatgatatgtactgatcctggtcgtggtttaacagctaggtttggtcaaccaagccaatgtaataaggtttgatttgattatttttgttgatttttgatttgatttgatacctaactgaatccaaagtttagtagtttaccatccatgaggttacttggattaaacataatgttgactgtaaaccggtccggttcatgaaagaaagacttgatacgttaaaaccggagtcaccctgtatcggtcagaaggacccggaaatcaaatggttttgaatgtgacccgaaacaacccaaacccgacccggtccgaatttgtgaggaataggtgtgtaatttgtaaaaaggcgctcccaattttcttctccactacgaaaacggagactgagagcagcagcgacgagcttcatcggccgtcgtctccgacctcactcgcgatctccgattacaaaaattagatcctcgattaagaattcgaaacatcaaaatttcatcaacaaaaaaaaatcagttactggatttacgtttcgtttgcgtcacagatcagatctccatgatcccttatccgctttcgttgcggttccttaaaccttgatgcaacggtctaatgctcgttccaggtcgaatatcaattcagatatg

SEQ ID NO: 20852 - DNA, 3000 bp, Unknown; identical to SEQ ID NO: 5844
  misc_feature (1)..( 3000): 2750-1469P.txt file - cDNA_ID_1829312; gDNA_ID_1620821; Annot_ID_50708

SEQ ID NO: 20853 - DNA, 3000 bp, Unknown; identical to SEQ ID NO: 5860
  misc_feature (1)..( 3000): 2750-1469P.txt file - cDNA_ID_1829330; gDNA_ID_1620821; Annot_ID_50702

SEQ ID NO: 20854 - DNA, 3000 bp, Unknown; identical to SEQ ID NO: 5859
  misc_feature (1)..( 3000): 2750-1469P.txt file - cDNA_ID_1829334; gDNA_ID_1620821; Annot_ID_50701

SEQ ID NO: 20855 - DNA, 3003 bp, Unknown
  misc_feature (1)..( 3003): 2750-1469P.txt file - cDNA_ID_1829350; gDNA_ID_2910741; Annot_ID_193690
tagggattcaagtacgggttttcagcagacaaactaaatatttccagcacgtgatggaccaaatcgtagcatgtacacaaagagagaaactgttacctgaatttgctgcacaagaagaagcacaagtaactaatacatcaaatccctccaaacttaaagctgttctggttacatctctgaatccagaatactcaaataacctaaagaagatgtattgggaacacccaactacaacaggagacatagtagaagtttatcagccaagtagagaaaggtttcagcaaacagacaaaaagcttcacgaccaaaaggccctggcagagatgtacctcttaagcctaactgataagcttgtcacaagcgctttgtcaacatttggatatgtagctcaaggtcttggagggttaaagccatggatactctacacaccaaagaagttcaaatcccctaatccaccatgtggccgtgtcatctccatggagccttgtttccttacacctccagtacatggatgtgaagccaaaaagggaattaacactgcaaaaatcgttccttttgtaagacattgtgaagatcttagacactatgggcttaagctagttgatgataccaaaaatgagttatagattttacaaatcgaaacagagcatctttctgattgtatgtaaaggcaaatgtatacagcagatgtattaaaaatcaaaacttggctactgcaatttggttacttactcgatccagaagttatggtccaaaggcaatgctcgaatacatggttactgcaattttaacagaacaggaccttctctgtcggatttgtgaggtcatgtcgatgttcttcaaaattcaagcactctcctaacttgtaatcgctcttcgttcacttcttctcaaaatagttaggttatctggagaaactggggtctattgaattattatatgtcagctaacctaaactatttggagaagaggagatcgaggcgtttacagattttgtgtttagtaaagacactagcgagactctggtgaaatagacaaaacaaaacaaaaataatcctaattttataggtttttggttaatatcatgtgtaatttattattatttttaaaatgtttaaaagtaaaaaaaagagttataaagctgagtttttaacaagtgtcaaaaaaatgaaatttgaattttaagttttagattttcaatattgcatataataaaattctggaaataatcatattattattttccgtataaaatagtcaatgttaccttacctattaaaatgttaatacatatcacaaaattaaatgctaaagattgttttccaagttaaatttgaaccattaagctgtctttggaaaaccaaataatatttacttatgacaattgacctaaactatatacattaaacagatatggaaataatcataaaggcataaatcttttcaccttttttttcttcttctagaaaacagtcaatattattaaatacgggcataataacttcttactatgaacgtttagcaattagcattaagctctctttgttgaaaaaaaaaaaaaaaaaaaattctctgttcttcttttgtaattttctttttatcaccttcttgttcttctttgtttctattttttattggcttttttcgtcttcgttcaatctgaatcattttttcatgactattttttaagttgcgttttcaattataaaaaaatttgtttatagattgattgacaatatggacaccaaaaaaccatccgatccatatgtcgagaacaaacatgttctcaaagatcaattcaaccaccaacaaatcaaggcaaggtacgttatgaatttatatatgaaactttataatttgttttctgttcatatttaagtacacattcaatatatacatattcaaaagatgaataaaacttcatttgataaaaattataatcttagttcaaaggtctatattgataattccattagaattcttaacatagttttcatagaacattcattcatacctctaaaaatccctgtggattggtttaatctgttttaatcgttgatttcggttggtttagtgaaaagttcagcataggcttttatctcttgattttgggcttagttgttaaaggcccatgagttcagattttctatttcaaaccgttcgaaacagagtagacctaaacagagtaacgaacgactctagtgaaggtagcttgttttgctagcaacgaaagctatttttattggtcattgcaatacgttttcataatactaataaagcaattagtggtctagtagcatttttttattggatggtagatgcaaaaagttttctataagaaacccgactagattagccaaattacatgcaacatctttaaaaatgatttcgagaagctgcctaaaaaaagaaaaaaggatttgaaacataacccattttaaaaccaaaacataaaagttgaattggcctatcaataagttgtcaaaatggtaagttttggataggctcatcactcataaatcaattttgtttactctctttattcttagtcaacaacgcgaatttccggatctgattagtattatttccataaaataaatgaatgtatgatttgtcaatttgaaaataatacatgacatgtgatgtattgtttggattccaagttctcaccattttgaggattattgctttactacaaaacaagtccctagtcacattggtcatttcttcgttagtttaaaattatatataactcaacttgatgattcacataaatcgaagatcaagacttttctagtttaaaaaaaagtggagtcacgttacgtagttcgttgattgtcacaacttaacaatgacccattagaatattcaaaagacttagtattatatacaaatgcatgtttcgtcacctttaattaagaataaagagttgtaatcacgctagatatataactcttttgaatcaatctcctagttatagctgatcatactaaagtcaacatg

SEQ ID NO: 20856 - DNA, 3003 bp, Unknown
  misc_feature (1)..( 3003): 2750-1469P.txt file - cDNA_ID_1829350; gDNA_ID_1620821; Annot_ID_50693
agggattcaagtacgggttttcagcagacaaactaaatatttccagcacgtgatggaccaaatcgtagcatgtacacaaagagagaaactgttacctgaatttgctgcacaagaagaagcacaagtaactaatacatcaaatccctccaaacttaaagctgttctggttacatctctgaatccagaatactcaaataacctaaagaagatgtattgggaacacccaactacaacaggagacatagtagaagtttatcagccaagtagagaaaggtttcagcaaacagacaaaaagcttcacgaccaaaaggccctggcagagatgtacctcttaagcctaactgataagcttgtcacaagcgctttgtcaacatttggatatgtagctcaaggtcttggagggttaaagccatggatactctacacaccaaagaagttcaaatcccctaatccaccatgtggccgtgtcatctccatggagccttgtttccttacacctccagtacatggatgtgaagccaaaaagggaattaacactgcaaaaatcgttccttttgtaagacattgtgaagatcttagacactatgggcttaagctagttgatgataccaaaaatgagttatagattttacaaatcgaaacagagcatctttctgattgtatgtaaaggcaaatgtatacagcagatgtattaaaaatcaaaacttggctactgcaatttggttacttactcgatccagaagttatggtccaaaggcaatgctcgaatacatggttactgcaattttaacagaacaggaccttctctgtcggatttgtgaggtcatgtcgatgttcttcaaaattcaagcactctcctaacttgtaatcgctcttcgttcacttcttctcaaaatagttaggttatctggagaaactggggtctattgaattattatatgtcagctaacctaaactatttggagaagaggagatcgaggcgtttacagattttgtgtttagtaaagacactagcgagactctggtgaaatagacaaaacaaaacaaaaataatcctaattttataggtttttggttaatatcatgtgtaatttattattatttttaaaatgtttaaaagtaaaaaaaagagttataaagctgagtttttaacaagtgtcaaaaaaatgaaatttgaattttaagttttagattttcaatattgcatataataaaattctggaaataatcatattattattttccgtataaaatagtcaatgttaccttacctattaaaatgttaatacatatcacaaaattaaatgctaaagattgttttccaagttaaatttgaaccattaagctgtctttggaaaaccaaataatatttacttatgacaattgacctaaactatatacattaaacagatatggaaataatcataaaggcataaatcttttcaccttttttttcttcttctagaaaacagtcaatattattaaatacgggcataataacttcttactatgaacgtttagcaattagcattaagctctctttgttgaaaaaaaaaaaaaaaaaaaattctctgttcttcttttgtaattttctttttatcaccttcttgttcttctttgtttctattttttattggcttttttcgtcttcgttcaatctgaatcattttttcatgactattttttaagttgcgttttcaattataaaaaaatttgtttatagattgattgacaatatggacaccaaaaaaccatccgatccatatgttcgagaacaaacatgttctcaaagatcaattcaaccaccaacaaatcaaggcaaggtacgttatgaatttatatatgaaactttataatttgttttctgttcatatttaagtacacattcaatatatacatattcaaaagatgaataaaacttcatttgataaaaattataatcttagttcaaaggtctatattgataattccattagaattcttaacatagttttcatagaacattcattcatacctctaaaaatccctgtggattggtttaatctgttttaatcgttgatttcggttggtttagtgaaaagttcagcataggcttttatctcttgattttgggcttagttgttaaaggcccatgagttcagattttctatttcaaaccgttcgaaacagagtagacctaaacagagtaacgaacgactctagtgaaggtagcttgttttgctagcaacgaaagctatttttattggtcattgcaatacgttttcataatactaataaagcaattagtggtctagtagcatttttttattggatggtagatgcaaaaagttttctataagaaacccgactagattagccaaattacatgcaacatctttaaaaatgatttcgagaagctgcctaaaaaaagaaaaaaggatttgaaacataacccattttaaaaccaaaacataaaagttgaattggcctatcaataagttgtcaaaatggtaagttttggataggctcatcactcataaatcaattttgtttactctctttattcttagtcaacaacgcgaatttccggatctgattagtattatttccataaaataaatgaatgtatgatttgtcaatttgaaaataatacatgacatgtgatgtattgtttggattccaagttctcaccattttgaggattattgctttactacaaaacaagtccctagtcacattggtcatttcttcgttagtttaaaattatatataactcaacttgatgattcacataaatcgaagatcaagacttttctagtttaaaaaaaagtggagtcacgttacgtagttcgttgattgtcacaacttaacaatgacccattagaatattcaaaagacttagtattatatacaaatgcatgtttcgtcacctttaattaagaataaagagttgtaatcacgctagatatataactcttttgaatcaatctcctagttatagctgatcatactaaagtcaacatg

SEQ ID NO: 20857 - DNA, 3003 bp, Unknown; identical to SEQ ID NO: 20856
  misc_feature (1)..( 3003): 2750-1469P.txt file - cDNA_ID_1829350; gDNA_ID_1620821; Annot_ID_169476

SEQ ID NO: 20858 - DNA, 3003 bp, Unknown
  misc_feature (1)..( 3003): 2750-1469P.txt file - cDNA_ID_1829354; gDNA_ID_1620821; Annot_ID_50692
cacatgaagaaatagctaactaaagaaaccacaaacaaacacaaaaatcctcttatagatcaaataacctatcgaatcatatacagaaggaaagagtattaattcagatggaaacactcccaagccccaactgatattccttgtaaacaaagaaaccatcaaaaaaccctagaccctcttaattaatcattctttcgagagaaaggcttgaagctccttctctatgtgttcttgagcagtttttttggccgcaagaaacggacgatagtgatcagtgagcatccataccatacatttggtcatcatcgcaaagactccaacgttggtagcttcatcagtgcaatcttcccagtcagtaaatggttccttgcaaccacctcctctcatgaacgctgaaaacacctctcctttctcttcttcttcccttacttcatttggggatacggattcccctggatctcgccaaacagttgacggcaagaaatccttcatcatcagttttcttcgcatcgagaaagggaagatagtaatcagaatgtctctccatacacttctccaacatcgtataacacaaagatataggttccttattcttcttctcagcttcctccacacaacctttaaaggccgtataatgtttccttggatgcaccttctttcataaacacttgtaatcgattttgccaaagacttcacgaatctcctactttctctggctagacttgttttttttttgagatttggtatcggaattctccggtttcagatccgtggatgacaattaatcagtgattatcatttcattaggtcagagaattacaatatatgtagggatatgataatttacaattaagtatttgataattgcaattttttaaaatattcgataattacagtttctttacgcatgtagggatgtagtcatgtagggatgcatcatgtctatataacataagacatattgggatgcatcagaatcatataacataaatagtttggaaccaaataaacgttgaacgaggcttttctcacaccatatatcttttcaaaacatactaacaagtcaaaaattgatatccatgtaacttgaaaatcatgcacagacaatgctacctttgaatggtcattaaaaaaagaagctaaacacacttcagatccaaccatatatgtgatcaaagccagtgataaaagtcgagtcattcttggcagctaacgactaaggtaagcaaagaatcatatggtcatgtatggaggctgataacagagatgaagttctgtaatgtttcacatctccctacaaattagaaacacgacatacatacataccaggcaaaactgggatctgtaaaaaaaactatcttcgaggagatatcaaccaaacagaacgtcatcgatcatgaatgaaagtgttaaaaacaaatgctagtgtatcttaagcacaaagtgagtcaacatagaagtaaacttgatctttagacaaactagaaaatgctggaaccagaagctatcactacaaaaggtctgaccttttctgtttcagaagcaacaaatcacattccaatgagaaatagcttagcaaaccacaaagaagacaagatttcttcactgaaccattaatgggtctcaacaaaagtcatgacctttaaagagcaaattctctctcgaatcatataaaaaggagtatgaattcagatgacctcaatcaatcaacttattaattagagaagaaacatgatcatcaatgggatcttataagttatgattctaacaacgaactttcctctgttcctagagaacaatttttatccccaaattccaatcttttgatattcccataaacaagaaaccataacaaaattacccttgagcttgcttcttcgcagctacctcctcttccgagatcttctcttcttcttccttcttcttctcagcttcaagctccttcttaacctctgcttcagcagctttctccgcagcgagaatgggctgatagtaatcggaatgttcatccatacacttcttcaacatcgaagtgacttccatacaattagtaacaatatcttccttgttcttctcagctgcttcaacacactcttcccaagcaacaaacgaatctttgcaaccacctcctttcataaacaagcaaaacccacactctccttcctcttcaccatctgcgtctcctcctcctccttcttctggtttttcatccgattcggaatcttctgggtctctccaaacagttgatgaatctccgagttcctcagatggagctggagtcgacggagacgcatctccgagtttctcagatttagctggaggagcttcttcgttgttttgagatttggggtcggaaaaagtctctgtttttggatctgtggatgatgtaattcccatttttctctcaggagagagtgagatcggatcttatggaaattggaggattcaggaggagaaaaagatgtctctttttaagggttttaaggttctctctcggtgccgccgccgattctctttacaagccagagagaaatgatcaatcgaaacgtctttatgttaaaacccctcaaaaacctttctattgaaccggatattctaaaccggaccaaaccgaacttaaacctttgttaaaccgtaagaatttaaccaaagtgaatatgataaaacaacaacaaaagaatgatctgtccacaagacgattcaagaataatgtattgttaagatttcaacatcaatgtttgttgctaattaaacacaagtctcctatttgctacaaatcgaatatagacaccaacatcattcgttttatagtaataaaaggaagataaatatagggagtaatcattagattaatattacagtcgctttcagatttcgtcaaatttcacaggcagacaagtttctttgacttggtcactataagagttgtaaactctttgataaataattgaatacagcaattatttcaaatctccggtgaagtttttctgggctctaagtatg

SEQ ID NO: 20859 - DNA, 3003 bp, Unknown
  misc_feature (1)..( 3003): 2750-1469P.txt file - cDNA_ID_1829358; gDNA_ID_1620821; Annot_ID_50690
gataacaataatatcacatcagttttttctaagttgttgatgagacaaaaatctagttattctagttaccaatgttaaaggcccattattctaaaaggccaaggcctacattttatttttgttctgatgtaattaaattgttaattgtctgtatttattttcatttttaaaaaattatctttttaacttatggtagcttcaacttctttttcttttttttttttgtcatctcaacctttgtaagaagaaaaatggtcaactatagcttcaacctcaaatctactgacttgacacttgagttttaaataggtaacatctcatggagatcccaatattcattctaaattcctccaagataatgcaacatgttacaacaacaacaacaacaacaacaacaacaacaacaacaacaacaacaacaacaaaagagattggccgagacatatatgtagtatgtacccaccatatcacacataccttcataatcatcatcatcatcataatatcaagtggtctaattcaaatgtttttgatttaattatgtgtttaagtagttcatatttaattgtgtgctaaaatacttattgtaattgaagaatcaaatatacaagtcttattcactattcttaatcaaatagaaattagtcttaaatttgtaatttagggggtacaatgatccactattctccatcaacgtagaagacaagtaatttactttgtaatataggtaatggtacgtacgtagtaatcacatgtaaaagcggaactttcctttctcttgttttgccggcttgaccacgggatatgagaccagtaaggtacatgtgtaatgtgatacctatcagaaaccctattacactcttatcaaaaaacaaaacaaaacctattacactctctcggcttaattaagattatgatcaattccaaatatgtttctgatataactttaattattaacgagaaaaccaaagtttattgctacttttttccgtcgaaatggccgctattttaagttttagacaataacttggtccatgaaattaaggtacaacgtcgatattgattaagatcagtttacttttgctaatataacgtgttaagtttgagatgggagacacgtgaatgacttttcattactttcaaaaattgttcaaaattccaaaattggcaacaagactgttttagttgttaatatgcaattagactgtttcaatagagtgtatttttctttgtcaaaatgtaataagtactaatttgtcatacaaaatatcaaatgtcaagaacataaactcttctaacggaaccgcttgtcgcgccgaaactcgtgtggtaaacctgaaaaacaactcactaatcgcaattttaaatcagagactgagaaaacacttctcacgaaaaccacaaaacgcggtcaatatcgggatgacgacatgatgtggtggtcggattgacacaattcaggttggtcaacaaaattcatccctctaaaatatattttcttagttcgttgccaaacagatatcttacctttactcttttttttttttttttaaaaactcatataaataggatagttattaaatttaactacaaatggtattgtatatgtatattctatggctaggtgaaaaggcttcctttagttcgagaaggtcaaaatggatggctaattaacttttatatacaaacagtatatgcctaacatttaataaggagagactcagattccttgtcaactactcactattgtctccatgactctttaaaaaatatatttttatagaatcttagtattcagaaattaaaccgtagcctttataggataacaaatgtagatgatgttaaatatgaaaattggctccacaactgtccatgaggcataaataactcgaaaacttaattagtttgatcttacagataactaattttttgtcacatttattataccccaaagtatcttaataatgcttgtcggttcaagttcatattttttcctcggttcaaaatccaggctatttatccgttcttttttaattaccttcatgataacttgtcaattttgtatttcttattcatgatttttctcatgcacatacctaatttacgtcgattaagatccatgcaacgttcataaaataatgagatagtatattagtattagtatcacatacataacgatataatattttacaatgtatttgcatgtaaagcattttcaacaactactacttaatccactttggttctgtgcaccatatcgaccttgagccgcccatataccgcgactagggtcgtccactacgaatataaaaatttatcgttataaatataaataattgatatatttcaatgattgatggattaattaatataaataaaacatgtcaatgtaagactaaatgactaatcagcgggactaatcaactcctctttttttttaaataattcaactggtagatcaacgcgggtttttaatctcttgtaagaactagtacgaatgtacgataataattccagtttctcacccgaaaaactgaagcataatgtttgctcacacactgacacacactgtggttaaataaaatatcgaaagttaaatttacaaattgttttatcgtaatacttgaaaaaccaaagattatattatgtaattataacaaaaagagatataataaattactggatttcaaatctctatatttttgtctccactttatcaaaaaaaaaaaacatcagtctccactctccacgcgccttttagtcgccctctctgaatacactacagtacaacgttgaaaagaattcaataaagaagatcaaaaagcaataaagttaatccttactttaattagaaacaattttctaatcataaacctttatcatatcgtcaaaacatatcatgaacgacttgtctctctctgttctctatatatatatgactcctcttcttcaaagttcagacacaaacataaactagcgtttaataaaaaacaagaaaaaatg

SEQ ID NO: 20860 - DNA, 3003 bp, Unknown
  misc_feature (1)..( 3003): 2750-1469P.txt file - cDNA_ID_1829365; gDNA_ID_1620821; Annot_ID_50688
tgctgggacgcagacatgaaccagagaccgtcgtttctggacattctcaagagacttgaaaagatcaaggaaactctaccatcagatcaccattggggcttattcacttcataatacacaaaatccattatttaagcacaaaaacaaccagaaacaagaaagtatcattctctgtttgccttattaatctctgtttcatttcttttgtaaagattgtttctttttcatcttttcatttgctttaaaagagtgtgagatagaaagcttttattgttgttacatggattggattgagtttgcaggttaatgagaagttcatatcatatcagacaggataaaatgtctgtttccgaaaaattcagtaacaaaatgaaaaatgagttcagtagtgtatataaagctatagtcatagggttttcaatacaatctctgccctcaggagatggtaatggttttcagataagcttctttttctggaagaaagtcttcaagtgccaaaactgaagacctgcgaccgataaacaaactgcaagcgacacgaaactcaaccatgccatcttcgaatttgtcgctatgttcagattgtgcatttcttcttccctgtaatataccaaatgaagaagggttttgagttttgattcactctcatcctctgatcaagtgacttcaagggaagacaggttttgttgtcattacctgtcgcggagatagaacatctcatcgtggattccattcacggtttcaaataacttcttaacctcaaactccatcgtctggccaataaataaaacaagatccaaccataacaaggttaacaaaacattccttcaaaaactctgcaatctctttaagaggctatgttacatttcaagctagtcttgctctgtagtatgttaaagcctagtcctatctaccacatttcaagatagtaattttctgcgtctgttaaagcctagtcctatccaccttcatttagcagggaaagaactcctgaatgagctgaagaaatcgatggggttcaaaggtgaaactaatgaagctattttctcatatgcaagactgcagacacaggtcagtaacacacgagccctgtcagcttaattcatggccttgttctaaccaaaccaatgcaccaacataacctataaaccaagactacatagcatttctcacttcagatataactttccactttccagcactatgtcttggtgtaacttaggcagctatcaaattctcacacatccggcgcaatgctctattgttcatgtcattagaagcatcaaaatctatttcctctaaagagattagtttgactaagttaagacttcaagagtaaagaaaaagcgaaaaacttacttcgacttggctcttctttgccacattcgaccaatccttggtatgaatacccgtcctccaatcaaagtcaatgatcagcgtcgtctctggtttgtgatcgacggcggagaagcaacttatgtaatcccctgtttccacagctacaaacgagaattgtcccgattctactccgtccgattcgtgataagccgtcccttgtggcgatgtgaccttaaaaatcaaacacattgcattatactgaaatcgccggaagaagaaattgaagggaaatgcgatccgatcggatgattattaccctgacggtgactttatgggaagaaggaagaggatgatcctcgtgagggtttataatgctgtattttccgatggtcattgcgtttgcgtgaatctcctctgagatgcatttcgtgtgcccagaaagtagctcgtatcgtatagagagtgtcacgggagataaaattgagaggatcaatagtacgatcgagctccgacgatgattcatgacggctccgatatagagagaaatcgatctgacggatttcaaagtttagctatttttcttgttaaacggaaggaaggaaacaaaagaaagtcaacacgtgcattgccacgtgttagtatttcattcgttaaaacacgtggagtactaccctctggaattgggctttaaaattaaggcccattaataatgttggacctatatacttgtagtggatcacactaaagtaagttagaagtaaataaagaaacaaataacacatccagattttataattcaagcataactacatatgacttggtaatgttaattttaaacttaattgggaaattttgttgaaaagacaattgtactcgagtttttagtaaagaataaaatagtaatctttccttggaagggatgttaataatgcaacattgaggtacgtgtcatgatttcgtttcagtttttgttttgttttacaacagcttgaaaatatctgaataaaggagatgaatataaacagtggtttgaatcgtgattagtgcaataaatagatgacagtaataaaaaaagtacgggagaacaattaggtgaatccgttgacgaatgacaacgactatcaaaaaggcaaaatgtgtcatctttctttatatgtttttcaatgttgaatattcttgaaatctttatttatcatatgtttttctgatcaatcattatccttgaaacctatttttttttttttttggttatagaataatctttgacatttaatgatatatataatgaaacaagttaggaaaattgaagctttctgaattaggaaataaattgtgtaagcaatagaatgagtttcttgggaaaacaataaatagaagaagaagaagacactttgacggttaattaacttattttcccatctctcaccgttaccacctcttttttttttttttccgtctcgtgatttttttttcttcttctgaatttcgaaagaaaaaaaaactcctcgagattcaaaccatttgacacaaaggagagaagaagcatttcatttcgcgtttgtcatctaatttcaatttctgacatctcacaagatcggagaaatttaggttatagtaattttattctcatgaagcggcgacgacgatcgtcggaggagggagatg

SEQ ID NO: 20861 - DNA, 3000 bp, Unknown; identical to SEQ ID NO: 5834
  misc_feature (1)..( 3000): 2750-1469P.txt file - cDNA_ID_1829369; gDNA_ID_1620821; Annot_ID_50687

SEQ ID NO: 20862 - DNA, 3003 bp, Unknown
  misc_feature (1)..( 3003): 2750-1469P.txt file - cDNA_ID_1829372; gDNA_ID_1620821; Annot_ID_50686
gtgtggaacccaccaaaggaaaaatatcagtagattcaggagagttgttaaattttgcctccacgagtttttttcttttcttcttgttgagtcgtttacgtcacgtcgagaattttctcttttcccgagaaaattaagaaaggatcgtttgattttctaagaagggaaagataaacagtgaattagaaagagaaggaagtttcaatggaatcgctaacatctatttctccttccataattcttcctccggccaccactactacgatccccgtttcaacttcacgatcagtgttgattcgtcttccttcacgccgttcttcttaccttttcggcttgtccagctccgggagacggatttcgatttctagaagaagacacttcgttagctgtaaatcgaccggcggcggaggaggaggatcagataagcttggtggcgatgaagaagagagcgaggaagttgagaaggcgcttcacttggatggtacgatccctgggacttccgatgagtttgtaaggcaagtttcgtcgcgtgcttacgacatgcgtcggaaacttgagcagacgtttgattccactagctatgacggtataatctctatcgctctcaattcctgcgtttactttgattttggtgatgcaaaattaatactttcgttgatgcaactaacttgatcagagtttcttaaagattgtctaggaagtttgggaactgtagtagtttgaaattcccttagtgccttgtttttgttaacaggagtcaaatcgttttgttgaacaatgtcagaatttagtcactgtgtcacacacaaccggtgaagaagctctccattgatagatgtagtgttagttatgattcaaaagtttgtgttctgcataccatttctttagttccccaggagaagagtgcttcagctgaactatgatgaggaaaattgttcatttctagattccactcttacagtaagattgcaagcacggttttatcatctcatctttcacatagtgctgatgcataggaatatcaaagcaataggaacataagtgttttattcaatttaagcttgtattcatctaaagttaataaattgatgttgttcctttagtgctctgtatctttgactgagtgatttcgttgagaaccatttctctcactgtggcttctcacaatcttagtgttggagtccaacccatggagaggagattcgaagcctgtatatgtattaacacatagagaaaaccagatatgtaccatgaaaacaagaacaaaccacaggttccaactctattccactcaagtttttttttatagttttagttttcttctccctatgacattagcaatccttataaacagtgaagtagaaaaagagcttggactgttgttccctagtaggatcagcaaccagacaaagcaggctagacccaaaactaaattcgatatgctcgtagaagacattcgagatggagtactggtaagtattctcactgaatcactttcaagaccttatgaaacccagacaacgtgatatgcctagtttttatctcaaaggttttcgaagatgtgaatgaggctgttagatactgtgacctattacaagggggagggaaagggtgtgaaggtgtcgctgagattgaggcctcctctgtaagattatgagacaaagatatcatctaattctagaacttgttgcctttaaacatttgaaatgatctgcttttttttttttgaataggtttttgatctttgtcggaaaacaaggtctctggcagtgctcttccgccgtggaagaacaccacctacacctcagacgctggaacgtaatctcggatcccggaagcgttctcttgaggacttgagggataataaatagcttgtgaaacaatgtattaattttacttgcaataattgaaaatactttgtatagactaaacagtaattaaccgtgggtgatactgtgtatatatataaaatgcattttacttgtgctccataacttttttttgttccttataattctcttgaagttgcgctcttttctttgaaggctttaaagctaacactagtaggtaatgtattacttggtcaatcaacatgtgagtatttatagtatctatgattagttgacaaaaaagaccattgtatattgaacttcttaacatgaaaaatagtgacttttttttgtttagataaaaatagatatgctaaaggcatatgctagtgtattattaataaaaatcatgtgatagatgtgattccatgttatccggatcgttgacttgacttagtacccataacgtttattatataattcatatagcattttatgattgtcaaatttatatttatacatatgatagactattatgtcaaaaagacaggtaaagccactttgtttacttattctttcttaactcaaaactccaaagggtaaaatcaaggtgaccattactctttcagtttcaaaagattgtattattgtaacaaggtgaccattactcttaaaatttattcaaaaataaccaaatctaaactaaaacgtaactaaaatttgatattattcatgaaattctaagaacaaatccaacatgatcccttaataatttccctttagtagtctagccttcttagtcggtcactaataataaagagtaaagagaccaaaagagagaagtcttagataacggtgacagagttaaaaaagaactcactaaaatagacggaggaaaaagtcatcaattcaacttgacggctaagttaacggcgattatcttcgttcacacaagcaacacaaaagagaaaacatgaatcatctctctctccctctctccggttccacagtaaagaattgattcctcaatctcacgcggaagcaaaatccaaattctaaaattctaagaaaccactctaatcacatcgctctatcgatcaaaatcgaaacccttattcaaaaatctcttattttttccatttttctctcaatcatctgaatcggttttgagatg

SEQ ID NO: 20863 - DNA, 3003 bp, Unknown; identical to SEQ ID NO: 16447
  misc_feature (1)..( 3003): 2750-1469P.txt file - cDNA_ID_1829376; gDNA_ID_2910741; Annot_ID_193681

SEQ ID NO: 20864 - DNA, 3003 bp, Unknown; identical to SEQ ID NO: 16447
  misc_feature (1)..( 3003): 2750-1469P.txt file - cDNA_ID_1829376; gDNA_ID_1620821; Annot_ID_50685

SEQ ID NO: 20865 - DNA, 3003 bp, Unknown
  misc_feature (1)..( 3003): 2750-1469P.txt file - cDNA_ID_1829379; gDNA_ID_1620821; Annot_ID_50684
atataattcagagtcatatcattaataaaattaatattaataaaataaatgactttttggcaagacgaatttggagggacgggtttttgaatcaacattaataaaaaagtaaaatataattaatccaccgttttaatacgggttaaatctttaattaattattttttaagaccactaatattaaacatatcaaatcatcctaatttagaaaagattatataaaaccaaaaatgttatgtggtatgtataatattactatatataaaattaaacaataaaatataaatgtattagagaatgatacaatgtgcaaaacttttatatataaaaaataattcttaaattttaaaaattactactttaaaaaaaaaatcacgggacgggtaaaaaatttacagaacgggttttattttggaattgggttatatggtggatgtatttgaatcaatatttataaaattttaaaatattattaatatgctgtttaagtagggattaaaacttcagttttttaacaattatctcatgaattcgtggtatagtgttatttaataacaattataaactgtaaaataaaaatattttataaaaataaaatttgcaagttttaatatatattacttttaaaaaataaatcgtcccgcagtatatcacatgttaaaatctagtttatatatcattttgatacttttttaaaacagagaccggtgcagtttagtagttacgtggataccaaatatatcatacaagttaatatagaaattaagaatcagatacgacgttccaaacaaatacttaaacgtgtgtagaccttaggaaacattgccaactggcaactttgtattatactaccaaaatctagatatctataaatctagaggtgtgtatgataatgaatattgaatagtatatgtttgatattcaatgttatactattcagatatcaaatacctggatgtatatatgtcaactgaaaacaaatataattctcttagtatgaagactatttacatctaaatcatatgaataactaattaactttttcttcttttttttgttaattttcaaaaactatgtcatttgttatgtattacataatcacttaagatatatataaaaaaaaatgccctaacgaatttcgtccacaacatatgaatcgagctagctatttagatatttctattatgcatatgatgaatcatagattgataaacatattatatattttttgaaaaatggtagttcaatttcttttgacactaattaaacatgaaagagacatgtccttcgggtgtaagaatacctaaacagacaaagcagagagtcataaatatcttatgattataaatggaagagacatataaaaaatgtttattgtgtactaatcccttatatagtttatgttggacaactccatattaatttaggtttacttatatttcggttatgaaactctaaaaagtattgtctcccactatccattaggacaaactggcaaaggcaaccacctcaacaacatcaaagaacaagaattattcaactgttctacaaaactatactagtactattacagttgtttgtagcatatacttttccaaatagaattttatacgattttcttttccatattttttgaaaatgacaagtgatatgatttgagaaaaaacaaaaaaaaaaaacaaatttatacagtgaggcctgcaagaccataaaacaaactaaagccgttcattaaggttccattaattgggcctatatttttctcgttatattatgagcctgttataggcccattagtaataatttatcgggttatgaagtaaattttcagataattaagggtctcaagtataaatatcttaaataacagacccatctacctggaaatatgagtatttgggcagagaggggtgttttcgtaaattcaagtacatactttatttttatttttttgctttcttcgccttttgctccctcctcgagaatttccgatcgtgctttcctcaaaagcatttctgtttctcgtcgtcggagcccgacgacagatctctgaatcgctggagaaacagtaagtaaatctacagatctcgtttcttcgaacttcttcttcgtatactatttgtttgtatcgttccttcgttgtgcattgatgttcttaatgattactagaatctaagtcagaagttacctctatttgttcttcttctatatttgaactagatttcgttctagcgtcgaacaaactcctcgttttctttgattcgcattgctggtgattttcctgaatttcgagatttagcgagacgtgtctcgagttctcttgtgttgacgggatttttcttatctggagaactgataatagtttcatgacactgtcactggtctgttgaattgtagtttaaacttattccatcggatatagtgactcttaactctataagttgctgattttgtagatgggtttagtgttatcaggtttattgatgtaacaacgagtttacaaactttgctatttagggatctgtaggaattcgtttttttgggggctcaaattgttggaaatagttgcttagctattcacaatctaaatgtgatttgggaaatctgcaacatatgttattactatggaagaggttactctatatagttactaaattatcagcatggtttctgaccattatagaattctttgcttgtggtttatttgtttgaatcaaagtggtttcattcagagacagcgttgtagattttgattatctctgtaatgtatgatgtgaaaagttacgccactttctatcttattagctcttgaaatgcatctattatctgttttaaaataagattttttaaatttaatttgtttttttttgccagtaatgattgagtttggcctctatctgtgaagggtatatgctccggctgtatctactttatattctgccaggaagattgtgagcattgaagtgccttgggctctggctgaagatttgagcagattaaatg

SEQ ID NO: 20866 - DNA, 3003 bp, Unknown; identical to SEQ ID NO: 20865
  misc_feature (1)..( 3003): 2750-1469P.txt file - cDNA_ID_1829379; gDNA_ID_1620821; Annot_ID_169464

SEQ ID NO: 20867 - DNA, 3003 bp, Unknown
  misc_feature (1)..( 3003): 2750-1469P.txt file - cDNA_ID_1829383; gDNA_ID_1620821; Annot_ID_50682
gctgcaaccatgtccgacgaggagcatcactttgagtccagtgacgccggagcgtccaaaacctaccctcaacaagctggaaccatccgtaagaatggttacatcgtcatcaaaaatcgtccctgcaaggtttcgttctcaaacatttctccactctcttcctctgatcttattagatctgttcattacttagattcctcagattcttttttttgtcacctccacgatgttcgactgatatttgttcttgtcatcattgttaaattcacattttattgcacttttgttttagcgaaattattaaattggtcatcttcagttttgttcgattagataagttttaggattttttcttacacaagttactggatcagctgctaaatgtcattttgtgtcgcaggttgttgaggtttcaacctcgaagactggcaagcatggtcatgctaaatgtcattttgtagctattgatatcttcaccagcaagaaactcgaagatattgttccttcttcccacaattgtgatgtatgtgaaaaaagctcctttgatcactttcatttcttgtttgtttctttcaagtcccatttgagattttgtttttgttgaattgggtttcaggttcctcatgtcaaccgtactgattatcagctgattgacatttctgaagatggatatgtatgtgttcttaaatagcacttgttcctttatatggtttagttacttgttctgttttgtaatcattttgcaggtcagtttgttgactgataacggtagtaccaaggatgaccttaagctccctaatgatgacactctgctccaacaggttaagttttgcatgttcatcacattaaatgttgctagttaattaaaatcaactctatgtcgatttctgaaaatggaagaaaaagtgcagagtaatgagtgacctgattgtgttaatgaaacagatcaagagtgggtttgatgatggaaaagatctagtggtgagtgtgatgtcagctatgggagaggaacagatcaatgctcttaaggacatcggtcccaagtgagactaacaaagcctcccctttgttatgagattcttcttcttcttctgtaggcttccattactcatcggagattatcttgtttttgggtgactcctattttggatatttaaacttttgttaataatgccatcttcttcaaccttttccttctagatggtttttatacttcttctaattgattgattctttatggttgtccaagtgtcaaagtgttccacccatatgattctaaccttttgatgagcgaagtctttactcgtgcgttatgtagagacgtagaagcaataccacaaaagagtataattatagatatatgctaacaaaactcaaaagttaagatcagtttagtattcaaaattgaacagtaaaaggttaaaaaaaatatgtatacttatgaaaataactaaattcatagataatcttttaaaattcagagtttctttttcttatatcaaattcaaaatgaaaacacaaactaaaataaacaacgacacatatcataaggtcttttatattttgtattagatcaaaactattattgcaatcacatttcttgtggtaataaatgaaaggaattctactcctaaagccaacgtgtgtcccacacaaagtaagaagaatgtttatattatcttttgctcttgcaaagtcaaatgtatcttcaaaaagtcatgttgctagttttcttttattcccctcacgtcatcacggttcctcctcctattacaaatatacacacccaaaaagtccactaacatgaaatgctaaagttaattttagaaatccattgctttcacgtgaaaaaaaaaactattacagaaataacatgtatttatacagtttactaatagtcatcaactcatcatatatggtataaatatttgtcgaaaaacagctctcatgatatgtgtaggcttatattcgacagcccattaagacacaaaatgggccttttaaaaggaatgtcagttgtcaatatctgattcgtacaacgtggagtagctgtggccttgtccggttgtctctctctgcctcttcgctccaggttcaccgtacaataataacaaagaccgacgcttttgtaaaagtgaaacctaaattgataaccaaataatttgatcaatttggtacaacttttgttttgactgatgttcagattttcttttcttcttaattggtatagttttattttctttttaaaatgtttggatttgtaattcatttagcattccattctaataagatttatctttttctttttaattatctctttacatgatactactatactatttgtttaaacaaaaaatatagatatacatgcatattccatatttaattaatgggatcgaaattcaacattaaattaatgtacctgtaaaaaattaaatgtacaaaacgacagaaaaactcaaaaaagcagattttaaacgttatattttccaattttctactgcctcctgaaaaattggatttggacatgtctgaacattactcaaaataaataaatttagctagtttttgaaataagaaaacatagtaagtaccgttttgaaggagaaaaaacaaataaagtactttttacacacgaaaaaaaagaaagtaaaggaaagagcttgtttcacatatatctgcagcgtggactttctctactgcgaacccaaaaagttttttaatctttttatgtttccagatccgttttaagaccagaagtacaaaaaaaaaaaagaaactcgaaatctccattaaaagagcctatcgataataaaaagaaaaacaaaacggcaaaaaagtgaagcgaaacacgacacggattcacacaatactcagatatatacaaaaaggattttagattttgattcagaaccaaaaataaaaaaaggaacttttttatttctttgtttgattttttgggttgttggttttttttttgtttgttaattttggggatcgatg

SEQ ID NO: 20868 - DNA, 3003 bp, Unknown
  misc_feature (1)..( 3003): 2750-1469P.txt file - cDNA_ID_1829387; gDNA_ID_2910741; Annot_ID_193674
ttatttcacaaaatagctgcaaaaatgtatatatagattaagtgtctttcgtatattcaaaaattaggagtttcagtttagaaactctcggtttacactcagaaaatcattcaaacctattcaaatgtagattgaattattgaataggtatgtaattgattatttaattattgactgtttctccataaaaaaatactataaatacaactatgtattataactccctttttcccctggaataagactgatgataagcccattgacaaatacagatttgggcctaaatcaccccaaaaaaaaagaaagaaacaacctctccttgcctttgtagcaatcaaatttcctaataagggcataattataatgatacacaattagtctacacaaacgagtgagacattgatggtgtaactcgtgttctacgaagtgtgactatttacatttgttcagcttgaagcttatttaatcccttttatttttcttgtcgtgaaaatctaatcacagtatcacactacgtttttttgtttgtcccagcagttaataaacacacacaaaaaaagcttcgatatttgggaatttttgtagttactagacatttttacaaactattacttaatatgttcatattattaatttcgttatggtttctttatttaattaaatcgttcaccggcttgtgtacgaatgatacttgatgctataacttggaatctgaaagagccaatcaccgaattttgtcgacagggacgagagaaaaagggagaaaaagatgctctttttctcgaagggtaatttggtaaattaataaatggcagatgatgtaattaacgtggaagttaggtggttttatttgtctgaaaaaatgtaagttcgaaacggaatcctagattcgtggacacagatcgttatggggattagagagagaaacaaatgttttctttttgtctccagaaaataagagagccatgagttactctcatatcttataccctttttacccttctatctagttgtagattttttttaatcatttctttaattattaattgcgttaaattaattattgttggaatagaaatattattttgcaatttgcaccaaaaaaatattattgtgcaatttacaccaaattagcaaaataaaataaaattatagaccaaactaaataaattttggtgctaaggaataccaacttatgtaggttgtcctttgaatagcctgacctatggttgctggttgcctggatcctatatatgcctagtatgtatgcatgaaagcgtgtacattgtaacaaaaagatacatgtattttatttattagaatttgagaaaataaattgcaagtttagataaataaaattaactaaaacgaattataaaagcctaattaacgagcaaattattcagtgtttatgatatatgatccaaaaatcaacatgcataaaatgttttttatttactagaaattgttgtatgatgtgattggaaaatggacgtattaattgttttgtagtatctacggttctttatgaaacattttgttccaatacttttttttttttggaaaattttgttccaatggtaagtggacaccatatccagagttcaaagttccttttcaacaatctctcctcttttttttaatgttctttcaaaaaattgttttaagaattttacatgttgtaaaaaaaagataattaaagatacaatccataatttactagaatacaattacaacacgtagttatttcaattatcatcggatatctatctacacagctctatttcatagattttccataaatatcatttaatacacgtagttacattttttgtttgtcttatacacgcactttctagaatcaaacaaatgctttcagaaaactttagtgattaattgatcgtagccaaattcatctagcaaattagtaattacagttataataccattattttgaatagtcattatttgttgaaaatatctttaataaattttgttaacttggagtttataaattataatcataaacgttgtttcgatttttgttacagttttctaacaatgttaaattttccagtatgtgtgtgaccctacaaaaatgggaatcaacaagaatcaaaagggcccatcaaagtctccaccaccaatcacctgtgaccgctctcacacttaacgatgatctttgttggattaacggcgcgtgtaatcttgatcccatcacgtgaactttcacgctcatagaccccactgttccaacctcagcaccatcagtcctattcgtcaagaagatttaaggccatacgtaacaaaagcaagctgagagaaacacatcctgtcaataatccttgagctggactctaaaattaggcccatgaaacttaatgacagccaaaaatattgtttgcattatgaattaattatggatttgccactttttttatggcatttgtagactttgaatttttttgaatagtttgtggattttgttttttttcctgattacaaaagtatgatttaacatgcattttatttgttatgtttgggtttagtcggttgtggttgtggttgttcttacaatttagttttttgaataaagtacatatttttaccaaaaacaaaatcttaaatacgtacattttgaaatgttaaaaatgacatattcataaaattttagtaaaaatgatgattttaaaagatctcgatgaaaaatgacaaaaccaacattaatcgcttacattattcgtaaaatttatcatgttttcaaagacatgaaaacattgatctctatatgaccggagaaaacattgatctctcatatcagatcacgtgatcgaacggtggagaaacgctctctacaataaggctttaaagcccataaaacccttaaatatatcaaagcccaaaagaaacgccttttgcgctttcccgatcgtggtcaacttcctctgttaccaaaaaatctgtaccgcaaaatcctcgtcgaagctcgctgctgcaaccatg

SEQ ID NO: 20869 - DNA, 3003 bp, Unknown
  misc_feature (1)..( 3003): 2750-1469P.txt file - cDNA_ID_1829387; gDNA_ID_1620821; Annot_ID_50681
tttcacaaaatagctgcaaaaatgtatatatagattaagtgtctttcgtatattcaaaaattaggagtttcagtttagaaactctcggtttacactcagaaaatcattcaaacctattcaaatgtagattgaattattgaataggtatgtaattgattatttaattattgactgtttctccataaaaaaatactataaatacaactatgtattataactccctttttcccctggaataagactgatgataagcccattgacaaatacagattttgggcctaaatcaccccaaaaaaaaagaaaagaaacaacctctccattgcctttgtagcaatcaaatttcctaataagggcataattataatgatacacaattagtctacacaaacgagtgagacattgatggtgtaactcgtgttctacgaagtgtgactatttacatttgttcagcttgaagcttatttaatcccttttatttttcttgtcgtgaaaatctaatcacagtatcacactacgtttttttgtttgtcccagcagttaataaacacacacaaaaaaagcttcgatatttgggaatttttgtagttactagacatttttacaaattattacttaatatgttcatattattaatttcgttatggtttctttatttaattaaatcgttcaccggcttgtgtacgaatgatacttgatgctataacttggaatctgaaagagccaatcaccgaattttgtcgacagggacgagagaaaaagggagaaaaagatgctctttttctcgaagggtaatttggtaaattaataaatggcagatgatgtaattaacgtggaagttaggtggttttatttgtctgaaaaaatgtaagttcgaaacggaatcctagattcgtggacacagatcgttatggggattagagagagaaacaaatgttttctttttgtctccagaaaataagagagccatgagttactctcatatcttataccctttttacccttctatctagttgtagattttttttaatcatttctttaattattaattgcgttaaattaattattgttggaatagaaatattattttgcaatttgcaccaaaaaaatattattgtgcaatttacaccaaattagcaaaataaaataaaattatagaccaaactaaataaattttggtgctaaggaataccaacttatgtaggttgtcctttgaatagcctgacctatggttgctggttgcctggatcctatatatgcctagtatgtatgcatgaaagcgtgtacattgtaacaaaaagatacatgtattttatttattagaatttgagaaaataaattgcaagtttagataaataaaattaactaaaacgaattataaaagcctaattaacgagcaaattattcagtgtttatgatatatgatccaaaaatcaacatgcataaaatgttttttatttactagaaattgttgtatgatgtgattggaaaatggacgtattaattgttttgtagtatctacggttctttatgaaacattttgttccaatacttttttttttttggaaaattttgttccaatggtaagtggacaccatatccagagttcaaagttccttttcaacaatctctcctcttttttttaatgttctttcaaaaaattgttttaagaattttacatgttgtaaaaaaaagataattaaagatacaatccataatttactagaatacaattacaacacgtagttatttcaattatcatcggatatctatctacacagctctatttcatagattttccataaatatcatttaatacacgtagttacattttttgtttgtcttatacacgcactttctagaatcaaacaaatgctttcagaaaactttagtgattaattgatcgtagccaaattcatctagcaaattagtaattacagttataataccattattttgaatagtcattatttgttgaaaatatctttaataaattttgttaacttggagtttataaattataatcataaacgttgtttcgatttttgttacagttttctaacaatgttaaattttccagtatgtgtgtgaccctacaaaaatgggaatcaacaagaatcaaaagggcccatcaaagtctccaccaccaatcacctgtgaccgctctcacacttaacgatgatctttgttggattaacggcgcgtgtaatcttgatcccatcacgtgaactttcacgctcatagaccccactgttccaacctcagcaccatcagtcctattcgtcaagaagatttaaggccatacgtaacaaaagcaagctgagagaaacacatcctgtcaataatccttgagctggactctaaaattaggcccatgaaacttaatgacagccaaaaatattgtttgcattatgaattaattatggatttgccactttttttatggcatttgtagactttgaatttttttgaatagtttgtggattttgttttttttcctgattacaaaagtatgatttaacatgcattttatttgttatgtttgggtttagtcggttgtggttgtggttgttcttacaatttagttttttgaataaagtacatatttttaccaaaaacaaaatcttaaatacgtacattttgaaatgttaaaaatgacatattcataaaattttagtaaaaatgatgattttaaaagatctcgatgaaaaatgacaaaaccaacattaatcgcttacattattcgtaaaatttatcatgttttcaaagacatgaaaacattgatctctatatgaccggagaaaacattgatctctcatatcagatcacgtgatcgaacggtggagaaacgctctctacaataaggctttaaagcccataaaacccttaaatatatcaaagcccaaaagaaacgccttttgcgctttcccgatcgtggtcaacttcctctgttaccaaaaaatctgtaccgcaaaatcctcgtcgaagctcgctgctgcaaccatg

SEQ ID NO: 20870 - DNA, 3003 bp, Unknown; identical to SEQ ID NO: 20869
  misc_feature (1)..( 3003): 2750-1469P.txt file - cDNA_ID_1829387; gDNA_ID_1620821; Annot_ID_169457

SEQ ID NO: 20871 - DNA, 1808 bp, Unknown; identical to SEQ ID NO: 6026
  misc_feature (1)..( 1808): 2750-1469P.txt file - cDNA_ID_1829627; gDNA_ID_1620836; Annot_ID_50816

SEQ ID NO: 20872 - DNA, 1943 bp, Unknown; identical to SEQ ID NO: 6011
  misc_feature (1)..( 1943): 2750-1469P.txt file - cDNA_ID_1829627; gDNA_ID_1620836; Annot_ID_169907

SEQ ID NO: 20873 - DNA, 3003 bp, Unknown
  misc_feature (1)..( 3003): 2750-1469P.txt file - cDNA_ID_1829635; gDNA_ID_1620836; Annot_ID_50812
agctctagaggtcaaaactacgctaatcattttgctacctaattgtctgccaatatttagcccaatccctctgtgtgcagcagaaactatatcactaggttattgccttattggattggatatttgcattgcattttagaatccaattacaatgttgtgttattcaatcaataatttacatatttaaattgacaatgctgtatttcacaattattagttatattttggtgttattcaatttatgatttttaaatacaagttatatgttagaccaaaataaaaagaaatataagttataagttgctgaaaataactataggtgaaagaatctataaaccacaaaaaataactccaagctcggattttttttctccgaataaaacaaaatattcactaaaatcattaagcagagacgccaacacaacacaactcaactctttgtgtctttgtacagttgtacgaatggtcatgtactatgttattattattattccggaaagctccactactctctcaatcattttgaaattgtctcctcaatattttgtttggctcactagctttgttatacgtatggtatgggcaacgatatgaaaggtatataaatcacacaattaaaattcaagatagtgatatttgaagttgtgttttgcacaaaaacaaagctatcgttgttagcttgtgagataggaaatttcgaggaaggtctttatatgtaattctcgcatgcatgtgagatgttgatcgatcattttccccacaatatttacgagatttctgtccctataaaaaacgattgtgatgataatagtcaagtggaattcctaagcaaactaagtgtatgctttactccctggaaccgaaccctacatatcttgaaatttgttatgtaaattcagccgatcctctagtccagtttcgcccttaaccgttacctatttcaagttttgataagagccatcgtggtatgaatgttaacccgctacttaactagttacaatttacaactacataagttttggagtcacgtgttatatgatttatagacatttgaattattggctaatattggcccagtcttggtctctccgtgataatggatattctcttttgattccatgtcccttgtcaaatctctaacaactacactctgatgatttggaacaagctggaaacaaaaaaaaagttcttacataacaaccctaaatgattgatcagtaaatgttatattctaacttcagatttagttgtatcatgtataaaggaaaaaaaaactaatcatataggattgttaattaaccaaagacatcaatatatgactattaatccaatgcaataagattaattatatagtttttaaatatttaaattaatttaattaacttgaaaagctttcaaattattattagtgtacttgaatgagcgaaattggccaaaatgcaaacagccgcttatcgcctttatgtcttggtgctaaaactgctgccgcttcgaaaagccaaagccaaagcgttaattataaattttttggtacaacaaaagtgataacgagtgatgattctactgctaccacactttgagcccatcacacaagtttacattggaacactcctcttcaagtacacgtgtagtgtacaacacaattaaccttctgtttttcttgtcctatctttcaataaatagccatatcatacctacctaaaacgtaacccactaattttcatcaattaatgtcgagcaaatactatatcttaagtttgaaattatcaaaccaagcagaacaacacatgtagttataatcatataattatctttaaaacatttacaagttcattagaatcttcgtacagatacagccatatgcaactaatgaaagtctcaaactcataaatcaaagaaagcattaaactcaatgttcttaagttaaatatgtcaaatcatcacatataattccgattaataattagtcagttaagctgtttaagcatactctaagcattaataattagtcagttaagatatatcattgatccattctttcaagttaatgtcctttacatacatccaaattcatttgcacgaaaagaattaacatagagatatatagttacataaacacatacactgaccaccatagatttatttgaaccttatatataacaaaagatcgaaatgttaccggcacatatcggtgagaaatgaaatgcaatttattgttatagaatggcaagttaaagcacaaaagagtatatattaaagatttttttatacacgtgtcagtgaggattgcacatcacatgttaaatcacatatgtttaagcaaaatggaattctatatttgcctatagattagacgtcaaaaatagacgacaactttctaataaaccaaaaaatgtcgctcaaaatgatatattatatttattatgtattgtactagctagagtacgaaatcaactaagatcacaaacggatagtcggataccaatcaaaagtgttcaattctgactcttgaaaaactttatttatcttcattttgaattgaatacaattatctaactgtaactttttttcttactcgtcaatctatagaatcaagttaccctttctagagaatcaactaactagtagtctagtaccttcctcaatacaatagtcgtacgaacgcccatttatctaggtaccctcaaattttgtgtcgtctcacttattagttatctattactagttgattactcaatacaaatttccctaaatagagaggatatgagagttgcgtatttaaacaaacctaccaaaatatgattttcgtcaaaccaaagcaaaaacctaccaaaagaaattatttcttaaatacagaaaaaaacaaaaaggaaacttccgggaagctgcgtacatagatggacccaacataaaccaaaacaataacacgtagtcgccacctatatataaaaaacctgacgcaacacaaacagatgtagtagaatcaaaacgtcttaaaacatg

SEQ ID NO: 20874 - DNA, 3003 bp, Unknown
  misc_feature (1)..( 3003): 2750-1469P.txt file - cDNA_ID_1829639; gDNA_ID_1620836; Annot_ID_50811
tccatatagaaatcatggagggatttgagacatgcataattggtcgtacgtacgtgtgaggtggtggtgttacttaagaccaaaattatgctatatgcaacatgctacggaaaaatattaactgatgttgttcaaggtgagacttgcaatcatttaaattgtttatagcatatttttcattttaattaagaattttagctcgtactgagaatgagatataaatcaatacaaattcaactttattgccaagccaatgggggacacatgaaaagaataaaattagaaaatgttaaacgagatatgagtgcattgaaaccttgtttttgtagcatactcgagtttttatttatatatggcccatcatgctatgctttctctttcgcttataccattgagcttcgcgacatttgaggaaaagacaagcccaacacattttactttaacaataactaatcaacctctacttcttttctattaaacaaaatgttaaagggtttttttattttcttataatgcattcatttaccttgtcctaatgtcccgataaatcttgccttttaagttctttgactagtggctaccaaattcttttagaatctgtaatgattatcattgaccaactgtgtctgtgttttcctaaatttacaaagacatcacgatgtaaaagcttcggggtggattgtttatggaagcggtcaagcaaagaatatggatgggttcacgaggaatcactagtgtgtgtgacattatgatattttgttatcggtttaatggattttgccaattataagagaatctatgttgcaagatggtagatgatcgcactacaaaaaagtgatgagccaaaaatatagtcacacgttgtccaatggaatcttcaccacgaaatgaaaaaagttcaagtgatcttttggacgtcatgcaaaaatggaagatgatgacggttacaaattgatctgtctagacatcttatcttctttattcatggcaagtctttggtactactatacgtgtgatgtgaacgcatttcagataagttaagtagatatatatcttgttgtatgtgtgaatgcatctccacatcttgagatttggttggttaacattgggttaaatgtgaacgcgtctttggaatagtatataataataatttagacgcgcgtttgttaactttcaaacatttttgtgaaccacgctccaccaaataagacatgtggtggacgttgcaactagatttacgcatcttgatgggtttccaaaaatggtaagtagaaattggttttctctcaaaagcaccattatttagggtttgggaatgaaaaaagtttgtatctttatcgttatgattttactcatgctaaaccaaaggtttcttcatcgcgttttggacttcgtcttatctaccgccctatgtgttacatgatacgacatatatgatacccagaaaaaaattcatgtgtgcgggacaaaaagcctcagatgacttttgattttgaaaaactatgatcatttttaaaaaagttgtagaaattaaatcattttgaactattcgatgcaaccaacctatctaaaaatgaagtaaattccgcaattttagatagatggacatcctcagatcacatccatttaaactaccataatacacgtagatggctctagacctctagtagaagatatgatactactatctttgatatgtcgacattggaagatacattttacaccgtagagctttgtggatatttcgaaagtaattagtgtataattcaaatcaattaaatttagatatataaatgtaccattctaatgcaaatcctttataacaaaaaaaaaaaggactttcccaaaggccaaacaaatgattgttgacattgaccacacgatcgtttagaaacatcacaaattttcaatctcctcctagtctcctaggctcataccacttacgttcgcatgttacataccttttttgaaatggccagctcatttttgatcaaatgaatactggatttacaatgggaaaaaattctgcatctatgttcttagatttacaaaataaactagaaatgttcgttttagtattttctttctatgaaataacttgttgttttatgaattatgagtctaaaaatggcatattagaaccaaaaaagattagcacatgacatttcaaaatcttaaatggtaacattttcaagatttttattctatcattagttgtttctatcatgacatttcaaaatcttaaatggcatattagaaccaaaaaattatttgttttattttgtacgtacaattaccatatttttattcattgtcatagttgttcaggtggatcttagatatttcaaagtataaaatttgtgatcgtattttagatgattacacacatatcacatatgtaatgcacataatatttccaaattaaaggtaaaatattatttttaccggagtatgtatatattcaatccagattatttttaaaaaattagattttttttgaatgatcagtcttatcaagaattcaaaagatagtgttgttgtcaatcaaaattactaaaagaaaattgtttagtcaacatatatacgtaccttaataaatatttttcttagaatctaaaggaatttacagatgttaaaataaaatccaataaagtgtaaatttaccaaacaagtaaagaccatttttcaaaaagaaaaagaaaccaaggagaccaaattatgattgagttttacaaaatacagaaaataaagaaattaaataaatatcaaaaactcaaaagagacctctcttctctctctctctctctctctcgctactctcatcttcaccgtacgcttcttcgatctacgcttctctctagctatagcttccattgtcacgattcctcccaaagcgtagaatgtggaaccctagatacctcaaattcagctagagatctatctactttcacctctattactttctacttctgaaacccctcatcagagctacacacagtgatg

SEQ ID NO: 20875 - DNA, 3003 bp, Unknown
  misc_feature (1)..( 3003): 2750-1469P.txt file - cDNA_ID_1829643; gDNA_ID_1620836; Annot_ID_50809
caacataaaaggtttgccaaaagagtaccccagctatgctgtacaagagtgttagaacaacaacatctggcgtaagagtgccaaacaatgcttggccagcccacctatcagtcaagtgagcaagaaacaaatcaatgagatgagaacaacgccatatattattgatacacgagatatcttaccatggcaaactaatatagcttgctccaagtgcaaaatttccaacccatccattttgttttagctgcaatgagatcagttcagatatcgatattcaaaactccaaaacttggatggagtgtcttatcactagagagtggaagttaggaataaaacttaccttaagaggtggagcagagtatatataagatagcaatgatcctcccaaagcaagatagaagacagtgggagtggtatgccctgcctgataagggaagattttagcaaatctgatgtgccctttaactgtactagttaatgtcagaagggccaacttacccacacatctaatattccagcaataccaagacctcccaataatagcacccagacttgtgtaataacctgcattttaaggagtaaggagaaatcagaatcacaaaagagataaaagctcacaatgttctgtctcagttacctctggctctgatattgctccagatggaattggacgatatggctcattaattgcgtcgatatctctatcataccagtcgttgattgtctggaaatcgacaagtctaggttattgtagcaccaagcaaatgcactagaataagaacaagtcagctttttgttgtgtaaaaccagacctgtgtatagccagtaagacaaggaccagacatcatcatgcaaagaatcgacttagcaacatcctctggggtccaatgaaagttccctgccagaagaaacaattggaaggaaaatgaaaaaactttctgtacagtattgcatgatccaaaagaggttcgtatgattacctgaagcagcagcaccacagacgactccccaaaccagtggaggccaagtgactggttttgtaagctgaagacgaatcttccatttattctgaatacagaatataacaacaaactctttttagctaacaaacaacattttcacatcatttctaagctaaaaacaagacttgtcctcaaaagagattacctttagtaggaaaattcctaaactaacacatcattatccacaaatatgataatttaaaagattctgaggagatgaacaaaattacagtttcttgagatgctcctttgataccgagaagctggttaatgcttgaaccaccggctggtgccttgtcaggtgtctgagatttaactgccgtcggaaattcaaacgccacagtgtttgaaaagagaattttgaagagagagaaaataaaaacaactaaaaaatcatacctttatcagtatcagtctccgccgcacgcacaacaaatctccgccctacgagagatccacaacaagatcagtaaaaaaaaaatcgaagaaaacattcatcaatctatccaacagaatgctaactaccgggtgattcgtagatcaacgtcgagaaaccagaacgccggcgagtgaactcaacggaatccgaattccgaagagagaggactccgactcgatcgacggaggtaactctggaagagtggatggtggagacagtgttgagaatcgaagtcatagaaccgacggaagagagaatcgtctctggtggtagttaagccggagactggagtggtgtgagtctgtgagttgctgtttcgggaaacgagtggttgtccgttaccggagataagtaatgtctacgttacagttttggcggcctttgattcaataactgccatgtggcacgatcctcttggcaatactagttgtgtcggatgttagttttgttggacaaaggaccttcattgaagcagaatgggcccggtttaaatccaaagcccaaacaaaacccattagggtttcattgaagcagaatgggcccagtttaaatcgaaaacccaaataaagcccaaaaaataaatctaatattaatatgggatgatatataccgggtgaaatcataaaatttaacaataaaaatacaaatacacaattttaaaagctaaccaaaactaacaatattaacaaaataaatataatttcaaatttcaaatcttttaattataaaatcatcccgaattgtatcatacattaaataatcaataacatatatctatagttgctcaatacctccggggattactctactacataagtcgtcttgattgaatagatttcctgatgtctagttttcctactgtggaaatcctatttagagtagactcacttcaatgaaagctattacttctttattaatgactattaactattataagatattaagacaaaaagaataataaatctaacaaggggattatgatacatctagttgtagttgatatcttaaaaacaaaaaattcatgtatttgataaaaatataagcccgcgatatatcttttaatatatatcctataaatataatattaactgaaataatttttttaactttctaataaaaatatcaaccttcagtctcttcatgttccctcaaggcaaaattaccttcaagtctctatttttactacatgtggaacaatcaaatcaaggaagagtcggtaggtgatggagattcgctttaaatgtctacgtaacagttttggtggcctttgatttaactactgtaacaatttgtccggacgaaagactattgggcacagtttaaatttcaggcccaaagaagcccactagtatccggttgagagacacgtggcaacagtcaactttgaagaaaaataatgaacaatcattgacatttttttttgtttctcctgatccagttcttaattgaacaaactccaacagcatcatcatcatcatcatccttcaaattatttttcctattttgaaaaatttatttgaaatctcataatttacgttaatg

SEQ ID NO: 20876 - DNA, 3000 bp, Unknown; identical to SEQ ID NO: 6016
  misc_feature (1)..( 3000): 2750-1469P.txt file - cDNA_ID_1829649; gDNA_ID_1620836; Annot_ID_50806

SEQ ID NO: 20877 - DNA, 3000 bp, Unknown; identical to SEQ ID NO: 6016
  misc_feature (1)..( 3000): 2750-1469P.txt file - cDNA_ID_1829649; gDNA_ID_1620836; Annot_ID_169896

SEQ ID NO: 20878 - DNA, 3000 bp, Unknown; identical to SEQ ID NO: 6010
  misc_feature (1)..( 3000): 2750-1469P.txt file - cDNA_ID_1829657; gDNA_ID_1620836; Annot_ID_50803

SEQ ID NO: 20879 - DNA, 3000 bp, Unknown; identical to SEQ ID NO: 6009
  misc_feature (1)..( 3000): 2750-1469P.txt file - cDNA_ID_1829661; gDNA_ID_1620836; Annot_ID_50802

SEQ ID NO: 20880 - DNA, 3003 bp, Unknown
  misc_feature (1)..( 3003): 2750-1469P.txt file - cDNA_ID_1829665; gDNA_ID_1620837; Annot_ID_50829
cactctcaaatggtatcctagagttagtatgcaagccaaaaagtctaatggatagaagagtcaataacccaaaccatctacgcttttcagtaggccaagctctgcacgttactaagccctgcctaagttcatctagattaggaccttcaccggttggcacatgcaattcactgaagaacgctttgtagtcagctgcaggcacaaacttttctgtaggcagttcatctatatttaaacccgtgatatgatgaaattcgttcaatccaaaccggatgggtttaccagccacgatacaccaaagctccttcttcagtattctcagttgtctgcatagtagataatgtacggtcttaccagaccatagaaaataactatcaacaagcttagcaattaatctaagctctgtctctttcagttctgcccatatttcttttcctattgattctctaattgcagggaactctcccagctttatattatgattaatgcctttaccctccagattagaatccccctcttggtaaagtcttggagggtactcccttgcttggtcttcagacatctgtataaccataaatcagccgtaagcattccataactcagtcataacataaaacaaactcatccacagataccataactcaggcaaaacataaatctaactcagccatagataatataactccgtcataacataaacctatctcagccacacataacataactcagccataagataaatctaactcagccatattttaacagaaactcagacatcgatgtaaggttaaaccataactcagtcacagcataaaacaaactcagacacggatgaattgataaatcataaatcagtcggcaaacaaatagtaactcagccgtcaaatcaaatagatctaagaaatcggccaccatatgtcaatcaacgacgacgttaaaacccagctttaaaaaccatcgttacgcatcggaaaacgatttcagtgacgggaatcacttgagattgaacttagatgtcagagtcttacttaatggaaacatactcactggaacttagatgtcagatgtgacttcgcgcttacagaaatgcgactccggcgtctgaatttcggccggaacagacgagaaaagagcaaaacggcgaaagaaatcgattttgttccgtcgagagagaaagaggaagaaagcgacagtttttttttttttgggagatgatgaacagtaaagccaagaaataaaaaacccaaacgttatgcggtttggagatgattaatgacgtggattatcgtaatgacatggaatgatgacatgtataatcactgttttttaatttaatttttagttaaaaacgaattaaataataataattaattaaaactagttagggttgttaattgtaattacacaagaactgaaaacatctgagtaataaaaaaaaaatgtgttctattctaggaataaacatacaaatgtgttctatcttaggaattatttctatataatatgtatatgttcaattgtgatccaaaaataaatgtttcactacatattatggaaacaaattcgaataagtgttgatgcaaaatcacttaataatcagataactgaataaattttagaacaaaaaaaatggatcttataatgtcattgttttctagcaaaataatatgatctaccggggatcccatcctcggtggtgaactctactgaagtgtggttaactctgttgaagtgtgatgaatagtgggggagtagttaggtgacgactctgcttcaaatgtgatgaagtctggtgacgagtaacatgagctatttcacttatccctacaaacccatctacattaataacatcttgagagaaggtcaatctctactcccccactattcttttcggttaacttagatgccaacgcttaaaataaggtggatagttgagtccaatataactctaatatttttgaaagtgctgttacgagtttttttgaatgcttgtttccgagttcatagattgcatggtataggttattaatagcatacatgttcatcctacagtagtaagaaaataatgacagataaaggaaattacgtcacatattattggttcttatttgacttttcagcattttcccgttgttgttttattttagggtaaattgcaggccacacctgttgaccatgttttatttccatggattgtcaaaatcaaatgtggttttcaccatttatcttttcgcctgcaaaatgacgcttctgcccttgcgcttctctcttagtaactgttgaaatgtacggtttagtttagcaggtttagttacgtacactgttccggttcagttgaagattttttgtttcacgttgacgcgattcggttccgttacaagtgagattatttccattattccgaagtgacatcaacatttaatgcccccaaaaagtttagacgtgactattgtcacaattaatgcaaaatcatcattacatcaaataatattaaaaaaattattgataataattaataaaaaaattgttgagataaagaagatgaacccaggaacaaagaattattgagaacgtacattgctgctgaagaagtgttgatcttgtttttgtaccaagtttggagccaaaacaagcattgttcgtgtaagtaatgaagttcttttaagaagttttttgttatgtcatattaggatcttgattgtgttcgaactccatttttttatcagaaaatttgcaaaatctatatttgtttgtttaaaatagtcaaatgataattggtatttaggtttataaatgtgtagtatcgacattccatttgtttttttatatgtatagtatttttcagttgcatttaatgtgtgtctcctgaatttatgatgcaggtgggttatggatattcccgtatttactatggtcggtgagtggaaatgcaaagaaggagaatggaaatttgaacctgaggaaggcatctttggtcgttgtgtacgagttcaggaaaccatg

SEQ ID NO: 20881 - DNA, 3003 bp, Unknown
  misc_feature (1)..( 3003): 2750-1469P.txt file - cDNA_ID_1829692; gDNA_ID_1620837; Annot_ID_50819
tagtgagtcttggagatttggtcttcattccaccaccatgtgggctttgtgtagatttctcggtggtgaccggggatgatggtaggtcgtcgggaatgttgtcgtggtggtgatgattggtcgtacgaaaacatccggcgatgcaaaaccttgatttgagtttcttttgtagagacaagttggtcattgtttcgcttcccattttttttttacaaaaccaatgtttgttggttagatcaacaaaggaatgcaaaagagaaggaagacattgaaagaaagatcaaatctgtattagaggaaagaaaaacaaaacagaaaacaagtgatcgacgagatatttggttgattttcatttattattttttcttgaaatgaactgtttaaccaaaacttcggaggagaagttgaaattctttactattttaggaatatttgaatttccaattaaaatgaggttcaattttgtttcacgttaaatattaatgagtcttttgactttgtgagcaaggggggacatatttagggtaggaaaaataatatttatagtaatttattaaattagttaagattataaagttaaaaggataatatgaaaattttggaccaattttgatttgtgaatatagtaacggcatagctaaagcctaaaaacatttaatattaaaagacctcattggattttattttctcgactgtcacatttttgttttggcagaggtcttttatccatgtaactctattcagtatccacaaacagttttggaggatcaatatgggccttagaaatgaattaagatcatacttcactagagaatgtgcactcaaagaatgtgttgcgaggtttcatcgttaaatttgcattaaaggtaaggaacttgaagatcccatagcaaaattccatctctttggtgaagtcgttgtctagttgtcaccgaagctataaaggcatacttggaaatccttcatttgaaccaaattatttgctgccaggctgccagcagtgcctgtcttgtgaaaaatgaggctcaaaataactttttttttatgggtttatagaagaattttttttttttgagaccaaatcttaaaatgttatgaaaatgaaacctatgtattcaatagaaaatagataaaaattaaaaattgagactaaatctaaaaaatttagaaaatgaggcaacaaatatttttgaggtataattttgatactaaaaaccttaaaacttttggtggctcaatacccatgtttcttagaaatatgtcatgggccgggcctgactgccagtcaatggaaggaccatgagggtgtagataatgctatatatttgagattgtaaatatagctgataaactatatttacaacgaaaaatatttaaattctgacttagttaatgtaagtttaggcataatggaaacttttgtttataaatacgataaaataagccgtgggaaaatcgttttcgcactttcgctttaaacttttactcataattggtttgaaatttaaatcaatgaaaaaactaagttaaaactttaaattgcttcaaccttagttggttttttgtaagttcttcttatttttttcttgtttatgttagatatgatttttcatcaataaaagtagacgttaaaaaaaaaaaattacaaatcatttatataaaattgttgcattttcgaaagaatttttttatagtttccatttgatttttgtttctagaagtgtaataagaaaataaatccacttttaagttttgatgaattggataaccggtttgaacgaaacctggttttgatgaaatttttcccgacactgtaacacgataattagatttgttgagttataacattacgtgtcgaattttaattggatgtcctgcgtggccgtcttattagtcacatcaccgcagctaataacactcgacgagcgacctcatcgtctacatcgccgtcgcctgttaccgtccggtgctattctccttcacaatctcacatttttcgtaccggttagaagatgagaatcacgcagatcttgttatgtctggtaatagtggcattgtcttcaagctcccatgtctggtccgatcagatcttcccagctcatctaggtctatatcatttcctctcttctcataattttccgatcaatttcgagttttgtcttgattcaatgttttatgtatagttggaacattcagcagaaacaatcgtgaaccaaagtacaagattgagttccttcctgaagattcaccttttcacccggtaataacgcaatcttaagatagatttcaaaaagcttaatttttgcactaattgaatattaatagtagagattctctgtgattttggtgtttgatctctaatattgttattagtcacactttagatagatttgaagcttacgttttctctatgacatgatttactatgagtagagatagttgtaacatagagattgtcactaacagggttagaatctggaatctatggttatggtggattagattagcttttttaaatcacaatttagattgatttgaagcttatttttgccatgtgacctgagttacaatgattagtgatagttgtaacatagagatcctccgttgttttggtgttttttattctctaatattgttgtttatatggtggtaatctggaatctgtggttacgatggataagagtatagtagttttgaaacttattttgcactttgatcttaagttacaatgagtagagatagttttaagttagagatcctctgtggttttggtgtttagattctctagtattgttttgtatagggtgagaatctggaatctattgttatggtcgataagtgttggcttttttttttatcacaagctattgatttaaagcttatttttcactttgacatgagttacattgagtagagatagttgtaacatagagatccctctatgattttggcgttttggttcgctaatattggcttttatagggtgataatctggaatcaatg

SEQ ID NO: 20882 - DNA, 3000 bp, Unknown; identical to SEQ ID NO: 2576
  misc_feature (1)..( 3000): 2750-1469P.txt file - cDNA_ID_1829711; gDNA_ID_1620838; Annot_ID_50837

SEQ ID NO: 20883 - DNA, 3003 bp, Unknown
  misc_feature (1)..( 3003): 2750-1469P.txt file - cDNA_ID_1829731; gDNA_ID_1620839; Annot_ID_50853
ccaatacagcctgtgaacttcaaaccctaaattatttcataatttattttattttatttttttggaataatctattttgtttaacattattatttattcacaagtcttacccaattcaatgattacaattgttaattagtttgttaaaattgtcggcaaaggatacataaggttttctggtttgcaatagcaaataaagaaagaaatatcgttgaattttagtattttgttatatatcaaaggagaaaagaatattgaaaaacagtttggtataagattagtgattgtattttaagaatatttaatttaatgttggtgtagatgtataatgttaaaggaaaagttttaaaataatagattgcaagtttgtaagataaatctatgtgacaaatgagatgtaaaaggtgaaacatatattttatgtcataaagttcaaaaaggattataaaagaaaaatacttgggttaactgtttaccctcttaattttagccaatcaggatttatcatctaataataaaaataataatttatttaattaaaaattttaattttttattaaaacgaaattatgtatcggtttgggtttattagaaagggttagactttaaattttatgataaaacaatgttaaatatcggtttgggtttataaacggatttaaattttataattacacaaagttaaatgttggtctgggtttagaaaatacgattaaggtttagattttttacgattaaacgagtttaaatggtagtttgggtttacaaaagagaattatggtttagattttgtaattaaacgggattatatatcggtttgggtttataaaaaaatggttagagattagatttaataattaaataagtttagtgggttttaataaatttatttatttatttaatattaattgttttaatttatttaattagatgacatgataaattttaattggttaattaagagaaggtgaatgaaagaggttcacccctagggctgaaataaagagtcataaaatgtttcaacctattctgctatgaaaaaattcaccctttttaaagatttatgttttattccatagaaaatagaatgaagatcctatacttggtttgagagacttgtattccataagaatgagaatgaggatggttttggagttattgatcatttttggtaaagatttgccaaaaacaagatgggtaatttgtttggttgtagatcccaattggggattatcacatgtgtaattgaggaaaggagaggcagatccatattccatagggatgtcattgcttcatatggtgttttggtgaccaaatcgttggctatgtctcaatgaaggtcaaatactatattgttcgttgtattactaagacaaaggtatattatataaaaaaattatgtgatttttttaatcaaccaaagagactcaaatttcttatgagattttctaattagaagtagtcattttttatatctttgcaggataatgtctttggattattcattctctcagttctactcggttgtgactagttgagctttcagtttaagttttctatggttatggtatattggaaattgtctgtttgtttgttcttttaagcttatatttttttgttcaggttcgacgccaactgtttctctgagattgtttgcgggttttgatggttttgaatttaagatttacttattagattcttttgtcatttacttcatttttctcttactttgcttctttttaagacttagttttcaccagcttagttttaaaaaagtttcaacttttatcggtttcgtgtattagaatcgtattctatcttgtattctacttttcttttaatatagtggaaatgttttttgtcggcaacagctatataaatctacttttgcttttaaggtcgactgtattagcaataaattaacgaaaaaagaatattgaaaacatttttggtacaatattatttaaagtattttaagaacattttatttaatattaacttaatgtctataacaacaatttaaatgttaaagataagttttaaagtaacagattacttgcatgaaaaaataatctatgtgaccaattagatgtaaaaaatgacacatattaaataatttttcataaagtttgaaaaatattataacatgtttcaacctaatttggtatgacaaaattcatctactattttatagtttcataaagttttttaaaatacacccattttacttttgtaaataatgtttttcttaatctactatttacatttaaaaaaatatttctcattcattataatcgtttttttttttttttgaagatgtatcatctttgacatgatattgttttatatgtagctacatgaaggcatcaatatgttgtagtatggtatctctaaccaatggttgtggacttgtggtgcaactgcctttcacaatttcaacaacagaagttaaaatgatttttttttgaaagaaaaagttaaaatgatcttctacttttcattttacctggtggataatttaacactaaagattgaaaaaataaaaatctatttaaattttcggtgatggatttatcgatagatttctaaataacaatgattaacgagatttagttcaataattatcaacaaggtggaagaaaaatagtgtttaaggagggtgagaatgagattgagactagtacatccaaaatatgaaaataaatatctctataactatatccatacctccaatgatccaaacatggccagaagcccagaatcagaataataaaagccatacaatggacctaaataaacatagcccaataacggcccactaaaatctgatattttacatcaacttgagtggtagaaataaataaagatagggcagaagcagagaagcaaaatcgtggaaggttacaaagcctttcaaaaacctcactctctcaactctcaaaccttatctccttccttctcttctcctctcctctccgtcgagcttactatctccacaaaatg

SEQ ID NO: 20884 - DNA, 3000 bp, Unknown; identical to SEQ ID NO: 6048
  misc_feature (1)..( 3000): 2750-1469P.txt file - cDNA_ID_1829733; gDNA_ID_1620839; Annot_ID_50852

SEQ ID NO: 20885 - DNA, 3000 bp, Unknown; identical to SEQ ID NO: 6047
  misc_feature (1)..( 3000): 2750-1469P.txt file - cDNA_ID_1829737; gDNA_ID_1620839; Annot_ID_50851

SEQ ID NO: 20886 - DNA, 3003 bp, Unknown
  misc_feature (1)..( 3003): 2750-1469P.txt file - cDNA_ID_1829741; gDNA_ID_1620839; Annot_ID_50850
ctgattagtaaattaattggtaactctacggctttccaaatggattgtaagacaactcccgattagtggtacttaaaacattttcatgctttccacctacatcttgttattatcaatttattgtccatagcctgccacaaactcttaacacatgtccacaaatgaatagaaatatatgtacactttagggaaaccttatatgcctagttgcctccgaagtgattcccaatatactggatcacagggtaccaaatgcttgctcaggcagtataaaccagccatcagcaataaagtctcctctctgcatgcttttggatggtactcctccgataacattgttagcgttaggctgttctctctatcccgggcttccaacctttcggttcacatggctggaggtgtcataggcacaagaatctgaatatccggtgaacatacagctgtgagcaggagactatcttacgtacatagaaccaagttcctccatttttaagattcctgggatcaatataacactctactttgtgtttcacatgtttctagatatgcatcgatcatttggtgtttatgaactgtttcttacttgctataggaaatcccagagagtaccactaaaggagcagcaaataagaaaaccaaaggagctggtggaaggaagaagaagtaaatcacagtcctagtttataagctagtacgctttctgcagaaaagatctcaagagaagatcaataaactgtgatggtatttcctaggtctaagtagtctgtttgctttttgtttttaccatgtttctgtaatggtagtttagtcttttactttctcgatggtagaatattaagtcaggtctgaacttcatttgcatcattatgatttctgtgaaagttcatgagttgtcttttgacaagggaaatgcttgtgcttgtgttttcatgtgctaattgtagaattcaatatgatggaaaagctagacaccaggctaaattatgtattttctattgatattacttggttcaagaggagccaataacaaagctttcatcacatagtaagataaatgaaacataatcacataagaaattttgtatggactaaaagattgcagtattttacatgaagattaagagatggagacaggattcaaacaatggtgcagccacttccgctttcataggtattaactgataccatgtcacggggggtgtagtagcagtaaggaatgaaacaagggtccttcttagggtctggttttgggtctggttttttcggtggtccgacgctgattactactggtttcttattgatcttcttaagctgttctgctacgcagaccggatccatagtacccaccacggttagtatactcttctcttgatccagtgaaactatattcacacctgcatttcaaacctctcatcttttagtcgcatctctcatatatacacaatatgtaacatcgtttttataaaaaaaatcataccttctagctctgtgacagcttccatgattgcatgtttgcatttctcacaatcgatatccactttgatctcgattttctgcacacaatcgaatgattcaagaaacgaaaaactcgaattcttttccgtataagtagtagcatgagcatgtttttaccttagtcgtcatgatggagagattaacaaggattatgggatttagatatgaatagaggagaagaaattagaaacatataaataggagagatttgatgaaagaagcacttgagttgtttcttattgtcttcatttctcaacatcttcattaaataaaagcgacttgacttcgtttaagtctttctcccaaactgttgcgtcaacgagcttactctagttatattttatgtagtctatacattttgtctacacttatattaatatagttacatattatatttgggtttttacatagttgataatatatatctaaatatcgattcaagctgaacttgggacttttgtgagtttatccatgagggtatttgttagtcataagtcttaaaccatttgttcacttgttcatctatttaacatattatatgttgtgtacttgttaatgacagtgacattttagcggacaatctctgtcgacccagaaaccaaatctcaagtcaccaaatctccccggtttggttacaaatgtaaaattcaataggaatgcgacttcggttctccgggtcggttagttcggttatcgccaacaaaattatacagatgtcgatattaacctaaaataaattcggttcgatccggtttccggttaatttgttaattcagttatgttttgactaaattctgggttttgggttaaattcagtttggtttggttcggctattgctgaaaacggtctaaattttgtgaaaaccggtttaattttggtataatccattttcttaagtatctgagaaatagataggttcgacctgaccctaaccaaaattaaagtcctgtcgatcggttcagccgaaagaaccgaaaccgatccaaaacacgaaatctcggttcggtcttgtttggttttctcagttcggttatttatccaagcctcaagtaaaatgagagtttgtattagatttgagtcgtttggccaaaaacaaaacaaagctagctgagttataacgaaattacaagccaacatctagtttctattttattaatccatacaacgatttttttgtggccacgtttaatttaggagagtttcctcgtacggtactaaagccaaatagattagatgagatgtctcaattcaccaataaacaactcttgttaatcaccaacaattaaaatttaaaaacctaattttggctaaattaagaattaaactccacctctcacaattggcctaataataaacattgtaaagcatcctcggtgtttataagaataccaaattcaaggcatttttattgtgaatttattagtaatttataaattcatcaaaaacaaactcttttcagaaaaaaaataacaacaacaacaataatg

SEQ ID NO: 20887 - DNA, 3003 bp, Unknown
  misc_feature (1)..( 3003): 2750-1469P.txt file - cDNA_ID_1829745; gDNA_ID_1620839; Annot_ID_50849
cattgctcttgactctttctaagaactgggaatggagaaagaatggttaaaagttttagaaaaggatataatacaaatgcagaaactggtaatgtgttagtgaaagaatagatctttgtgttcagcttttaatgagaagaagaagaagaagaagaaagagacagaggcaagagcagagcagagaagtgaagtgaagaagactgttttaaaaaagagattttatggctggattcacgtttggaatctcattacctcgattgtcttaattaattatacttaaaagttacaattacactaatctttaattaaagaaaatagtagtagtactactaaactactaattataactaatttagcattcgtcgtaaaacaaggagaccatctttttgtttggtttcatacttgaaacacacatcaacatacacaagaggtaactatataaattgtgatatctacctatgatttttcattattgatgtttatgatattttctaaatcacgcattggaaaaaatcattatcaaaaacaatattaatatatattatttatctgtgatttttttatccccgacacctaccaatctatctaatggtttccaggatgcaataaaatcatgagcgataattacggaagtggtaatcatgtaatttggatttaaaacattcttttaagatatttcaacacatactatcattgtttggattgagtctaaagtaatcaaggatgtcaaattaatacacaaccatatagtttgtcaaagagtggcaaataaaatttaaaatatttaaggaattctgtaccaatagatcctgcacaaggaatatagatctcttacttaatttgaatcattcttttcaaaattagtaattgttgtaagaaaaaatataggattattctcgtttccttgtccaggataagtttaggccaataaatccaaaactctttgactaaccaaaataattgtcataatttatcggtttgaaactaatggctgagagaggaagaagaaagagagtggtggggctgtttgtaaatccgatgcacatgttacgctcttacaaaataaacactcccaaaccggtacggtgctatctatcgtccactaaactatgtacttttaatcactggatttattaataatttaatatttacatcttcattcaatttgatgcatccaagtttttatttaaacttctaagtaaactattaaaattcaaaaaaaaaaaactagtaaactactattttaccattgaacaggtgatttccaaaaacaattcgcattttatctaaaatgtaaagttttgtttgattgttttttgtttttttttttaatattaagaggttttggagcgaaacctataatctttctagaaccgaaactcgtaatcttcccaagcccaaaatcacagtatgtaatattaattttgtctcaaacgttattcgaaccgatgacctttaagcttcgcgtaggatctttaccaattgagctaactaccttcgatagttttgtttgtttattatatacaatctattttctatatatatatacatataatccttgcaatgtttggaacattaataggatgctacataaagttgaaagttttggggaattaattgtaaacttgggatgaaggtgttaactaaggacatatcgttgtatttttccgtggtgcgtaatgaatatatgtacgtttctccacaaaatcctgtcggtgaacgtctttttttagcgtaactatatttaaatgatcacgtaccaccaccgtttcttatacttacacaatgattatatttgttgtagatatcaataatgttgacgtttaaaaataaaataaaacccacgtatcacaccattcaccaccattacgttctttgttttttactccttgacccattcgattcccatgcacgaataatgaaacctcccatatttataaaatcaaaatgattttttggcaactcaagtacagtttcgtttgctagatctacatgatttataatcaagtacacactttctctttagatttcaatatctaccttcttcttttttaactaatgaaccatcccacaccgtggtaggatgagaaaaccaagaacaaattacgatgccaactatatgttttcttttttttgttatgaatgttaatatcattgaaataataaaatgaaagtgaaagatattacggagaacattacctaaaatattataattttggtaaaaataataaaaacaagatcacgatacgatagttagttttttttttttttttaatataatatcaaattagatttaaaagaaaaaatacgtttttacaacttgtgctaagtttgtttgaaaagtaaactctaaaaacttctgaaaattttaaagctttctaagaatcagtgataactagtctcgagagtaaatctagtgttggtaagcatcgttataacgcatgtcgcctaagagagtcggattgctgaaatctgatttcgaatttctttatcaacccatagtcaggtttgatgagaactatatgttttttgaaggcttcagatccaaatcggatcttagaatggatttgtctccagcaaaaaagacatcactgtattggtagggaaataaaatgccaaaagaatagcatacccttacatataacgaaactcagaacatttatatgggctacattgaacattctctctctcaacttataactttatagctccaaaaagtatatagtcatataagatgcatcttaaaagagagtttcgattccactaacatttctttggactatgactcatgggccttaactatatgatgggccttaacaacctgatgggctcattaggtttaaaggcctcataaagttaatcagactctagcgcccacacgtgttgaggaggcgggaaaacaattatcatcgccggcgtgaggagaccaaattggcaaagttccctgagagagagagagagacaacaccttcgcattcgctaactttctctgtaaccgccatg

SEQ ID NO: 20888 - DNA, 3000 bp, Unknown; identical to SEQ ID NO: 6045
  misc_feature (1)..( 3000): 2750-1469P.txt file - cDNA_ID_1829749; gDNA_ID_1620839; Annot_ID_50848

SEQ ID NO: 20889 - DNA, 3003 bp, Unknown
  misc_feature (1)..( 3003): 2750-1469P.txt file - cDNA_ID_1829753; gDNA_ID_1620839; Annot_ID_50847
acaaaatgatgctctcttactttagtttcgccctcttttattcgtcctcatttttccctttcattgacgtcgtttgtttgttttttactaactatttttatgagttttcgaaaacaagtaactaattcattgacatgcatgttatttttgaatgttatttactttaatagtagtacattattaacaattaaattaagaaataaggtacaagtcaacatgcattgttaagtaaattattttctccctctctcacttttaaccttaaaactgcaacaatgatttaaacaaagaacataaactttaggacaaacaatcataggtttaaaatacatgaaatatcattgatcgatgaactttcttaaaatctttaaggacgctctaaccctcggaaagaaagggagtttaccaccctttcccaacctccacgtccacttatccaatctggttgatcagcgtgtatccaaacattagatcatacggaacaactcaacactatctagtaatatattttttctaaagtttatgatcaattataacccaaagagttacggatacaaatcctagtattttgatacattattgtcaatgataatttgcatataaatgcattgcattgagtctacaacgtaactactttttcctcctaacaaaatgcatgattaatttacagctcatttctagtaatggcaccaatttgaacgatattagccaaaccattggaccaaattgatggccaagcatttgatctacttttgtctttttcttggtttttatagctattgatctttcaccacttcgttcatttcgaaaaatagtcctctcaacaggaccttggaagaggcaagtcctactctcatgaacatggcttctcgaagataaaaccaaagtcaatgtcaacctctctccaacttgaaaattttaaatgctcaatcatttgaaaggcggcgaattcttttgtatttcccattacaaactatacaaaaacatcaccgtgactatataattttctatgcacataaaaacatttaacttatgccaatatatactttttagtttttacaaccaattttagtccactttcgactacgcaaagatgattttataaaacttgaaaatgacagaattaagaggttggcatcggctaattgattgcatgttataaaaatataactggatgactttctcattacagttttttttatcgacggctaattcgattttatccactgcatttagtttcttataagttctttactgcatatatatatacgtaatatatgtatattataatttttctttcttcctctactcgtcctaataattttgatgaaatggttttgtatttaaaaaatatactaattatattttcaggatacaacgacatttgggtagtgtaaatgcaaaataccaaaacaaatatatactatatgttatacaaaaattgtttaaacatgtaaaaaatgatatgcataagacaaaatcccattttaattgaaaatataatatatcattcgtgacgcagctgacgctattattaaaattgaggtgatgatctatgagattttttcctcttacaacaaatatgtcaaaggagacaagccagttgtatatacaagggattgagtgttttttccgttgtaatgatattcttcaattatgctattgtttgtatgatttcttaagactcgacttaagctagtagctttatataaataaaatagctttgttgtaaactaatcatcatgaaatttcaaataacaaaaaaaaactaatcatcatgattgtatttttaaaaaggaaactctctttcctataatacgataataatgagaacgcatctcctatcataatatacgtttctaaacacttattgttgttctcgtgtagaagcatgctcgaaattaatcaaaattatctttgtttttgttttgtttcacgttagactagcctcatcgatgtaagattaatgaaagattacccgttacaagtcggtaactagtaacattagtgtgtatataaataagaatattagtggttacgcgaccaaattattgcatagtggaaacatttaaggctatttttccaccattactttgcgtacttgaattgaagaactctttacattctcagcacatcaaggtgtctcctttgagatcaaaaaagtaggaaaaataaaacgaaaaagtactataaatattaatttcgtttacgaacaaaaaagtattaaaattccgtagacatttttggggggacaataattttagactcgtacaatgctttcatggaaatgagtttgttgttgaccgatggcttccctttatttttctttccacttttttattactaattaggaaactagtaatatttatactcgatgtataattcactaatcatatactttccaaaacgtagcaaataattcgactagaatatattgtccgtgaattaagtttcctcttttctttttttatgttaaccatcatgtttctgttatttgttgattttaataaccatactattttatacttttttaaaaataattgaaaataaattcagattacaagtctacgataatgattcttcttctttttcattgtagataaatttcttaaaagttgactacttttctgtcagtatatgtcacatttttctatctatcgttcgagaaaaaaaaaagaaaaaaaaaagtttacaagtgttacctctaaagtcttaaccaccatttctttctattttgtaaaggaatcaaatagttatttactatgtttgagttcatctcttgagttttctgaataaggtggtcccataaaaggtatcaattaattcacccaacgattataaaacaaaagtgtttacaccagaatatcgccaatcatagtttctctcattttataataattttctccatcttcttccttcctcttcaagcttatagaacctccaagaaccataaaactctctctgcaacaatctatactttcttcattacttttataaaaaatg

SEQ ID NO: 20890 - DNA, 3000 bp, Unknown; identical to SEQ ID NO: 9527
  misc_feature (1)..( 3000): 2750-1469P.txt file - cDNA_ID_1829785; gDNA_ID_2926139; Annot_ID_197355

SEQ ID NO: 20891 - DNA, 3000 bp, Unknown; identical to SEQ ID NO: 9527
  misc_feature (1)..( 3000): 2750-1469P.txt file - cDNA_ID_1829785; gDNA_ID_2926139; Annot_ID_138958

SEQ ID NO: 20892 - DNA, 3000 bp, Unknown; identical to SEQ ID NO: 9527
  misc_feature (1)..( 3000): 2750-1469P.txt file - cDNA_ID_1829785; gDNA_ID_1972140; Annot_ID_179274

SEQ ID NO: 20893 - DNA, 3000 bp, Unknown; identical to SEQ ID NO: 9529
  misc_feature (1)..( 3000): 2750-1469P.txt file - cDNA_ID_1829842; gDNA_ID_2926139; Annot_ID_138941

SEQ ID NO: 20894 - DNA, 3003 bp, Unknown
  misc_feature (1)..( 3003): 2750-1469P.txt file - cDNA_ID_1829882; gDNA_ID_2926131; Annot_ID_138746
ctcagaaatgcttatatatgttcgggttagttcggatggggttcgattatcgggtaataaccgattgggtacgggtaaccaaagacatgaaatctataaaccgatcgggttattaatagaatccatacccgtactgaaccccttaattcgggtcgggttcgggttcggggatcgggtatgggtaatgtgcccagtcctattctcaattatagatgtggagaaaccttattggaattatcctcataatatatttttggagtcccagtcaagaatgtcactgaaccagaaatttgaatccggcatgccactttttgatctgtatgccactttatatgtgttattcctattttacccttaatgaataattttttatttaatttcaaaaataaaataaaaataagaaaaacataaatattctatatataaaccctacaaaaacgttggatttaatttagtgactgtatttactcaacatatggaccccactaaaaaatattttatctttttgcggtagaagatactcgtagttataccgttgtaccatcgtattcatagttgaactttccacaattttcataatttacagttgaattagaaggtaaataattaattataagttgaacgcacactttttctctattattttgtatttccaaagttttcataatatgacatcggtgaaaacttggttttttacctattttacttcatataaggtgctcatagactaaatgtttcttatattagaaggggtgttttatatgaaaacaaaattggattttagaaaatattaaattttattgcattgatctaaaattatttatttataatttgggatattcgtatataattttacatgtataataaattatcaattttacaaatttaatcattttaacgttatttagttgaactagttgaactaattatattaaatgttaccacgaaaaccaaagaaagacatttgaactagctcaactaaataaattaaaaagtaccacgaacacaaatacatatatgtttttaatctaatccaataagttgaactagttgaattgttcatacaaatccgagaaatacaaattcaaaatacatgaattaattttttcatgtgcaacaaattgttcaagtgtatcccaggcatagtcttgttcttcctcttacgacgcttttctctggttgatggaaaccagtttttttttttttttaaccattttttggtgtataaattcaattggctctgtcgactcgggaaaaaccatctctggtcggctcatccatttcggcagccgtcgattctcaggtgatgtgtcttcctccatcgatattgttggatcgaaatctagatcgatatctcgatatttactttgtccactctggaaacgttcctcctttagagataccatctccggtcgactcatatatttcatcggtcgctttttcttccgtcgcaacgtcttcttttctttacaagcgctttgtttgttctactctgtctatagatctcgattgaagaaagtgaatgaacgaaacaaaaatggctgtttagatatttgcaatggtagtcagtacaatgtagtaactgaatcgcgttgctccccaaaccaatccattgttgcataataaaatggtataactgaaattggttcaattgatctagttcaaatggttcaactgatctagttcaaatagttcaactgatctagttcatctggttcaatcgaacgagttcaacttatatagttcaaattgttcaattgaataagttccaatcgatttttcgggcgtatgatatgagtaaatttggaaaatgccttttttatgagtttttatttgaaaaatactatatcctactttatatataaaattaataaaataacctcattataatttaatataattaaaactttaaacagaaaaaatccataagttaatatttgatttaactataatttaaaagataattcttatcttaaatattttaaacaaaattttgtccaaaataatatatataaactatatttatttcaaaactatatttatttcaaactatatgtattaagtgataaactttaaaataatatatataaactatatttattaagtgataaactttaaaatatatttagatattaaattgttaaattttaatataaatagataaataaactatatttatttcaaaaataattaaaaatgttatcaacaactaaaacatatttcgaataatacatacatttcgaatttatcaatagagatttttaaaaaaaaatctattacttatatttcaaaatttatttaattttaatttttttcttctaaatatgaatcctgtttttatttattaagaataatgcttttaaatttggataaaactgttactttacatattaaaaatatagtattatttgggccaagttaattattttattgtacttgggtcggattattttagttggatctgtatattttaattttttaaaaagttatttggatatttacatcagttttaattataaaaaaaaataaaattataaagaataagtggcattcgtgattattattttggagaaagtgacattcctgccatttattcaaatttttgtggcaagtgaagcgacaggtaaagtaaaaccgacgccgttttaaaagccagtgcctttacgctatccgttgaaaagggaatacaaagtctcgatttttttttccgatacttgaacggccagattttaaggttcctgtcatgtctgattgcgaaatcgcttttttcttcttcctgagttcctttttttctccgatgaaattttaaccgtgatgatgatgatcataatgaaacagatatgagcaagaaaaatctagcgattctgttgcgtgctagaatgagatccaacaatccctccaaattttccctctctcaatttcctgtaagcttttctttttctctgtttgaattttttggataattttgcgattctgtccaaattcacacaatttgtaatcatg

SEQ ID NO: 20895 - DNA, 3000 bp, Unknown; identical to SEQ ID NO: 6065
  misc_feature (1)..( 3000): 2750-1469P.txt file - cDNA_ID_1829882; gDNA_ID_1620841; Annot_ID_50889

SEQ ID NO: 20896 - DNA, 3003 bp, Unknown
  misc_feature (1)..( 3003): 2750-1469P.txt file - cDNA_ID_1829886; gDNA_ID_2926131; Annot_ID_196920
atttacaagaaatgttattgacatttattattatcaaataattaatattcttaattattagcatttacttatctaatatatatccatcaattctaattacttttaaaaaggaaaaatgttaggattttattaacattataatttattaaagataaataatatagttatttaaaatttataaaatatttaggatatttaccgaaaaatgtttagaatatatataatatatgaaatgtattaaattaaataaccatttcaaaagaaaactttaaattgaattgaattataaatcttttaataaaaatattattagaacaaaaaaaaaaaaataatgtttaatttaccgaactagattagatggagagacggatgtagaatattataatgtatgacttttacaacaattaaataaccatttgaaagaagatttttaaattaatttgaattatatatcttttaaattaaagtattattaaaataaaataacaaaaacaaaatgtttaatttcagtgaacgagtttagatggtaggacagatttgggtcgattgtaatacgagatgatataccaagagtgaaatctattagatatgtttagtttcagtgaacgagattacatggtaggacgagtttgagttgatagtaatacgagacgttataccatgggtgaaatcctagatataacaatcaaaatataattatattatcttaaaaacttaacaaaataaatattattaataaaataaacataattaaaatttaaattatttaataataatctagattttaacttaatgaactgtacattattgttcctatatttttaaacagtaaaaatcaaacatagtaagagttatacattcagaaaatacaaaacattaaaggcaaaaatgcttaaaaaatcccaaacaaattttaatttggaagtttaatactcaatacttttggattgaaataaaaatacatcacttaataaattgttgccaaataaaacactgtattttaattattggtcgaatcggacatataagttaacagccgttaacaggcttaacaaattaaatttttatttgtaaaaaaccaaaatagtcccgcgatattcagcggattaaaatctagtttcttgtaaatattcaattcaaacccccaaaaaatacttaatttctttcaaaaatgatttttcaacatcttaaatgtgtttccactctcaaaaactatcgctgatccactaaatttcatatccatccaaatccaagttttacttttacttaaaagcgtaatttactaaaattggtgactcccactcccacatttgatcttaaacagctttatattctcaactttcccctttccataatttaaaaatagatcttcttttacattgagaatcagcatgattggagatggctagtgggcataaaatgttaggaatagaccacataaataaagcataaatcatataattataacaataccttttattggtaattggcatacactttcaagtttatatttggattatttcattagcttttttaaaattaaaatgtagaaaaccacttcctacaattagaagaattttattttaaaatctacgacaaaagaaaatatgttccttttcaatcattctacttaaatctttaggaccaggtttaaacaaacttcatgtcggtatgtctctcattgtcaagatctgaagatttgttttttttttttttgaaagaaagaaagaaagagacaaaacttcaataatttacattttttattctagatgaataaggagtgaaaattcgggtaagcgggtcgggttcagataaaatttgatcggatacggattcttcggttaaaaatgtttaggacccaataggataaatctaaaatattggttcgattttggttcaggtccaattggatttgggttggttcgatatagattttcaggtctttttttaaaccgatactcgaattttcgggtaaataccagaactttcggataaaatttcggatttttgattaaatttaaattttcgaataaaaattcgggtatatttggattcggatcggattcgaattcgattttttggataaagaaatttagaagtcaataaaataaaccttccggttgatttaagttcagataattagattttttggataaagaaatttagaagtcaataaaataaaccttccggttgatttaggttcagataatcagttccggttttttttggccaggcctactgatgaactgttattttggtaacttctaaatatcaaaacggtcctgaatcaggactgataaaacgttaaaaaagaaaaaaaaaagatctactcgtcttctttgtttgttcgttacagtttttacaaaaaccgacagacactttatctcaagagactgggtcaggcctctgttcaatctctatcaaaatccctttcgacatcattcataaacactgacgaatcagtgaaacaatatctcaaacccagaaaccaacaataattcatagattactactatacaaaattctatataactataatctgttctcttgtgtgtttctcgcgtggcttgcgtgttacttcattcatcactgctttagcttctcctcatatgaatctcgaggcaatccagtcactgacttttctcactccccatctctagggtttctctctttcccttattttataatttatttcattgaatctctgaatttcattctcttttgtggagtacatttgtgtaaagcttagatttttatttgggtttcaagcaaaccgagaaaagaaacgattagatctcctttttctgggtttgttctcaaagatttgttctgtttcagttcttccaatttggggggattttatgttggatccagtctctaaaggttcgattttgatgtgtttccttgatatgtaatcagatttgaatcttaaagtttctatctttatgactcctttcaggttaaaactgtgagcatttggagtagcaaaagtaacaaagcatg

SEQ ID NO: 20897 - DNA, 3003 bp, Unknown; identical to SEQ ID NO: 20896
  misc_feature (1)..( 3003): 2750-1469P.txt file - cDNA_ID_1829886; gDNA_ID_2926131; Annot_ID_138748

SEQ ID NO: 20898 - DNA, 3000 bp, Unknown; identical to SEQ ID NO: 6058
  misc_feature (1)..( 3000): 2750-1469P.txt file - cDNA_ID_1829886; gDNA_ID_1620841; Annot_ID_50887

SEQ ID NO: 20899 - DNA, 3000 bp, Unknown; identical to SEQ ID NO: 6058
  misc_feature (1)..( 3000): 2750-1469P.txt file - cDNA_ID_1829886; gDNA_ID_1620841; Annot_ID_170053

SEQ ID NO: 20900 - DNA, 3003 bp, Unknown
  misc_feature (1)..( 3003): 2750-1469P.txt file - cDNA_ID_1829890; gDNA_ID_2926131; Annot_ID_138749
accattgaaggaattgagaaagttgcaccgttcttgaaagtcattatcgaaaagtgagttctcttgttctctaaaattgttccattcttcatgacattaaatatgaggaacattttgactaacagtggacctttttgttcacagagatttcataaaatcgctgatacaaggtttgctagccggtattgcgttgaagcttttcctcatctttctgccagccatactgatgaccatgtccaaatttgaaggctttacttcagtttcattcttagaaagacgatccgcgtctagatattacatctttaacttagtgaacgtctttcttggaagtgttatcgctggagctgcgtttgagcagcttaactctttcctcaatcaatcgcctaatcagtacgtgactctctatctctgttaatctttcgttctttttgggttacaggcttttctaaggactcttctttttaaaaatctgtgcagaatccctaagactattggcatggcgataccgatgaaagcaaccttctttatcacatatataatggttgatggttgggcaggagttgcaggagagattcttatgttgaaacctctcattatataccacctcaaaaacgcattcttggtgaaaacagagaaagacagagaggaagcaatgaacccgggaagcatcggtttcaacactggagagcctcagatacagctttacttccttcttggtcttgtctatgctcctgtgacaccaatgcttcttccttttatcttagtctttttcgctcttgcttatgtcgtataccgccatcaggtaaatgtagtttctttctctcctaaatttgatgaaactggctagtttgataacttgaaccttctgtttatttgttttcttattctcagatcataaatgtgtataatcaagagtatgagagcgctgctgcgttttggccggatgttcatggacgggttataacggcattgatcatatctcagttgcttctgatgggtttgttaggtacaaaacatgccgcttcagctgctccgtttctcattgctcttcctgtgattactatcggtttccaccgcttctgtaaaggccgtttcgaacctgcctttgtccgttaccccttacaggtcagtttcttctacgttatctagatttattatttctgtttagttcgatttttgtcactgtttggatcggttttacgagccccagaaatggcaaaatgttgattattttacaggaagctatgatgaaagatacattggaaagagcaagagagccaaatctgaacctgaaaggttacttgcaagacgcttatattcatccggtttttaaaggcggtgataatgatgacgacggtgacatgatcggaaaattggagaatgaagtcatcatagtgccaacaaaacgccaatcgcggaggaacactcctgcaccgagcagaatcagcggtgaatcgtctccatctttggccgttattaacggtaaagaagtctagtttaacggtttcaattcagtaaaagcatctgcatacgatttaagtatgaatatagttcgtgtatgtatgtacttttatgtgtacatagagaggtttgtgtttttgcttagacgttgttgatgggttttaattgttgaagtattgaagtttcagggtatttttagaataatatcattttaattgggtgtttttcaaacaatgaatttgtggcaatcttgccaaacaaaaatatacgaaatggtcgaatagttgaggcggttagggcggacaaattcatttgcgatttaaaccatttttgtgtacctttcataaactatataagccatgctagtgtaggttgaaaaagatagaacaagttgaactacagaccggttttacttaaagttagtccgtggtggtttattgtccgattcaaaaatagagtggtttagtcgattaacggattagtctgttttctcatgtcatccattgaaagccgaagagtttgtagaagtaaacaaaaagatataaacaataataaaacaagaattgcataattttgtattcaacagaaattataaaaaaacttatagaaagccacattacagtacaagaaatcattcttatatctaataataggagaagtacatgatttttcatcccaaaaaaaaaaaagaggtacatgatttacacctcgtcgatatcctaacgattaaaaaactgtaactactgattttactacagtatatatgtatcgacaacataacaatgtcgtgacttatatactgttgagctcctaagaaaaaaataacgctattattgatttcacaatagtagcaatctcaactccatagcgaatgacgtagagaaatgtaaccaagacattttttcagaaactatgatcgatatatttcaagaaaggtagacaaaaagtgagaggctattatgtgaatgaagtaaaaaagtagaactattgaggctaatttatagagaatgaattgtaaataagcaatgcgatgggctgcaaactcttctcgtaaatctgcaaatttattaagacagtgcacctaaatattaatgaagagagttaatgaatcaataaatttgaacatcgtgacttgttaagtttggtgagaggggaataaggaacgttctatatgtaaagcaatgataattaagagttaaggagttcatagttcatgtttttctctagtttggacttgagtccaaaatccaaattaatccaaaacaatgttgagcctaaactgtcccaagactcccaacaactcaggaagctcttgctgttttccttttaatcattgtgatattacattcttgatcgtcccacagggaaaatattttagccgttagaccaaatgataaaaaactgtaactgttgatgggaacggcgtcgtttcgctaaccttcgttttaactgatctcaattctcaaggttcaaaagagtacacacacacttatctcaattatccactgaaacattcgtctccggcgaaacaaaaccagaatg

SEQ ID NO: 20901 - DNA, 3000 bp, Unknown; identical to SEQ ID NO: 6055
  misc_feature (1)..( 3000): 2750-1469P.txt file - cDNA_ID_1829890; gDNA_ID_1620841; Annot_ID_50886

SEQ ID NO: 20902 - DNA, 3000 bp, Unknown
  misc_feature (1)..( 3000): 2750-1469P.txt file - cDNA_ID_1829917; gDNA_ID_1620842; Annot_ID_50911
agatcttacgaaaaaataaactagaaagatcttacaaacaaactagaaagaaaaaaaaatctctacatctaagaagatgaaaaaatgtgagatgacatagggaaccgtgacactctcttttccttttattattagtgtggtgttagaaccctttttcttcttttattaaaaaaaaacactagagcaaccttcaaaacactctcttttccttttattattagtgtggtgttagaaccctttttcttcttttattattagtgtctcgtgtttttcatttcacacagatattagtaccctcccacatttatctttaatcgtcatacactgtgattaaatttctagatgaacagcacaataaatgagttgtggggttatgggcaaaaaaaataaacgttggctggtgaaataaacttattttataaaaccacttgtttcctatttattttgaacatgttttttttttttttgcctctctctctctctacatatataacttcgttaccttaaacatccatcttcgaccatcaatgtcaatttctatcttatgccccctaggattcctgtcatacgtagctcttgggtcattatcattcgcaaacttcgttaccaatgatgatttacaaaccctaacaaaatttagcaaacaattcaattaagatgatatatatgaaaaaattacaatgtctaagaaaagagaatagaaaaaacctacgatgtcaaagaaaaattaatagaaagaggggataaattacccttcatcgccgatgacgaaaaccaatatattcattgtactatattcaggcgtttgaactaggatgagaggatgaagatttatcttgataagatgtttaaggactagaaagatcttaagaaaaactataaactaggaagatcttacaaataaactagaaagaaataaaatctctagatttaaaaagatgaaaaatgtgaggtgacatggggaaccgtgatagagcaaccttcaagacactctattttccttttattattggtgtggtattgtaacactttttcttcttttataattggtgtctcgtgattttcatttcacacagttaataatactttcccacatttatctttaatgtcacacattgtgattaattctctagatgaacaacacaataaatgagctgtagagttatgggcaaaaaaataaataaattttggttggtgagataaacttattttgtaaaaatcacttgtttcctatttattttgaacgtgtgtttgtatatttttctctctctctcttcaacatccatcttcgaccatcaatgtcaatttctctcttatgctccctagaatttctgtcatacgcagcccttgggccattaccatctcgacaaacttcgttatcaatgataatttaccaaccttaacaaaatcaaacaaataattcaattaaggtgacatatattaaaaaactacaatgtctaaaaaaaggagaaaagaaaaaactacgatgtcaaagaaaaaataatagaaagaatggataaattacacttcatcaccgatgacaaaaaccagtaaattgattgtactagaaagatcttacgaaacactataaattaaaaagatcttacaaacaaactagagagaaaaaaaaatctctagatctaaaagcatctccaacagaccctcaaaccctcaaatttgaggggtttttaactctaactccaacaacccttcaaaccctcatggcactattcacaccctcaaaatatttctcttatttcattttagtctttgtactttatattccttacaaataattctattaaagtcaactatttcaaatatattcatataaatttaaataaatgaaaattatttaaatataaaaaacaaatacaacaataatagtacactgagcatttcaacacaaattaaaattaacattacaatgataaataaatacataaacacacaaaataaattaacacttgaaaaaattacattaaaacataactaataaaaaattaaattcgtaatgcaatattaatattcaggtaaatttgatcctgaacctccaagatcaccaaaatattgtccataaacatttgatggaatcggaggttgttgttgttcttgatttcttttttgtatgattcttgcttgttcagatcgtataaattcacatgtattactatcatcaatatcgcttaaacgtgttagcaatattttattttccttccctatttcttttagagctaatttttttgcttgattttgcatacgcaattgagccatctcataatccttgcttctagttgatgcactttctttcaaaaaatcaagagagacatctcataacaagaagcatgccgaaaagatgttgaacgtgcgtttggagtcttacaatcgaagtttgctatcatagcatgatcgtcatgttactggaacaaagaagtattgcatgatataatgacagcttgcattataatgcataacataataattgaggatgaacatgatatcaatgcactgattagagattcaagattgatgccaccgccaacagttgaaacggggttaaatgaacagacaagatttcaacaatttttatcttataatctacagataaaaaataaagagactaatttatcactttgaaatgcattgagtgatcatatatgggagcattttggaaatatttatatagagtaattttgtaattttataaatcattttatgtttttttttatgttttttttttaatttatatataatattatattattatatggagttttttttttaaatcttgtttggcataattgtttctataatatatgtgttatatttatttgtgaaagttttatcactataactgattattgttaaaaattgaggattataatgtaaatacttcaaaaaattaaaataaatttgtgggtataccattggagtaagtgaccctcaaatcttcattttgagggtgtgccccctttaaaatgagggccattgttggagatg

SEQ ID NO: 20903 - DNA, 3003 bp, Unknown
  misc_feature (1)..( 3003): 2750-1469P.txt file - cDNA_ID_1829917; gDNA_ID_1620763; Annot_ID_50072
gagagatcttacgaaaaaataaactagaaagatcttacaaacaaactagaaagaaaaaaaaatctctacatctaagaagatgaaaaaatgtgagatgacatagggaaccgtgacactctcttttccttttattattagtgtggtgttagaaccctttttcttcttttattaaaaaaaaacactagagcaaccttcaaaacactctcttttccttttattattagtgtggtgttagaaccctttttcttcttttattattagtgtctcgtgtttttcatttcacacagatattagtaccctcccacatttatctttaatcgtcatacactgtgattaaatttctagatgaacagcacaataaatgagttgtggggttatgggcaaaaaaaataaacgttggctggtgaaataaacttattttataaaaccacttgtttcctatttattttgaacatgttttttttttttttgcctctctctctctctacatatataacttcgttaccttaaacatccatcttcgaccatcaatgtcaatttctatcttatgccccctaggattcctgtcatacgtagctcttgggtcattatcattcgcaaacttcgttaccaatgatgatttacaaaccctaacaaaatttagcaaacaattcaattaagatgatatatatgaaaaaattacaatgtctaagaaaagagaatagaaaaaacctacgatgtcaaagaaaaattaatagaaagaggggataaattacccttcatcgccgatgacgaaaaccaatatattcattgtactatattcaggcgtttgaactaggatgagaggatgaagatttatcttgataagatgtttaaggactagaaagatcttaagaaaaactataaactaggaagatcttacaaataaactagaaagaaataaaatctctagatttaaaaagatgaaaaatgtgaggtgacatggggaaccgtgatagagcaaccttcaagacactctattttccttttattattggtgtggtattgtaacactttttcttcttttataattggtgtctcgtgattttcatttcacacagttaataatactttcccacatttatctttaatgtcacacattgtgattaattctctagatgaacaacacaataaatgagctgtagagttatgggcaaaaaaataaataaattttggttggtgagataaacttattttgtaaaaatcacttgtttcctatttattttgaacgtgtgtttgtatatttttctctctctctcttcaacatccatcttcgaccatcaatgtcaatttctctcttatgctccctagaatttctgtcatacgcagcccttgggccattaccatctcgacaaacttcgttatcaatgataatttaccaaccttaacaaaatcaaacaaataattcaattaaggtgacatatattaaaaaactacaatgtctaaaaaaaggagaaaagaaaaaactacgatgtcaaagaaaaaataatagaaagaatggataaattacacttcatcaccgatgacaaaaaccagtaaattgattgtactagaaagatcttacgaaacactataaattaaaaagatcttacaaacaaactagagagaaaaaaaaatctctagatctaaaagcatctccaacagaccctcaaaccctcaaatttgaggggtttttaactctaactccaacaacccttcaaaccctcatggcactattcacaccctcaaaatatttctcttatttcattttagtctttgtactttatattccttacaaataattctattaaagtcaactatttcaaatatattcatataaatttaaataaatgaaaattatttaaatataaaaaacaaatacaacaataatagtacactgagcatttcaacacaaattaaaattaacattacaatgataaataaatacataaacacacaaaataaattaacacttgaaaaaattacattaaaacataactaataaaaaattaaattcgtaatgcaatattaatattcaggtaaatttgatcctgaacctccaagatcaccaaaatattgtccataaacatttgatggaatcggaggttgttgttgttcttgatttcttttttgtatgattcttgcttgttcagatcgtataaattcacatgtattactatcatcaatatcgcttaaacgtgttagcaatattttattttccttccctatttcttttagagctaatttttttgcttgattttgcatacgcaattgagccatctcataatccttgcttctagttgatgcactttctttcaaaaaatcaagagagacatctcataacaagaagcatgccgaaaagatgttgaacgtgcgtttggagtcttacaatcgaagtttgctatcatagcatgatcgtcatgttactggaacaaagaagtattgcatgatataatgacagcttgcattataatgcataacataataattgaggatgaacatgatatcaatgcactgattagagattcaagattgatgccaccgccaacagttgaaacggggttaaatgaacagacaagatttcaacaatttttatcttataatctacagataaaaaataaagagactaatttatcactttgaaatgcattgagtgatcatatatgggagcattttggaaatatttatatagagtaattttgtaattttataaatcattttatgtttttttttatgttttttttttaatttatatataatattatattattatatggagttttttttttaaatcttgtttggcataattgtttctataatatatgtgttatatttatttgtgaaagttttatcactataactgattattgttaaaaattgaggattataatgtaaatacttcaaaaaattaaaataaatttgtgggtataccattggagtaagtgaccctcaaatcttcattttgagggtgtgccccctttaaaatgagggccattgttggagatg

SEQ ID NO: 20904 - DNA, 3003 bp, Unknown; identical to SEQ ID NO: 20903
  misc_feature (1)..( 3003): 2750-1469P.txt file - cDNA_ID_1829917; gDNA_ID_2926194; Annot_ID_141196

SEQ ID NO: 20905 - DNA, 3000 bp, Unknown; identical to SEQ ID NO: 6077
  misc_feature (1)..( 3000): 2750-1469P.txt file - cDNA_ID_1829921; gDNA_ID_1620842; Annot_ID_50909

SEQ ID NO: 20906 - DNA, 3003 bp, Unknown
  misc_feature (1)..( 3003): 2750-1469P.txt file - cDNA_ID_1829921; gDNA_ID_2926194; Annot_ID_141198
gaatggagtagcatgctagtttagacaaatataaaatggtggaagagtaaatattcaattttgagagggtaataatgtaatcaataacatgctagtttagacaaatactcccaaaagaatgtctcaaactcaaagagttggttagaatttaaagtgtccaaatacacaaataccccaaattttatactatttatgtggctagtggctacatacaaatttatccagtgaacttgtgtgataatttactgtcttaaaagtttatctgtatctagaaatagaagatccgatcaacaaaatacgagtgagcatttcttcatggatcatgatcagaaactttcttatgaaaaacaatgagcaccacttttatgggtcactaagggttcgtgagttaaccccatacctcttttgtgtgtgtgccataggtagtggaaaagggaatctactgatgttagagggtggtgctgtttcggcgacccacaaatctggacgatgtaggcccaaattttacctcaccccaccattttcgtagacttttcattccggtcccataattttacatttcgttggtctaacccatcattcattgattctttacctttttgccaagaggctacttaacctttttgctctttatggattggtgataataatttagtctcaccataaaattcaatgtttttctagtcaacaccatctaaattctaattcaacatttttttcaacgctaattaaaacgaaattcacatatttttagatttatgactactagataaacaagttttatcgaaacttttttcaacaaaaatttcatgcgaaacaacaaaccacggatcaatacttactaatcacggatcggaatcttctatttttttttttttctattttgtaactatcatatttaatgttttcaactaatcacgtagaagggagctttttcaactattagtgaattgacttgtaaacaaaaggagaagtcaaataagaacaacgataatagtagaagaagctcttagactaattaattaatatcttagaggtacaaaaacaatttgattattattactttatgcgtcatctcttagatcatcttccacgggcctcatggacatggacattgacatcatgactcatgagtttggttggtgtaaagttcaaaaatattaacacataacaccaaacgatcaatgtcttatacatatttctatgtttaaaattcactaaaatatgttgcaaacagaataaaaaatattagctgcttataccaattgtagaagaataatatatagcaacaaaaataatatagaatgagtacaaaatggaaaataatctggtgtgtatataagttgattttcataaaattctgatagtaatatttgacacaaatcattcataaattaaaattttctatttaatagcattttgaaaaaaaattatttaaattataaattaacattttctatttaatagcattttgaaaaaattatattattcataaatgatgcattgaaatgttagatttatggtaaacatcaatctttatacattattaaaactcgttgaaaagtttaagtatcaactaaatttataggcgtttattgttttaaaagtttagaaccataaagttcaaatcattccaccacaattttgatcaaagttaaccacaacaaatgacaaggattagatgttacttggaatcgtttgattatagataaagaaaacgatattagtacttttatagttcagaataaatacataattggaagtcattttatgtgatacggcaagataactcttttgttcagcgccgttcttttgttgtcccaaggaactattgtgcgtaaacatcaaccccaaaaatgcataccatgtcacaactttttgaaagaacttaaattaacttaccaattttacaagaagtgaatacaactaatacagctttttaacctaggcttaattgcacgctaatgcttacaacatattccatcagattctgtcttttctttataaaaagttttagagatttctttctatttcaaattatttggtgttttacatctaaagtgtaagaaaccaattttcttttttttcaaaacgcaactaaaaaaaatcctttacatattatacattttattcttatttcattaataataaaatataatttattttataattttctctatcatgtattcttcaataatataacatcatattttgaccccacaaaaaaacttatataaagagtacaagaaaaacaaaactaatgtttgatagcttttacatttttaaaatctgagaaaattgaagttttaactccatcaaataacattgcaaaatcacataaaaattatgatttgtgatttcacgtttaaattttgttttgttagaaatctatttgataaagtagacgtttatataccaacataatcgtctaggtaattaaattagacatccacataacaaaatagcatgttatatatatttttaaaaatcacatattcgataataattaaataaaagttattaaaaaattaaaaatcaatatactatttaatggcgatcaaaaacatcattatttgtttttaaatttcatcgtcaaatcttgccatctacctaatttaaccacacaaaaacatcatcaaattattcctgtataataccaaattaaactcttttgtccaaaacaatttcaaaaaagaaaactctgtggaataagaaacgggcaaagaggggccagaagtttagccacgtcagctacaagagagtgccacatcatcaccataagcctctcccacctgtacggatccctcccaatataaattggaaccaaactctctcctcagaaaaaaccttctcattacacttgcatgtgcaacgacccgaccctatacccgacccggcccacattttaaacccattttagccttttctgtttccgccgccgactgatcggaataatcgatcaaagagagaacaactgaatcttcgccggatactacgccgatg

SEQ ID NO: 20907 - DNA, 3003 bp, Unknown
  misc_feature (1)..( 3003): 2750-1469P.txt file - cDNA_ID_1829948; gDNA_ID_1620842; Annot_ID_50901
atttttgttgtcgagaaatcataatcactatcgttgtgatcaactaactgttttatatcgatcgacgatcgctcattacaaaaaaaaaaaaaaagtgaatgtttgtaccgaagttgtaacaataaataactaaggagtttggagagaacggagtagcttctttattaatgacgaacagaaaggcagtaattaacataatggaaaaccgtaagtacagaaacttagaaccgaaagtacaggttgaaaaactgatattaatggtcggaaaacctgaaaatacagaacggaaaaccagaaagtaagagataaagagataggcagcaattctctcttaaattctctgagtggtgacttaggttctggatcccccttcttagtagtatctcttcctattggcaaggagctgatctagggttctcttagtctctcttgcgatttctcctttttgcccttctgaatttatcgggctgggccgagccgtgatgggcagagctgtgatgggccgagtagtcattctgatgggccgttgttctgatgggccgttcttctttgttatgagctttcttgacttggtctatttgtgtttaggccgaattgggcatggagggcaaagcccgtatcccacaccgaatctaaataagaggaaacaaagaaaaaggagaaaaagaagaagaagatatgcagccaaatgggcttaaaccattaacataatgggaaagcctaacttaagcccaatacttcagctgtcaaataagaagagaaagcccaatactccaaattcggatcatatcacattatacatctaaatctgtttcacaattcaaaacatacatttggattttgactagtcgaagcctagtaattagtaattaaccatatccatgtctcagccaatcataaactaccacgtgggtgattaaattaattacagagccaaaacaaaattgtcgtttcttcaaatttcaaaaccagattgttctgtctcagaattcagaatcagtctctgatcttctccatgacgattccgtttcattgatcgatcaatcaaaatctcgccggagtttcttcccgccggcctgaatcatgcctctgcctatattcccgtcgcggttacagtgttcgtcttcatcgtcttcgtcgtcgtcgcgatcttcgttttttaggcctaagcttcgaatcgatccaagcttgaccttaattccaggcttatccaacgacgtcgggagactgattctctccttcgtcccttaccctcacatctctcgtatcaaatcaacctgtaaatcatggtacgctttcctctcttccaaaaccctaatttcactccgccatagcagagacaacagcaacaccaacaatctctcgcatctcctttgtatcttccctcaggatccttcgatttcgcctccttttctcttcgatcccgtgactctctcttggagatcgcttcctcttatgccttgtaaccctcacgtttacggtctctgcaatttcgtagctgtagctcttggtccttacgtttatgtcctcggtggctctgcttttgatactaggtcttatcctcttgatgttcctttgcctacttcttctgtgtttcgttacagcttcgtgaaatcggtttgggaacggttatctccgatgatgtctccgcgtggtagctttgcttgcgctgcgatgcctggttcttgtggtcggattattgtggcgggaggaggatcacggcacactctgtttggtgctgctggaagtagaatgagttctgtggagatgtatgatgttgagaaagatgagtggagagtaatgaatgaattgcctaggtttagagcaggatgtgttggtttcttggtggagaatgagaaggagaaggagaaggaggaggaagggagagagttttgggttatgggtggctatggcggatcgaggacggtttcggggattcttcctgttgatgagtactataaagacgcggtagtgatggatttgagagtagatggtggtgagaaatggagggtagttggagatatgtggggagaagaagagagacctaagctagggaagattgttgctgttgattgtgggaagcctgtgtttttcatgttggataaggattggattcttaggtatgagatgggtttgaatcgttggagaaaggagtcaagcgtgcctaagaaagctcattacgacaaaccggttggtttcgttgcactgaatggggaattacatgttatgattcttttggatggttataatctgatggatacaaggcatactagacaacagaggaaagctggatctttgatgattcatatgtatgatccaaagaagaagacttggagatcggttgtctcaaagccaccgttcaatcatcaacttgatttcaggaccacggttatgtgcaccatccgattgtagtaggtgtaaaaaactctcatcacacatcatctagaataaaatttggtgttcatgttgtgtgagctctgatgatgtttaggtattggttcgtttcttataccacttacatatgttaccacactgtctgtacaagttgaaaaacaaaaacaaaaaagaactgagtattctgtttatattgctaaagggtattctataaaaatgctctagcttgcgaacaatgcaacatttgcttcttctactctcgtttcaagttaatttcttcataacactaatcaaatccaagactttctgaatctctttttgactgtctatcacaattcagtttcgtggaaaaggtttttgtctcaagaaagaagacagtttcctaccataagcaagagtggttggtcactgaagaagacaagacagtctcttaccattagattattgtagcgtgatgtgttttgtttgtgctaccaaccagaaatactagcaactatcatactccacagaattgagattggttcaagtgtattatacattgatgatgaggttttgaattttgatcaaacaacacacaaaaatagtattgtagttggtttaagagcaatg

SEQ ID NO: 20908 - DNA, 3003 bp, Unknown
  misc_feature (1)..( 3003): 2750-1469P.txt file - cDNA_ID_1829948; gDNA_ID_1620842; Annot_ID_170081
taaattaattacagagccaaaacaaaattgtcgtttcttcaaatttcaaaaccagattgttctgtctcagaattcagaatcagtctctgatcttctccatgacgattccgtttcattgatcgatcaatcaaaatctcgccggagtttcttcccgccggcctgaatcatgcctctgcctatattcccgtcgcggttacagtgttcgtcttcatcgtcttcgtcgtcgtcgcgatcttcgttttttaggcctaagcttcgaatcgatccaagcttgaccttaattccaggcttatccaacgacgtcgggagactgattctctccttcgtcccttaccctcacatctctcgtatcaaatcaacctgtaaatcatggtacgctttcctctcttccaaaaccctaatttcactccgccatagcagagacaacagcaacaccaacaatctctcgcatctcctttgtatcttccctcaggatccttcgatttcgcctccttttctcttcgatcccgtgactctctcttggagatcgcttcctcttatgccttgtaaccctcacgtttacggtctctgcaatttcgtagctgtagctcttggtccttacgtttatgtcctcggtggctctgcttttgatactaggtcttatcctcttgatgttcctttgcctacttcttctgtgtttcgttacagcttcgtgaaatcggtttgggaacggttatctccgatgatgtctccgcgtggtagctttgcttgcgctgcgatgcctggttcttgtggtcggattattgtggcgggaggaggatcacggcacactctgtttggtgctgctggaagtagaatgagttctgtggagatgtatgatgttgagaaagatgagtggagagtaatgaatgaattgcctaggtttagagcaggatgtgttggtttcttggtggagaatgagaaggagaaggagaaggaggaggaagggagagagttttgggttatgggtggctatggcggatcgaggacggtttcggggattcttcctgttgatgagtactataaagacgcggtagtgatggatttgagagtagatggtggtgagaaatggagggtagttggagatatgtggggagaagaagagagacctaagctagggaagattgttgctgttgattgtgggaagcctgtgtttttcatgttggataaggattggattcttaggtatgagatgggtttgaatcgttggagaaaggagtcaagcgtgcctaagaaagctcattacgacaaaccggttggtttcgttgcactgaatggggaattacatgttatgattcttttggatggttataatctgatggatacaaggcatactagacaacagaggaaagctggatctttgatgattcatatgtatgatccaaagaagaagacttggagatcggttgtctcaaagccaccgttcaatcatcaacttgatttcaggaccacggttatgtgcaccatccgattgtagtaggtgtaaaaaactctcatcacacatcatctagaataaaatttggtgttcatgttgtgtgagctctgatgatgtttaggtattggttcgtttcttataccacttacatatgttaccacactgtctgtacaagttgaaaaacaaaaacaaaaaagaactgagtattctgtttatattgctaaagggtattctataaaaatgctctagcttgcgaacaatgcaacatttgcttcttctactctcgtttcaagttaatttcttcataacactaatcaaatccaagactttctgaatctctttttgactgtctatcacaattcagtttcgtggaaaaggtttttgtctcaagaaagaagacagtttcctaccataagcaagagtggttggtcactgaagaagacaagacagtctcttaccattagattattgtagcgtgatgtgttttgtttgtgctaccaaccagaaatactagcaactatcatactccacagaattgagattggttcaagtgtattatacattgatgatgaggttttgaattttgatcaaacaacacacaaaaatagtattgtagttggtttaagagcaatgacttggagtgatgaccagagttacttactcattgtagaaagtcaaacgtggcaacacagctttgcacgcttcattgacatacacgtcgacgaaaaaaccatatccgctcatcgagaaagtcggaatttttccgagaaaattcaaaagggcgaaaaaaagagcttttgcgtacagttttcgaattggtctccttcgtacgggtaaaatcagctcaaaaacctgacctttatttttctggttcttcacatttcccgatctgattttagagtcatagcttttctaaagttctcaatttgaactcatactgtttctgggttcttctttcgatgtctctggtgattttaacttttgtgctatttttaattcgatgctgaactgattagggttgatactgtttctggtcattattcactacgcagataaagacgacggctttgattttttttgtttggatttagggttttgtgatttctaatctctccttgtttattaaatctctcagtagattgattgtcaaattgaagattgatgaaactctgatatgatcgtaatcgtcgactgttttctttgattttagctcttcataattgggtttaaatggcaagagggttttaatagttttgacttacattgattgttaaacttaaattgatgattgatgaaactgaggtttggtcgtaatcgtcgattgttttctttgattttagctcttcatagtttggtttaagtgacaataaaggttttagcttcagagtgtggaatgtgttattgatgaaagttggaacatttttactggcttttacaggcaagctatggttcaagagaactatgaatgaaactgtggtgtaagagaatatcaatggttgttatctgctataatgttttttggaccaagtgagtttgatgctgatgaaatg

SEQ ID NO: 20909 - DNA, 3000 bp, Unknown
  misc_feature (1)..( 3000): 2750-1469P.txt file - cDNA_ID_1829948; gDNA_ID_2926194; Annot_ID_141206
tttgttgtcgagaaatcataatcactatcgttgtgatcaactaactgttttatatcgatcgacgatcgctcattacaaaaaaaaaaaaaaagtgaatgtttgtaccgaagttgtaacaataaataactaaggagtttggagagaacggagtagcttctttattaatgacgaacagaaaggcagtaattaacataatggaaaaccgtaagtacagaaacttagaaccgaaagtacaggttgaaaaactgatattaatggtcggaaaacctgaaaatacagaacggaaaaccagaaagtaagagataaagagataggcagcaattctctcttaaattctctgagtggtgacttaggttctggatcccccttcttagtagtatctcttcctattggcaaggagctgatctagggttctcttagtctctcttgcgatttctcctttttgcccttctgaatttatcgggctgggccgagccgtgatgggcagagctgtgatgggccgagtagtcattctgatgggccgttgttctgatgggccgttcttctttgttatgagctttcttgacttggtctatttgtgtttaggccgaattgggcatggagggcaaagcccgtatcccacaccgaatctaaataagaggaaacaaagaaaaaggagaaaaagaagaagaagatatgcagccaaatgggcttaaaccattaacataatgggaaagcctaacttaagcccaatacttcagctgtcaaataagaagagaaagcccaatactccaaattcggatcatatcacattatacatctaaatctgtttcacaattcaaaacatacatttggattttgactagtcgaagcctagtaattagtaattaaccatatccatgtctcagccaatcataaactaccacgtgggtgattaaattaattacagagccaaaacaaaattgtcgtttcttcaaatttcaaaaccagattgttctgtctcagaattcagaatcagtctctgatcttctccatgacgattccgtttcattgatcgatcaatcaaaatctcgccggagtttcttcccgccggcctgaatcatgcctctgcctatattcccgtcgcggttacagtgttcgtcttcatcgtcttcgtcgtcgtcgcgatcttcgttttttaggcctaagcttcgaatcgatccaagcttgaccttaattccaggcttatccaacgacgtcgggagactgattctctccttcgtcccttaccctcacatctctcgtatcaaatcaacctgtaaatcatggtacgctttcctctcttccaaaaccctaatttcactccgccatagcagagacaacagcaacaccaacaatctctcgcatctcctttgtatcttccctcaggatccttcgatttcgcctccttttctcttcgatcccgtgactctctcttggagatcgcttcctcttatgccttgtaaccctcacgtttacggtctctgcaatttcgtagctgtagctcttggtccttacgtttatgtcctcggtggctctgcttttgatactaggtcttatcctcttgatgttcctttgcctacttcttctgtgtttcgttacagcttcgtgaaatcggtttgggaacggttatctccgatgatgtctccgcgtggtagctttgcttgcgctgcgatgcctggttcttgtggtcggattattgtggcgggaggaggatcacggcacactctgtttggtgctgctggaagtagaatgagttctgtggagatgtatgatgttgagaaagatgagtggagagtaatgaatgaattgcctaggtttagagcaggatgtgttggtttcttggtggagaatgagaaggagaaggagaaggaggaggaagggagagagttttgggttatgggtggctatggcggatcgaggacggtttcggggattcttcctgttgatgagtactataaagacgcggtagtgatggatttgagagtagatggtggtgagaaatggagggtagttggagatatgtggggagaagaagagagacctaagctagggaagattgttgctgttgattgtgggaagcctgtgtttttcatgttggataaggattggattcttaggtatgagatgggtttgaatcgttggagaaaggagtcaagcgtgcctaagaaagctcattacgacaaaccggttggtttcgttgcactgaatggggaattacatgttatgattcttttggatggttataatctgatggatacaaggcatactagacaacagaggaaagctggatctttgatgattcatatgtatgatccaaagaagaagacttggagatcggttgtctcaaagccaccgttcaatcatcaacttgatttcaggaccacggttatgtgcaccatccgattgtagtaggtgtaaaaaactctcatcacacatcatctagaataaaatttggtgttcatgttgtgtgagctctgatgatgtttaggtattggttcgtttcttataccacttacatatgttaccacactgtctgtacaagttgaaaaacaaaaacaaaaaagaactgagtattctgtttatattgctaaagggtattctataaaaatgctctagcttgcgaacaatgcaacatttgcttcttctactctcgtttcaagttaatttcttcataacactaatcaaatccaagactttctgaatctctttttgactgtctatcacaattcagtttcgtggaaaaggtttttgtctcaagaaagaagacagtttcctaccataagcaagagtggttggtcactgaagaagacaagacagtctcttaccattagattattgtagcgtgatgtgttttgtttgtgctaccaaccagaaatactagcaactatcatactccacagaattgagattggttcaagtgtattatacattgatgatgaggttttgaattttgatcaaacaacacacaaaaatagtattgtagttggtttaagagcaatg

SEQ ID NO: 20910 - DNA, 3000 bp, Unknown
  misc_feature (1)..( 3000): 2750-1469P.txt file - cDNA_ID_1829948; gDNA_ID_2926194; Annot_ID_201317
attaattacagagccaaaacaaaattgtcgtttcttcaaatttcaaaaccagattgttctgtctcagaattcagaatcagtctctgatcttctccatgacgattccgtttcattgatcgatcaatcaaaatctcgccggagtttcttcccgccggcctgaatcatgcctctgcctatattcccgtcgcggttacagtgttcgtcttcatcgtcttcgtcgtcgtcgcgatcttcgttttttaggcctaagcttcgaatcgatccaagcttgaccttaattccaggcttatccaacgacgtcgggagactgattctctccttcgtcccttaccctcacatctctcgtatcaaatcaacctgtaaatcatggtacgctttcctctcttccaaaaccctaatttcactccgccatagcagagacaacagcaacaccaacaatctctcgcatctcctttgtatcttccctcaggatccttcgatttcgcctccttttctcttcgatcccgtgactctctcttggagatcgcttcctcttatgccttgtaaccctcacgtttacggtctctgcaatttcgtagctgtagctcttggtccttacgtttatgtcctcggtggctctgcttttgatactaggtcttatcctcttgatgttcctttgcctacttcttctgtgtttcgttacagcttcgtgaaatcggtttgggaacggttatctccgatgatgtctccgcgtggtagctttgcttgcgctgcgatgcctggttcttgtggtcggattattgtggcgggaggaggatcacggcacactctgtttggtgctgctggaagtagaatgagttctgtggagatgtatgatgttgagaaagatgagtggagagtaatgaatgaattgcctaggtttagagcaggatgtgttggtttcttggtggagaatgagaaggagaaggagaaggaggaggaagggagagagttttgggttatgggtggctatggcggatcgaggacggtttcggggattcttcctgttgatgagtactataaagacgcggtagtgatggatttgagagtagatggtggtgagaaatggagggtagttggagatatgtggggagaagaagagagacctaagctagggaagattgttgctgttgattgtgggaagcctgtgtttttcatgttggataaggattggattcttaggtatgagatgggtttgaatcgttggagaaaggagtcaagcgtgcctaagaaagctcattacgacaaaccggttggtttcgttgcactgaatggggaattacatgttatgattcttttggatggttataatctgatggatacaaggcatactagacaacagaggaaagctggatctttgatgattcatatgtatgatccaaagaagaagacttggagatcggttgtctcaaagccaccgttcaatcatcaacttgatttcaggaccacggttatgtgcaccatccgattgtagtaggtgtaaaaaactctcatcacacatcatctagaataaaatttggtgttcatgttgtgtgagctctgatgatgtttaggtattggttcgtttcttataccacttacatatgttaccacactgtctgtacaagttgaaaaacaaaaacaaaaaagaactgagtattctgtttatattgctaaagggtattctataaaaatgctctagcttgcgaacaatgcaacatttgcttcttctactctcgtttcaagttaatttcttcataacactaatcaaatccaagactttctgaatctctttttgactgtctatcacaattcagtttcgtggaaaaggtttttgtctcaagaaagaagacagtttcctaccataagcaagagtggttggtcactgaagaagacaagacagtctcttaccattagattattgtagcgtgatgtgttttgtttgtgctaccaaccagaaatactagcaactatcatactccacagaattgagattggttcaagtgtattatacattgatgatgaggttttgaattttgatcaaacaacacacaaaaatagtattgtagttggtttaagagcaatgacttggagtgatgaccagagttacttactcattgtagaaagtcaaacgtggcaacacagctttgcacgcttcattgacatacacgtcgacgaaaaaaccatatccgctcatcgagaaagtcggaatttttccgagaaaattcaaaagggcgaaaaaaagagcttttgcgtacagttttcgaattggtctccttcgtacgggtaaaatcagctcaaaaacctgacctttatttttctggttcttcacatttcccgatctgattttagagtcatagcttttctaaagttctcaatttgaactcatactgtttctgggttcttctttcgatgtctctggtgattttaacttttgtgctatttttaattcgatgctgaactgattagggttgatactgtttctggtcattattcactacgcagataaagacgacggctttgattttttttgtttggatttagggttttgtgatttctaatctctccttgtttattaaatctctcagtagattgattgtcaaattgaagattgatgaaactctgatatgatcgtaatcgtcgactgttttctttgattttagctcttcataattgggtttaaatggcaagagggttttaatagttttgacttacattgattgttaaacttaaattgatgattgatgaaactgaggtttggtcgtaatcgtcgattgttttctttgattttagctcttcatagtttggtttaagtgacaataaaggttttagcttcagagtgtggaatgtgttattgatgaaagttggaacatttttactggcttttacaggcaagctatggttcaagagaactatgaatgaaactgtggtgtaagagaatatcaatggttgttatctgctataatgttttttggaccaagtgagtttgatgctgatgaaatg

SEQ ID NO: 20911 - DNA, 3003 bp, Unknown
  misc_feature (1)..( 3003): 2750-1469P.txt file - cDNA_ID_1829952; gDNA_ID_1620842; Annot_ID_50900
tctatgtgtaagctttcatttcctttttactttggcacaaatatattaaccattattcgttcttcgaggttcatgctaatctagtccggtcatgtcatatggcaaacggactcgaaaagtcgagctatgggtatttggcctttataaataacatatgtggatctataacttaattttgattaatagaggcataatataactcaaatattaaataaataatatagacaatccaactcaaatattaaataaataatatagacaatccaatttctctagcaatcactttgtaatgctttttatgattttatttgctcgcatcactttcaatataataatggctttttttattcttctttaaaaaaaaaaaaaatgttggtacactactgtttttattattctctttcagaatcttcttgttgaaaataaagagtaatcaatcatttacttggtgatattgcagacacttaggaaacggtagaactcgtgctccgtatcgccgagtaagagtagcaggaaaaagatgataagatacacagcagcaatatgagataatctggttttggacacgtgaaaattaacttttcacagcagcaatatgatatgattttcacgtatccaaaaccggactatatcatagaggcaccaaagaacttgtggacgagaagcatccacgtctcttcagacgacccgtagattaccgcgacttgtttaccttctatcactcagaagctggtcgtaaagttcaatctactcttcaagcttacatgtgtgcgcttgattccaagttttaacagagttaggtgattttaagtttgtcaaaaaccatgtagtaagaaaaaagggtttttgattagttgagtcatgtctgtttctgtgtgattcgtctttatatggatttttttggaggtctaagtctttgtgttgtatgaaaatcaatagagtatgtgtgcatgcatgcacatgcacatgtacaataatgtaataaattattgtatttgtatttgtatttgttgatggctccaaataataatagtgtttatggaatattctacacaggttggcgttccacgcaatcaagtgaacccatactttagggtatcaaaataaagaaaatgtacattttataaatttttcaaggctttttatgttttaagaaaaatattatacgcatttttttaataaattcatttttgttgagctttcttttcatgtttcgtgggatttaaacttgatgaaaacttatatttgttgtcaatgaatctaatttggtaacaattgggttttaaaaaatttaaaccttaaattgcttgcaaaatggaagacatcctaagactatattcatcagcgatatctagtacaatatatcaatattaaataaaagaaaaaatagaaaaagaggagagtgggagagagtcgtctctcgtttgagagactacgagaaaaacgtttcttacatgtggttttttataattagtcaagctgaaatacttattaatatgtttacacttaaaatttgtgttcacacataaatgagaaactaaaatcaagagaccatagatggtgatgctctaagatacggtgattttagttgcaaaattataaaaaaaaatctttaattaatcaagtaaatgtgttagctttgctatccattgaaataatttctggttgaaaaactcgattacgtgagtttgataaatgatattgaaggcaaaaatctaaacaatatatttacagaatgtttttttacttacaaactttttatgaaactaaaatatgttctataaaatttagtataaccgatcatatattactacattatttgtgattttataaaaaaaaatattataaggaaaagattttttatttgcgtagcacatttaaatatgccggaccggtcctgattcgaacttacgaaattaaatcggctgcacaactataagtgaattaactttttgtttttcaatttttcataatttatactaataaaaacgttgaaggataacacatacttctttaaataattttttgactagaagtaatctaaactacaaaatacactcattaaacagttattaggtttatgctgtatgacaaacttagagtaagatacttcactaatcatttaatttatatcaacgatacgacgctataagtcaataaaagaattaacttttttttctttttttttggaaatttttttagttgaaagataattcctagaaaataagttatatatttgagttttcatacaacttaaaaacagttaatgattagctatatacctatacttaatgctttctcatatctaattttgacaatctctctttttttttaatttttaatttaattttttcaccaaatactaccgtaccgtgctatatatcttggttgcttaattttgacaacctctctttttatgtatggtaatggaccacacatatccgctttgaaaagtggtccgaaggggaagacgtacggggctctcgacagctagcgaaggaaatgtagtttcttgccgtgattaaccttctttttaaggttttgtcgagaaatcataatcccgttatcgttaataaagttgttaatacccaaagataatttaagattaaaagcatgtctttgacacccaaaaaaaaaaaacacatagaagataaaaagcatgtcccgcaaaaatacaaatagaatattccttctttttaaggttgtcgagaaatcataatcactttatcgttaataaagctggtaatacgattaaaaagcatgtctcacaaaaatacaaatagaatattccttcttcttttttatttttgttgtcgagaaatcataatcactatcgttgtgatcaactaactgttttatatcgatcgacgatcgctcattacaaaaaaaaaaaaaaagtgaatgtttgtaccgaagttgtaacaataaataactaaggagtttggagagaacggagtagcttctttattaatgacgaacagaaaggcagtaattaacataatg

SEQ ID NO: 20912 - DNA, 3000 bp, Unknown
  misc_feature (1)..( 3000): 2750-1469P.txt file - cDNA_ID_1829952; gDNA_ID_2926194; Annot_ID_141207
atgtgtaagctttcatttcctttttactttggcacaaatatattaaccattattcgttcttcgaggttcatgctaatctagtccggtcatgtcatatggcaaacggactcgaaaagtcgagctatgggtatttggcctttataaataacatatgtggatctataacttaattttgattaatagaggcataatataactcaaatattaaataaataatatagacaatccaactcaaatattaaataaataatatagacaatccaatttctctagcaatcactttgtaatgctttttatgattttatttgctcgcatcactttcaatataataatggctttttttattcttctttaaaaaaaaaaaaaatgttggtacactactgtttttattattctctttcagaatcttcttgttgaaaataaagagtaatcaatcatttacttggtgatattgcagacacttaggaaacggtagaactcgtgctccgtatcgccgagtaagagtagcaggaaaaagatgataagatacacagcagcaatatgagataatctggttttggacacgtgaaaattaacttttcacagcagcaatatgatatgattttcacgtatccaaaaccggactatatcatagaggcaccaaagaacttgtggacgagaagcatccacgtctcttcagacgacccgtagattaccgcgacttgtttaccttctatcactcagaagctggtcgtaaagttcaatctactcttcaagcttacatgtgtgcgcttgattccaagttttaacagagttaggtgattttaagtttgtcaaaaaccatgtagtaagaaaaaagggtttttgattagttgagtcatgtctgtttctgtgtgattcgtctttatatggatttttttggaggtctaagtctttgtgttgtatgaaaatcaatagagtatgtgtgcatgcatgcacatgcacatgtacaataatgtaataaattattgtatttgtatttgtatttgttgatggctccaaataataatagtgtttatggaatattctacacaggttggcgttccacgcaatcaagtgaacccatactttagggtatcaaaataaagaaaatgtacattttataaatttttcaaggctttttatgttttaagaaaaatattatacgcatttttttaataaattcatttttgttgagctttcttttcatgtttcgtgggatttaaacttgatgaaaacttatatttgttgtcaatgaatctaatttggtaacaattgggttttaaaaaatttaaaccttaaattgcttgcaaaatggaagacatcctaagactatattcatcagcgatatctagtacaatatatcaatattaaataaaagaaaaaatagaaaaagaggagagtgggagagagtcgtctctcgtttgagagactacgagaaaaacgtttcttacatgtggttttttataattagtcaagctgaaatacttattaatatgtttacacttaaaatttgtgttcacacataaatgagaaactaaaatcaagagaccatagatggtgatgctctaagatacggtgattttagttgcaaaattataaaaaaaaatctttaattaatcaagtaaatgtgttagctttgctatccattgaaataatttctggttgaaaaactcgattacgtgagtttgataaatgatattgaaggcaaaaatctaaacaatatatttacagaatgtttttttacttacaaactttttatgaaactaaaatatgttctataaaatttagtataaccgatcatatattactacattatttgtgattttataaaaaaaaatattataaggaaaagattttttatttgcgtagcacatttaaatatgccggaccggtcctgattcgaacttacgaaattaaatcggctgcacaactataagtgaattaactttttgtttttcaatttttcataatttatactaataaaaacgttgaaggataacacatacttctttaaataattttttgactagaagtaatctaaactacaaaatacactcattaaacagttattaggtttatgctgtatgacaaacttagagtaagatacttcactaatcatttaatttatatcaacgatacgacgctataagtcaataaaagaattaacttttttttctttttttttggaaatttttttagttgaaagataattcctagaaaataagttatatatttgagttttcatacaacttaaaaacagttaatgattagctatatacctatacttaatgctttctcatatctaattttgacaatctctctttttttttaatttttaatttaattttttcaccaaatactaccgtaccgtgctatatatcttggttgcttaattttgacaacctctctttttatgtatggtaatggaccacacatatccgctttgaaaagtggtccgaaggggaagacgtacggggctctcgacagctagcgaaggaaatgtagtttcttgccgtgattaaccttctttttaaggttttgtcgagaaatcataatcccgttatcgttaataaagttgttaatacccaaagataatttaagattaaaagcatgtctttgacacccaaaaaaaaaaaacacatagaagataaaaagcatgtcccgcaaaaatacaaatagaatattccttctttttaaggttgtcgagaaatcataatcactttatcgttaataaagctggtaatacgattaaaaagcatgtctcacaaaaatacaaatagaatattccttcttcttttttatttttgttgtcgagaaatcataatcactatcgttgtgatcaactaactgttttatatcgatcgacgatcgctcattacaaaaaaaaaaaaaaagtgaatgtttgtaccgaagttgtaacaataaataactaaggagtttggagagaacggagtagcttctttattaatgacgaacagaaaggcagtaattaacataatg

SEQ ID NO: 20913 - DNA, 3003 bp, Unknown
  misc_feature (1)..( 3003): 2750-1469P.txt file - cDNA_ID_1829971; gDNA_ID_1620842; Annot_ID_50895
tatcccgagacacatatattatttcttatatacacatgttttgctgatttggttttaatggatatttgtatatgtaggttctctgttgcgccatgcagaatccttgatccctagttccctcaacgaggaagattttctgcttttgaggtaacataaagcctcttcagtcattctacttttcacctatgactacattaaagttttgtagttctcgagctgtactattttatgtagccgttgatattatttttttccggtatattgtcttctgcagggtgttttgtgaccagttacagccgttaatccattccgagtttgaggaaagtcaagtacaggtgaaggtgaaaaagctttttgctctcttatacattggttttacaattctctggcttatctgtttagttacactgatacaagtaggtgtaacaaggttttactcatgtccatcgtatgttaaatttctacgtaagacagatcttttgctaaccttcaaatgttatgttgtactaggatattgaaggtaggggcgggaatttatctggtaagctaaaagagcttctgaatcttaacaatgaggaagcttcagaggattgtgatgtccgagttgaaggtgtgatgacaaagcaaggcgtgaacgaggagatagacacagttgaaaggttgaaagagagcgatgcagatgctagcaatcttgaaaccagtggttcagatacaagctctaacagagggaagggtctggttgaagagggagagttggttcagaatatgagcaagcgatttaaaggcagtgcatcaggagaggtgaaggaggatgagaaatctgaaaccttccttgtctttgagaagcagaagaagaaacggaagcgtagtattatgaatgctgatcaaatggggatgattgagaaggcgcttgctgaagaacctgatttgcagcggaattcagcttcgagacagttatgggctgataaaataagtcaaaaggtgagttcaagaattctactctttttaatttccaaccacgtattacgaacgatgcgctcgttgattacatgattttgcagggttcggaggttattacatcttcgcagctgaaaaactggtacttgcttttatttgttcctcttcgtcagctgcaaagagaatctcgtaatcactattcattatctgacattgaaagtttattatcaggctgaataaccgaaaagcgaaactagctcgagcaaacaagcaaacggggccagctcatgataataacagctcaggggatctaccggagagtcctggagatgaaaacacttggcagcagaaaccatcaacaccaattaaagatcaaactgtaacagaaaccccgaaaacaggagagaatctgatgagaacatcgtcatcatcagaagaagggataaagcaagggcaacaagtgaggcttatggatgagagaggagacgagatcgggaagggaacagtgttgagaacagacggtgaatggaacggtttaagcttggagacaagacagatatgtgtagttgatgtaatggagcttagtgagtcatatgatgggagcaaaaagatgatcccttatggatcagatgatgttgggaggactttcacagaggcgaattcaaggtttggagttatgagagtggcttgggatgtgaataagcttcagtattagactcagttgcattgaatttgaccagtaggtttttgatttttgtttatttttaactgtttagagattctcctctgttttgtgagctttgtctctctctctctgtggttatttacaggcaaaggttgagactttgagaggaaggtaataacagaaggaatagtttgacttttttaatctcagttagttgactttacagctatttaaagaaacaaattttaattgtttcgtgatttaaggagattaactatagtaaatttaagaagaaatcaattccataaagtagctaatgattatatttgaatatttaggtggtgttattcaattatggagttaaagtcaattctttaaactttagatttgttttctatattgtttttaaaaatatgtttgtatgaatttcaaaatctctgcaatatgtcatggatttcgattctaatgatttactcatgaaactccaaagaggtttcatttcaaatgaattaatatacaaggattttacaagatttttagttttgaataacactggattttaatgaaatatttaaaatcttaattgaataacactaaactttaaaatctattaagcatgatttacaaagatgagttccaataacactagattttaaaactggatttagaatcattagttgaataacagtggattagtgttggatttcaattctattaaaatccattaactaataacacccccttagataaattaccaataaggctacagcttatgcattattattaaatttgttgaaaatgtgtatagaattagaatgttcctctaaacgaaaattcaaatttcaaagtttcgataataaagtgttgaaatagaaatgcttttcttagaattgtctacacacagtatttaccagatataaaaaaaaataacaaagggtaatctagacaattcacatacatataaagccgttgactaaagaagaagactaaaagtccagctcagcgaaaacgccttttctatccgaagaaaactgtgtcctccaaaactcggcgaagcaaagatttttattttattttttcttctcttttaattcaaaaacaaaaaatagtctctgaaaaaaaaagaaaggtttttactttgtggagaagacagagtccgtccgtcgtaactcgccaccgttctccgccgtgaattcttcttactccttcgatctgaactttctacctagttctttcgtccagtgccgtagtctttccttctttgattcgctttctaggtttcgtcttctcatttctctgcttctggttcagtattttggctgttgcgggatcgatttatacccgtaaagtggtttccaatg

SEQ ID NO: 20914 - DNA, 3000 bp, Unknown
  misc_feature (1)..( 3000): 2750-1469P.txt file - cDNA_ID_1829971; gDNA_ID_2926205; Annot_ID_141677
cccgagacacatatattatttcttatatacacatgttttgctgatttggttttaatggatatttgtatatgtaggttctctgttgcgccatgcagaatccttgatccctagttccctcaacgaggaagattttctgcttttgaggtaacataaagcctcttcagtcattctacttttcacctatgactacattaaagttttgtagttctcgagctgtactattttatgtagccgttgatattatttttttccggtatattgtcttctgcagggtgttttgtgaccagttacagccgttaatccattccgagtttgaggaaagtcaagtacaggtgaaggtgaaaaagctttttgctctcttatacattggttttacaattctctggcttatctgtttagttacactgatacaagtaggtgtaacaaggttttactcatgtccatcgtatgttaaatttctacgtaagacagatcttttgctaaccttcaaatgttatgttgtactaggatattgaaggtaggggcgggaatttatctggtaagctaaaagagcttctgaatcttaacaatgaggaagcttcagaggattgtgatgtccgagttgaaggtgtgatgacaaagcaaggcgtgaacgaggagatagacacagttgaaaggttgaaagagagcgatgcagatgctagcaatcttgaaaccagtggttcagatacaagctctaacagagggaagggtctggttgaagagggagagttggttcagaatatgagcaagcgatttaaaggcagtgcatcaggagaggtgaaggaggatgagaaatctgaaaccttccttgtctttgagaagcagaagaagaaacggaagcgtagtattatgaatgctgatcaaatggggatgattgagaaggcgcttgctgaagaacctgatttgcagcggaattcagcttcgagacagttatgggctgataaaataagtcaaaaggtgagttcaagaattctactctttttaatttccaaccacgtattacgaacgatgcgctcgttgattacatgattttgcagggttcggaggttattacatcttcgcagctgaaaaactggtacttgcttttatttgttcctcttcgtcagctgcaaagagaatctcgtaatcactattcattatctgacattgaaagtttattatcaggctgaataaccgaaaagcgaaactagctcgagcaaacaagcaaacggggccagctcatgataataacagctcaggggatctaccggagagtcctggagatgaaaacacttggcagcagaaaccatcaacaccaattaaagatcaaactgtaacagaaaccccgaaaacaggagagaatctgatgagaacatcgtcatcatcagaagaagggataaagcaagggcaacaagtgaggcttatggatgagagaggagacgagatcgggaagggaacagtgttgagaacagacggtgaatggaacggtttaagcttggagacaagacagatatgtgtagttgatgtaatggagcttagtgagtcatatgatgggagcaaaaagatgatcccttatggatcagatgatgttgggaggactttcacagaggcgaattcaaggtttggagttatgagagtggcttgggatgtgaataagcttcagtattagactcagttgcattgaatttgaccagtaggtttttgatttttgtttatttttaactgtttagagattctcctctgttttgtgagctttgtctctctctctctgtggttatttacaggcaaaggttgagactttgagaggaaggtaataacagaaggaatagtttgacttttttaatctcagttagttgactttacagctatttaaagaaacaaattttaattgtttcgtgatttaaggagattaactatagtaaatttaagaagaaatcaattccataaagtagctaatgattatatttgaatatttaggtggtgttattcaattatggagttaaagtcaattctttaaactttagatttgttttctatattgtttttaaaaatatgtttgtatgaatttcaaaatctctgcaatatgtcatggatttcgattctaatgatttactcatgaaactccaaagaggtttcatttcaaatgaattaatatacaaggattttacaagatttttagttttgaataacactggattttaatgaaatatttaaaatcttaattgaataacactaaactttaaaatctattaagcatgatttacaaagatgagttccaataacactagattttaaaactggatttagaatcattagttgaataacagtggattagtgttggatttcaattctattaaaatccattaactaataacacccccttagataaattaccaataaggctacagcttatgcattattattaaatttgttgaaaatgtgtatagaattagaatgttcctctaaacgaaaattcaaatttcaaagtttcgataataaagtgttgaaatagaaatgcttttcttagaattgtctacacacagtatttaccagatataaaaaaaaataacaaagggtaatctagacaattcacatacatataaagccgttgactaaagaagaagactaaaagtccagctcagcgaaaacgccttttctatccgaagaaaactgtgtcctccaaaactcggcgaagcaaagatttttattttattttttcttctcttttaattcaaaaacaaaaaatagtctctgaaaaaaaaagaaaggtttttactttgtggagaagacagagtccgtccgtcgtaactcgccaccgttctccgccgtgaattcttcttactccttcgatctgaactttctacctagttctttcgtccagtgccgtagtctttccttctttgattcgctttctaggtttcgtcttctcatttctctgcttctggttcagtattttggctgttgcgggatcgatttatacccgtaaagtggtttccaatg

SEQ ID NO: 20915 - DNA, 3003 bp, Unknown
  misc_feature (1)..( 3003): 2750-1469P.txt file - cDNA_ID_1829979; gDNA_ID_1620842; Annot_ID_50892
ggtatatttgcaagaccattataactacttaactgacagtgtttgaaattggaaataacttttttttttcttttaaaaaacaaaattggaaataacaaaattggagaaggaaatattaaaccatataatatttgctatgtacaaatattatttataaaatattttatgtttttattatctcaatgatggtgaacatatgtcagatttttacattctgtcatatataattgtttttacaaaaccataggttaaaaaaaaccaatttttttcaacttcatgcttcttaggttaggctattaggttcttccttcaaaaatatttgcgggaagttgctctcaaatataggattgaagcatttttcatattcatgagtggatgaatccaaaaggtttcgagcctctagaggttttctgcatgttttcgttgggttgtcccatccgatgttcccattggtttattatactgtttttcttaaagttttgttaaattttattatgttctctccttgatttcttatattattagtgtaagtatcttccatatttagtatcgaggaatatattatctattttttttttggaaaaatttaaactgttttgtagatgaatatatcaaactatgttaaattttatgtattttccatatatgctaaaaaaaaattctcgtgcaaactgaattttatttaagaatttaagtctttacaaaaaaaggttttttagccacattagctgattttctgaatttgcttgaaactacgtgaacattgaagaagctacgtgatgtgctacactattacaattacggtttgtgaatataaagataattgattcaaattttgaaacccaaaaatctatatttagaagtaaactggcaatgttcgaacagaatagtcatgccgttgaccgctataaaaaaattttaaacagaatataattacatgtatattaagaagttcaaaaagaagctatttgattcatcttttttttaatatatttttaaaccaaaatattgatagaacaatagggaaaagctcgagtttaaatatgacctcgtgaatttgttttttgttgtgtttttgaattattgttaaattatattcaaaaaaagaaaaaaatgttttacagcttaatgaatacgatttcaaaaacaaattctaacaacacaattggaacttaagctcgtcttgtagcaaaccaaacttgaagatcctcttcatacttatggattcccctataccccgaattgtacttaaacgatttctcacatttttgtcgatcatcttgatctggtggttatggttgttcaccgtgtcttcttgcattcctctctctccaaattgagtgtaccgtattttgaaagatatataggagaatgtaaacttttgttttctcatgtacattatgttaaacttaaatatatattccatttatttttagtataaagtttttcaacaaaatcttgatgtaacaacatgagtactttagaatagatgaaaataaaactagcttataaaatacaaaatgtaaaaataatctaaaaatgatgtaaaacacaaaatataaaatacaaaacgtaaaaatgagacatcaatatattgttctgtgaactttatatatagattagttacaaataatctattgtaaatattttaagatagacaataaattaatactttttagtaaaacatacaactagttaataatctaacgaccaatataaatcaactgccaaaacaaaatatatgaaattatattttctcaaaagttaattggttgtcttaaaatgaagatgttgactctgagtctatgatattagtcaaaatgcattttaacttttatgtacattccttgtatactaaaatgtctaaaaacacggtattgaatttcatttattccgtattataaaaaattacaaaaaagcccttcaaaatatatggaaacaaaattgtaaaataactgtaaaaagtaaaattatggttttgagataccaatatatttttgtatgaaattttatccaaacaataaataaatattgtatttatttgttttaaaattatatatgatggaaaatgaatcaatatttgttgaaagttggcaaatggtagaaacctaacggctaagagaatacgacgacgcaaatgaactgttttgactaattttaggaaaaagataaaacggttctctttaacaaatttgtcgcgtttgaatacgacatcgttaaaaactatgttaaacattatatatatatactaaaaagttcaaaaaactataaaattttagttttctcatcctttttatctttaaattatcaatgatttgttgttgatagaccaataatagctcacactaaagtaatttaaattttgaacacacttaacctattatctgcacctaaactattttattctataagtagaatgctcgttccaacacctcatattgttcaaaatgctcgttcatttttagatcgtaattgtctaattattaatttataaaaattgacagctttccttttaaaaacaaaacaatacaggtttgactacaaatacacattttcgaacagatagatagagagagaaaaagaaacacaataaaacgcgcgtaaaaaggaaggctaatttagtctttttcgtcgtaactcccataacgagacaaaacaatcttaagtgttccctctcatcgtaaaagcttttctccttccttctatgtacagctgtaatggcaatatcgtaaataactcgtaacagaaagggcaattattgtcaacatttataatttaatttctcccaacttctcaaattccaccatttttcttcatcctctcctccataattgattttccttttttttgtttttccttcttgcaactaaaataaataaatttttagaaaccaaaaaaaaaattgtagagagagaaaaaaaaaactcagaggagagaaagagaagacgacgaagacgaccattttttttttttttgtcaagagagaagacggagacaacaatg

SEQ ID NO: 20916 - DNA, 3000 bp, Unknown; identical to SEQ ID NO: 5240
  misc_feature (1)..( 3000): 2750-1469P.txt file - cDNA_ID_1829979; gDNA_ID_1620775; Annot_ID_50254

SEQ ID NO: 20917 - DNA, 3000 bp, Unknown
  misc_feature (1)..( 3000): 2750-1469P.txt file - cDNA_ID_1829979; gDNA_ID_2926205; Annot_ID_141680
tatttgcaagaccattataactacttaactgacagtgtttgaaattggaaataacttttttttttcttttaaaaaacaaaattggaaataacaaaattggagaaggaaatattaaaccatataatatttgctatgtacaaatattatttataaaatattttatgtttttattatctcaatgatggtgaacatatgtcagatttttacattctgtcatatataattgtttttacaaaaccataggttaaaaaaaaccaatttttttcaacttcatgcttcttaggttaggctattaggttcttccttcaaaaatatttgcgggaagttgctctcaaatataggattgaagcatttttcatattcatgagtggatgaatccaaaaggtttcgagcctctagaggttttctgcatgttttcgttgggttgtcccatccgatgttcccattggtttattatactgtttttcttaaagttttgttaaattttattatgttctctccttgatttcttatattattagtgtaagtatcttccatatttagtatcgaggaatatattatctattttttttttggaaaaatttaaactgttttgtagatgaatatatcaaactatgttaaattttatgtattttccatatatgctaaaaaaaaattctcgtgcaaactgaattttatttaagaatttaagtctttacaaaaaaaggttttttagccacattagctgattttctgaatttgcttgaaactacgtgaacattgaagaagctacgtgatgtgctacactattacaattacggtttgtgaatataaagataattgattcaaattttgaaacccaaaaatctatatttagaagtaaactggcaatgttcgaacagaatagtcatgccgttgaccgctataaaaaaattttaaacagaatataattacatgtatattaagaagttcaaaaagaagctatttgattcatcttttttttaatatatttttaaaccaaaatattgatagaacaatagggaaaagctcgagtttaaatatgacctcgtgaatttgttttttgttgtgtttttgaattattgttaaattatattcaaaaaaagaaaaaaatgttttacagcttaatgaatacgatttcaaaaacaaattctaacaacacaattggaacttaagctcgtcttgtagcaaaccaaacttgaagatcctcttcatacttatggattcccctataccccgaattgtacttaaacgatttctcacatttttgtcgatcatcttgatctggtggttatggttgttcaccgtgtcttcttgcattcctctctctccaaattgagtgtaccgtattttgaaagatatataggagaatgtaaacttttgttttctcatgtacattatgttaaacttaaatatatattccatttatttttagtataaagtttttcaacaaaatcttgatgtaacaacatgagtactttagaatagatgaaaataaaactagcttataaaatacaaaatgtaaaaataatctaaaaatgatgtaaaacacaaaatataaaatacaaaacgtaaaaatgagacatcaatatattgttctgtgaactttatatatagattagttacaaataatctattgtaaatattttaagatagacaataaattaatactttttagtaaaacatacaactagttaataatctaacgaccaatataaatcaactgccaaaacaaaatatatgaaattatattttctcaaaagttaattggttgtcttaaaatgaagatgttgactctgagtctatgatattagtcaaaatgcattttaacttttatgtacattccttgtatactaaaatgtctaaaaacacggtattgaatttcatttattccgtattataaaaaattacaaaaaagcccttcaaaatatatggaaacaaaattgtaaaataactgtaaaaagtaaaattatggttttgagataccaatatatttttgtatgaaattttatccaaacaataaataaatattgtatttatttgttttaaaattatatatgatggaaaatgaatcaatatttgttgaaagttggcaaatggtagaaacctaacggctaagagaatacgacgacgcaaatgaactgttttgactaattttaggaaaaagataaaacggttctctttaacaaatttgtcgcgtttgaatacgacatcgttaaaaactatgttaaacattatatatatatactaaaaagttcaaaaaactataaaattttagttttctcatcctttttatctttaaattatcaatgatttgttgttgatagaccaataatagctcacactaaagtaatttaaattttgaacacacttaacctattatctgcacctaaactattttattctataagtagaatgctcgttccaacacctcatattgttcaaaatgctcgttcatttttagatcgtaattgtctaattattaatttataaaaattgacagctttccttttaaaaacaaaacaatacaggtttgactacaaatacacattttcgaacagatagatagagagagaaaaagaaacacaataaaacgcgcgtaaaaaggaaggctaatttagtctttttcgtcgtaactcccataacgagacaaaacaatcttaagtgttccctctcatcgtaaaagcttttctccttccttctatgtacagctgtaatggcaatatcgtaaataactcgtaacagaaagggcaattattgtcaacatttataatttaatttctcccaacttctcaaattccaccatttttcttcatcctctcctccataattgattttccttttttttgtttttccttcttgcaactaaaataaataaatttttagaaaccaaaaaaaaaattgtagagagagaaaaaaaaaactcagaggagagaaagagaagacgacgaagacgaccattttttttttttttgtcaagagagaagacggagacaacaaatg

SEQ ID NO: 20918 - DNA, 3000 bp, Unknown
  misc_feature (1)..( 3000): 2750-1469P.txt file - cDNA_ID_1829987; gDNA_ID_1620844; Annot_ID_50929
gtaatggagaccaagtaggagatgacaatacgtgcactgaccgaaatcacctcctgagatgacctcttgtgggctacaagtgaaggattttgttgtctcttgcttagttttaaactcttcgctcgcatagtaatgtgttgtggccgttcctactgtcaatcctcctagcgtcttaaattccttcccggcgtatataaactcaagaatcctccctccttcccttattggataaaacctttaaaagaaagcatagtaggaatttatgagataatgaagaactttttaatggaaaagaatagacaagaaatgaaaacagaccttgatctgtaagccgctgataatcggaaaatctgaagagtagtttgcgcgctatggcgagtaaacggaacatacttttgtctcccttctgttgttccagagctgcgtcataaagggagtgaaaagggatcaatacagaacatatatcacatacacataaacacagatatccatagatgcatgtagaaatatacctgagggacagaacagtgatgggttcttgtgtaagtaatggagaagtctctccatctgcaattctttgaatataaggatctaaatcagcatgtgaaacaataggcaccaaggaagtaaagagagtttccaaagtataatcgtccatcttttctacatcaacagtcccaagccatttcctcagatactccactccggagttgagctcaagaatccttcgtagcgtctcgctttggaccttgcaggcattttccgacacatgctcgaaccaaccaataacatcatcatgccccgcttctacagtttccatccaataccaagtctttcaaggcagtatagtatctcaacgatgcaaaatgagtagaagtcctaacccaacatataggggagtactggtcattgaccactccctttgtcttcagacaaaagaaatttctttgtgtgtatagttgttctcaccttttttgggtctccttatttgtctttttaataggaaaaacatcacagatacctccataaatgtcacgggaattaccgtccacaaattctatcaacacttaatacagctattaatgcgttctcacagaagagtatcccagtctcaacatgtgctcaagagacaaaccttaaccacaatgtattttgcaactatcatccagtgtggtcccatgaaagcctctttgcctcctaaaaaccaaaacccctacatcatgttagctatctttcaactgctttccctgttaataattcagtgaacatagccacaaatatggacattattaaatgaacagagctctcaaacacctatttgagcaaaatagcattagaaaattttagttcttcctataatgtggctaaccttttgatgtttctttctctgcaaatatctggataagcatgtaggaccaaagctaccaagcatcacaagttgcacaagatattttttcttttgggcaggctggctcttccctcaacctcaaccttcacaggcccaccactagtttcaacgggtctaacatttaaagtcccttcactttctatctctctcctcaatcactatgtgcacaaaattccaaccatggttttgcaagtcgaatgaatctctttagcctttttctccctcattatcttcttgatgggtaattaaatcctaaaacatcttatcaaagctccgtaaagcaaaggactagctccacgttaatcttagtataagccaaaaacagaattgtcaccagctcatcttacctccaagataaccaaacaaaaaacgtgggtagtacatgaccattctttgagaaacattcaaactgctttcaagaagtgattatctcctaaccagacgaaaactgttagggtacacagtacatctttggaatttaggtacacagtatcattcatccctggttggtgaactcggaatttgggtacacagtacatctttggatgcaacacacagaaaaatctaagctgtccccatacggatgaatcattaacgtggtgtatttgactacatttggcttggcctccttaacgaatcatattgcagaaaaaccacataaccttcatgtaattttcccttcttgcagaatctccaatcactaaactacaagcctgaaagtcacttctcatccaaatcttgatacaaagctaggcaatactcaaaacctgcatcattgtcatatcatttctctaccctaccttacaatactccttgatcatgcctgttgtaagtaacatgtagtctgatcctgcaactgcccacaatctcaaatacatgctttgtcaaatcaatgaaacatcaagctcaccagagaatttgaagtatgcaaattgggttcaatcccattttctcttaccttacgcctaaaccctcctctaccattccaaccattccaaaactcataatcagagaattggccaaaaaaaatcagaaaagacccaatttttttctaatttgatcacaacctaatcctatcaacatcgttaaccaaacaaagccaatacatttaccaaggatatacgtatgcatattgcaaagatcacccgattttatgaatttcagaaaaaaccttccgcctgattctcttgaatcgttttgatcagactgccgtatcggcggagaccacgatggtgtagtccttgaacatgtctagatcttaaaccaaaacggtaggactcgaagcaactggtcctatggtctagtggtcaggacattggactctgaatccagtaacccgagttcaaatctcggtaggacctttgttttcggcttcggttttgagattgtgcaaaccggtttttaaccaaattaaaacccaccggttattggttttaatttaaccgaaactcggttcggctcagttcctaccgtttggtcaccaaagtctgctgcttcttttttgttctctaagtctaaaaacctctcctttggctgtgagagagccaacgagaagagaaaaagtatcttcctttgagaagtgcaagtccatg

SEQ ID NO: 20919 - DNA, 3003 bp, Unknown
  misc_feature (1)..( 3003): 2750-1469P.txt file - cDNA_ID_1829987; gDNA_ID_1620775; Annot_ID_50284
ggagtaatggagaccaagtaggagatgacaatacgtgcactgaccgaaatcacctcctgagatgacctcttgtgggctacaagtgaaggattttgttgtctcttgcttagttttaaactcttcgctcgcatagtaatgtgttgtggccgttcctactgtcaatcctcctagcgtcttaaattccttcccggcgtatataaactcaagaatcctccctccttcccttattggataaaacctttaaaagaaagcatagtaggaatttatgagataatgaagaactttttaatggaaaagaatagacaagaaatgaaaacagaccttgatctgtaagccgctgataatcggaaaatctgaagagtagtttgcgcgctatggcgagtaaacggaacatacttttgtctcccttctgttgttccagagctgcgtcataaagggagtgaaaagggatcaatacagaacatatatcacatacacataaacacagatatccatagatgcatgtagaaatatacctgagggacagaacagtgatgggttcttgtgtaagtaatggagaagtctctccatctgcaattctttgaatataaggatctaaatcagcatgtgaaacaataggcaccaaggaagtaaagagagtttccaaagtataatcgtccatcttttctacatcaacagtcccaagccatttcctcagatactccactccggagttgagctcaagaatccttcgtagcgtctcgctttggaccttgcaggcattttccgacacatgctcgaaccaaccaataacatcatcatgccccgcttctacagtttccatccaataccaagtctttcaaggcagtatagtatctcaacgatgcaaaatgagtagaagtcctaacccaacatataggggagtactggtcattgaccactccctttgtcttcagacaaaagaaatttctttgtgtgtatagttgttctcaccttttttgggtctccttatttgtctttttaataggaaaaacatcacagatacctccataaatgtcacgggaattaccgtccacaaattctatcaacacttaatacagctattaatgcgttctcacagaagagtatcccagtctcaacatgtgctcaagagacaaaccttaaccacaatgtattttgcaactatcatccagtgtggtcccatgaaagcctctttgcctcctaaaaaccaaaacccctacatcatgttagctatctttcaactgctttccctgttaataattcagtgaacatagccacaaatatggacattattaaatgaacagagctctcaaacacctatttgagcaaaatagcattagaaaattttagttcttcctataatgtggctaaccttttgatgtttctttctctgcaaatatctggataagcatgtaggaccaaagctaccaagcatcacaagttgcacaagatattttttcttttgggcaggctggctcttccctcaacctcaaccttcacaggcccaccactagtttcaacgggtctaacatttaaagtcccttcactttctatctctctcctcaatcactatgtgcacaaaattccaaccatggttttgcaagtcgaatgaatctctttagcctttttctccctcattatcttcttgatgggtaattaaatcctaaaacatcttatcaaagctccgtaaagcaaaggactagctccacgttaatcttagtataagccaaaaacagaattgtcaccagctcatcttacctccaagataaccaaacaaaaaacgtgggtagtacatgaccattctttgagaaacattcaaactgctttcaagaagtgattatctcctaaccagacgaaaactgttagggtacacagtacatctttggaatttaggtacacagtatcattcatccctggttggtgaactcggaatttgggtacacagtacatctttggatgcaacacacagaaaaatctaagctgtccccatacggatgaatcattaacgtggtgtatttgactacatttggcttggcctccttaacgaatcatattgcagaaaaaccacataaccttcatgtaattttcccttcttgcagaatctccaatcactaaactacaagcctgaaagtcacttctcatccaaatcttgatacaaagctaggcaatactcaaaacctgcatcattgtcatatcatttctctaccctaccttacaatactccttgatcatgcctgttgtaagtaacatgtagtctgatcctgcaactgcccacaatctcaaatacatgctttgtcaaatcaatgaaacatcaagctcaccagagaatttgaagtatgcaaattgggttcaatcccattttctcttaccttacgcctaaaccctcctctaccattccaaccattccaaaactcataatcagagaattggccaaaaaaaatcagaaaagacccaatttttttctaatttgatcacaacctaatcctatcaacatcgttaaccaaacaaagccaatacatttaccaaggatatacgtatgcatattgcaaagatcacccgattttatgaatttcagaaaaaaccttccgcctgattctcttgaatcgttttgatcagactgccgtatcggcggagaccacgatggtgtagtccttgaacatgtctagatcttaaaccaaaacggtaggactcgaagcaactggtcctatggtctagtggtcaggacattggactctgaatccagtaacccgagttcaaatctcggtaggacctttgttttcggcttcggttttgagattgtgcaaaccggtttttaaccaaattaaaacccaccggttattggttttaatttaaccgaaactcggttcggctcagttcctaccgtttggtcaccaaagtctgctgcttcttttttgttctctaagtctaaaaacctctcctttggctgtgagagagccaacgagaagagaaaaagtatcttcctttgagaagtgcaagtccatg

SEQ ID NO: 20920 - DNA, 3003 bp, Unknown
  misc_feature (1)..( 3003): 2750-1469P.txt file - cDNA_ID_1829987; gDNA_ID_2926205; Annot_ID_141710
gagtaatggagaccaagtaggagatgacaatacgtgcactgaccgaaatcacctcctgagatgacctcttgtgggctacaagtgaaggattttgttgtctcttgcttagttttaaactcttcgctcgcatagtaatgtgttgtggccgttcctactgtcaatcctcctagcgtcttaaattccttcccggcgtatataaactcaagaatcctccctccttcccttattggataaaacctttaaaagaaagcatagtaggaatttatgagataatgaagaactttttaatggaaaagaatagacaagaaatgaaaacagaccttgatctgtaagccgctgataatcggaaaatctgaagagtagtttgcgcgctatggcgagtaaacggaacatacttttgtctcccttctgttgttccagagctgcgtcataaagggagtgaaaagggatcaatacagaacatatatcacatacacataaacacagatatccatagatgcatgtagaaatatacctgagggacagaacagtgatgggttcttgtgtaagtaatggagaagtctctccatctgcaattctttgaatataaggatctaaatcagcatgtgaaacaataggcaccaaggaagtaaagagagtttccaaagtataatcgtccatcttttctacatcaacagtcccaagccatttcctcagatactccactccggagttgagctcaagaatccttcgtagcgtctcgctttggaccttgcaggcattttccgacacatgctcgaaccaaccaataacatcatcatgccccgcttctacagtttccatccaataccaagtctttcaaggcagtatagtatctcaacgatgcaaaatgagtagaagtcctaacccaacatataggggagtactggtcattgaccactccctttgtcttcagacaaaagaaatttctttgtgtgtatagttgttctcaccttttttgggtctccttatttgtctttttaataggaaaaacatcacagatacctccataaatgtcacgggaattaccgtccacaaattctatcaacacttaatacagctattaatgcgttctcacagaagagtatcccagtctcaacatgtgctcaagagacaaaccttaaccacaatgtattttgcaactatcatccagtgtggtcccatgaaagcctctttgcctcctaaaaaccaaaacccctacatcatgttagctatctttcaactgctttccctgttaataattcagtgaacatagccacaaatatggacattattaaatgaacagagctctcaaacacctatttgagcaaaatagcattagaaaattttagttcttcctataatgtggctaaccttttgatgtttctttctctgcaaatatctggataagcatgtaggaccaaagctaccaagcatcacaagttgcacaagatattttttcttttgggcaggctggctcttccctcaacctcaaccttcacaggcccaccactagtttcaacgggtctaacatttaaagtcccttcactttctatctctctcctcaatcactatgtgcacaaaattccaaccatggttttgcaagtcgaatgaatctctttagcctttttctccctcattatcttcttgatgggtaattaaatcctaaaacatcttatcaaagctccgtaaagcaaaggactagctccacgttaatcttagtataagccaaaaacagaattgtcaccagctcatcttacctccaagataaccaaacaaaaaacgtgggtagtacatgaccattctttgagaaacattcaaactgctttcaagaagtgattatctcctaaccagacgaaaactgttagggtacacagtacatctttggaatttaggtacacagtatcattcatccctggttggtgaactcggaatttgggtacacagtacatctttggatgcaacacacagaaaaatctaagctgtccccatacggatgaatcattaacgtggtgtatttgactacatttggcttggcctccttaacgaatcatattgcagaaaaaccacataaccttcatgtaattttcccttcttgcagaatctccaatcactaaactacaagcctgaaagtcacttctcatccaaatcttgatacaaagctaggcaatactcaaaacctgcatcattgtcatatcatttctctaccctaccttacaatactccttgatcatgcctgttgtaagtaacatgtagtctgatcctgcaactgcccacaatctcaaatacatgctttgtcaaatcaatgaaacatcaagctcaccagagaatttgaagtatgcaaattgggttcaatcccattttctcttaccttacgcctaaaccctcctctaccattccaaccattccaaaactcataatcagagaattggccaaaaaaaatcagaaaagacccaatttttttctaatttgatcacaacctaatcctatcaacatcgttaaccaaacaaagccaatacatttaccaaggatatacgtatgcatattgcaaagatcacccgattttatgaatttcagaaaaaaccttccgcctgattctcttgaatcgttttgatcagactgccgtatcggcggagaccacgatggtgtagtccttgaacatgtctagatcttaaaccaaaacggtaggactcgaagcaactggtcctatggtctagtggtcaggacattggactctgaatccagtaacccgagttcaaatctcggtaggaccttttgttttcggcttcggttttgagattgtgcaaaccggtttttaaccaaattaaaacccaccggttattggttttaatttaaccgaaactcggttcggctcagttcctaccgtttggtcaccaaagtctgctgcttcttttttgttctctaagtctaaaaacctctcctttggctgtgagagagccaacgagaagagaaaaagtatcttcctttgagaagtgcaagtccatg

SEQ ID NO: 20921 - DNA, 3000 bp, Unknown; identical to SEQ ID NO: 6100
  misc_feature (1)..( 3000): 2750-1469P.txt file - cDNA_ID_1829990; gDNA_ID_1620844; Annot_ID_50928

SEQ ID NO: 20922 - DNA, 3003 bp, Unknown
  misc_feature (1)..( 3003): 2750-1469P.txt file - cDNA_ID_1829990; gDNA_ID_2926205; Annot_ID_141711
aatatttatacataaatatataaaaatttatatgaaaatttataatttttcattctgactactttcatttgatttagatacaagataaaaaaccatttttagacccaaaaaaaaaaataggttaaaatataaaataaaaatggtggagtaagatattgtaattttattaaacaaaactgttgtaatgttaaaaattatgtaggtgttgaataatgatgtggtagaaagaaaagatgatgtggagtgttaaaagtgaaaaagtgggtgttgtaaatgagtaaccattgtagataaatagtctaatgattaattttgccaacaatgattatctcaacttcagggataaaccggcctaaattttagatttgagtttgatcacttatgtgtgttatgtctgcatgcctaataagaagtattatgaccaacaaatattcaatgtcagtgtaatccaaatttagcaaagcaatgtaaatgagctgcatattatatgttaaatattgtgtgtactcgtgttcttgtttttacatcatcagttactaattctaaatccgaaattccatctacatacgtagatcaatcaaagttgtcctaagaggaggccttgtgagtctcattgggttttacagaaatcgtcggacctatttgggctcaaacatataaaagatccaagatactggatttaggcccaaactcttttctcaatacgataggatccaaatctttttgtagctgtggaatgtggtggataacaaataacgtcacttggtaaaaatccaacattttagattcagccatcggtcgtacaacgtcactctcatcaacttctttttcagttccccaaatcacgatgatcgcttagtcatcacacccatctagcatcccgccgtcagataaaccggtcatttacccttaccaacataccggttttctcaatttacaaattcggtttgataaatatcaatagattaggtaaatagaaattaagttaattcggcacgtgtcacgaaaactaccacatggcgcaaaggccaaaaccacaaaattcagaaaagttggtatgcttccacgtaattgacatttttcacgtgatttgcttgtgactactgatgttacaattagtagacgtaccgttcaataacgtgatatttattagagattattgatttgcataattagttacaaaatcacacgtcacaaccatttttccccaatattacgtccaaaactgttgattcgtttgatttttattgtccgtccaatgactatttcgatttattataacttcttgtgttagtaaatagtaattcaagtctatatatactcttatatcataaattaggaaaagtaagtactgtatacgatcattgtatctaataaaatatgaaatatgcgagcaataacggccaaatagagcgtaacttcagttttttttgtgatacctagttttaaataccctaaacatcaagttacctcaaattggcaaaacctaattttgctgaaattgaaagaaaaataatatatttttatttctatatttgacttcatttaaatattattttcgaaataaatatttacctacgattgattttatcaaccagttgaacgaataatcttcttttttgtatgttaaggtgcacttataatatatatttctatatatatcacatgaaagaaaaataaaataatttaaataataacaactttcagaactaagtttttttcatattaattataaaaaatttgtatagtatactatagactcaataatagtaagtactaagcagtaaccatcaataacaatattttctaggactaacattttatttctcttcctacgaacgtaccacattgtatcatgatagccaatcaaaatacacagtactgaaactagtaatgataataagttaggcagcctaattatatacaacttttcaaatacgtcatatgaacaaataacattttccgtaatatgtactgaaaatttccacgataaaaaacaataaaaatgctcgattaatgttcttatacactggcattaacaattctcacagcaaaactaccacactaatcacaatcttatgctcatgtagtatttttagacaacattgtacatgtagaaagttctttaactcttaagtattatcgactagttttttttctagaatgaatttttctaatcgaatactttaaaaatagagtcgacgaaagagattaaatataacaaaaccaaaccacgtgaggatcataagctatggacgaggaaaatcgtcaaactttgagataaatttttgattgattaggtgtttgttgtactttttcttattaatatccagaattcagaaccttctcttcctcaaatctgtctttatcctttttaattcaattttaatctcaacttttctatattttatcgtctaaatttaaagaaaagaaaaaacccaaaaacagaggattttgatcaagtaaaagaaagaatattttctagagaaagcaaatcgattctctcacctttatatatataacctctccacctctgtttcgtctctcaatatatatccactggtctttcctttttccggcaaaattgtaacagaaccaaaaattactctgtttttttttattttcttgacaagtctgcatttttctcctctgttttggaattttctcgtttctggttttccgatcataaaaaacaaacaaaactaccgtaaaataggctctctccacagaaaaaaaagaagacttttctttcattcttctgcaagtaactgagcagatttcggttttttcttcttcaaattgatatttttaaagttataaaaatttcttgtccataatttccgttttccttaaattcagctgtcctaacgtcaaatctcagacactcgcttgcgtgtctccctctcttaaactctctctttctctttctcttttggtttctgggttatttcaaagaaaagaatcaagaaacccctctttctctcttacaagaatcccatcatg

SEQ ID NO: 20923 - DNA, 3000 bp, Unknown; identical to SEQ ID NO: 6090
  misc_feature (1)..( 3000): 2750-1469P.txt file - cDNA_ID_1830033; gDNA_ID_1620844; Annot_ID_50915

SEQ ID NO: 20924 - DNA, 3003 bp, Unknown
  misc_feature (1)..( 3003): 2750-1469P.txt file - cDNA_ID_1830033; gDNA_ID_1620773; Annot_ID_50213
acaactgatcctaaatattatttaaaaagattttttgtttttcatcgcatattaacaacattatttattggcaacaaaaatgcaatgaaattagtattttgtagcaacattttcacaactattttgcagcatgtagattgtgattttctcgttatactaagttttaagtggtgtaatataagaattgaaaattatgatgttactaatttgtgttattcttataatgatcattagctcaatttgtgttaaatatccacctgactttttattcgagtgtactgttttttttttttttctgttacaatttgagtgtagtgacgattttatatatatttttgttaaagactatctctctagattaattaaaaacttatctatactcgaagttgatatattggttctaaaacgaaaacgctcgatgtattttaagaaagtgttatgaaaaaatgatagcaacttgaacacaaaacgactgcatacatagtagatgattgattgtctaaattaatttatttccattcgaatataatttgatggtgatttgtgtgtaagaaggataggtgaatcgttgggtggaaagttaaaacgtttgaatgcatatctaattactaactagtattcgtgtcttaatacaaagatttcttatcgtttcgtttgttaggtgaagattagctaaaataattaatatgtttaatttgaattggtgtatcatttttttgtcattaaccgtgatgaaggtgatgacaatgctgcttacgtcaagcttatcggcggctctagcggtggcacaagtgggaaagaagggaaacgcaaacgcaggttggcttccgatttgcgggcaagttccaaagttttgcgatcagatcactggagctttaattgccggtttcgttgcactcgtcctctatgtactcttactcttatattctctccacgccgtcgtcgacccttttctccttcaaaaatcttgaatctacctttttttttttgagtatcgatctaattttatgtctctcatacatatatagatagtagacacataaacataaatttgctcgatgtcgatttgagacgtagttcgtgtgttgtgcttgtataatttccactgaaaagaacgttttctaaaagttcatgaccataacacgtaaagaggcgaatgaaggtaatattaatgtgggacatagtgttttgcgtgatccaaattattttagtatcgcaaaccggcctgtcttaaatggacatttgtagtaacaaaaccgaccatcagcaaattaacgttaacgttgctctaatcgtgtgtatttttctaatgcttggtgaagcacatgcgaccatttgttgtgtcagaacaaaaggaagattccacatttagaatttagattataatcccacatgcctattatttaaacatatgtatactgtaataaattagtcccagaagagcatttcatcatactgtataattaatcaaatttaaaaaacatttgtgttgaagagaagatgactagattcacttgattttttttaatactgattggtcgtttgaccagtcaggatccagactgaaatattctcaaaaggtatgaactattttaatgaaatatttgagctgagaatttgcttatgggacattctatccttctaaagaaatcattagaaaatggagaaaaagttactagaaaaagagagggaaatggggcgagagtatgaagaaagggtcccatgtgaatctaataattgaaaagcaaatatgagatttattttagggttcttgttttagcgtccaaagcggtcgcagttgccgttcagcgacttttctctgtttatgaaataaaaacgctccacttgttcttttcttctttcaacccactttgttataactattaacaaatattgcttggtccaaattttattatactgaattattttagtttttttgtatcatcatcctcaatgttagttttgaaatcctaggtcagtaagtcaataacgaaaatgacaagtttaattttgtaattggaacttacatgtcacggtctttgtttacgatcattgccacgaattgtttagatacgggctttttttttctttccgtgttgatgattatcgtttcttcttacatatcttgatcaatcactaacatttacataacctacaattttgtaatataattgcaatactcgagatcttcaaatggtgatactgttaataaaattacgaacttttaatcatcatcaaaatctatagaaaaagatacataggaccaaaacaagcctaaaacaaagagttataatttacaaataaatgcatgtattttgttacttttgttaaggattttcatatcaatgcatgcataatgcattctctttttattttatttataatgcattcttttataatattcggatccaaaattatgaattaattccagattgccataaatgtctttctttgtttatgctgacttttttcttttcttaacttatatagtaagtaaaccagaaaggtggaagatacaaagcaatttcattgcattaataaacttcaaatgtattatccaataatcaaaatttatctagtaattcacaaaaaaaaaaaaatctgtctatcattcaaaatttcaccaatttggataaatatctagaaaattttaaaatacaattcaataacactattaacatatcaatcaatatataacattgcaaaagtttacttgatcattagtatattcattttaaggttaaaagatctttaagaaaaggaaattcaaattatattgttggaaaaaaatacaaatcaaagacagcaaaaaaagtaacaaaaaaaaaaggtagaagaaactgaaacgcggaaaggaggcaaaatcttctcgtcgtcgttgtcgccgtcttcagagctacaaacgaaaaaactcgcttccgtttcgatttctccattgttattgtttcttcagtgaagcttttttcttcgagaaatttctaagatctaccacatgctactatg

SEQ ID NO: 20925 - DNA, 3003 bp, Unknown; identical to SEQ ID NO: 20924
  misc_feature (1)..( 3003): 2750-1469P.txt file - cDNA_ID_1830033; gDNA_ID_2926216; Annot_ID_142221

SEQ ID NO: 20926 - DNA, 3000 bp, Unknown; identical to SEQ ID NO: 6089
  misc_feature (1)..( 3000): 2750-1469P.txt file - cDNA_ID_1830037; gDNA_ID_1620844; Annot_ID_50914

SEQ ID NO: 20927 - DNA, 3003 bp, Unknown
  misc_feature (1)..( 3003): 2750-1469P.txt file - cDNA_ID_1830037; gDNA_ID_1620773; Annot_ID_50214
accattatcatggtatcagaaaaccaactattcttggtgtcagggagcatatcttcacgggatcagtctcgtcactggcgtggttcatgtctgctcaggagacaagttttgtcactcttggtcagcgtgttcttgcaaacccactgaaggtcagaatgcattatggccaccctgatgtatttgacagattctggttcttgagtcgaggcggcatcagtaaggcttccagagttataaatatcagtgaggacatctttgccgggtttaactgcacgttaagggggggaaacgtcacccaccacgagtacattcaggttgggaagggtccacaatttggattatttctaactaactatactgctacaacgtttttttaacgtttttaacgtttattaattatgcaatctacttttgttataattatgtaatttaacgttttttaatcttctaaattcaaaaaatttgagtaacctttgtctttatgcatttttcaggtcgggaagggacgggatgttggattgaatcagatatcaatgtttgaggctaaggtagccagtgggaacggagagcaggttctcagccgagatgtgtaccggctcgggcacaggcttgatttcttcagaatgttatcatttttctacacaactgtagggtttttcttcaacacaatgatggtcattcttactgtttacgctttcctctggggacgggtttatctggctctcagcggggttgagaagtccgctctagcagacagtacggacaccaacgccgcgcttggggtgatcctgaaccagcagttcatcattcagctcggtctgttcactgccctgccaatgattgttgaatggtctctcgaggagggtttccttctagcgatatggaatttcattcgaatgcagattcagctttcagctgtcttctacacattctcaatggggaccagagctcactatttcggtcgaactattctccatggtggggccaagtatagagccactggacgtggatttgttgtcgagcacaagggattcactgagaactaccgactgtatgcacgcagtcactttgtgaaggccatcgagcttgggctgatcctcatagtctacgcttcgcacagtccgattgccaaagactcgttgatttacatagccatgactatcaccagctggtttcttgtgatttcatggataatggccccatttgtgtttaacccatcaggattcgactggcttaagacagtctatgactttgaagacttcatgaactggatctggtaccaaggcagaatctcaacgaaatctgaacaaagctgggaaaaatggtggtacgaggaacaggaccacctgagaaacaccgggaaggcaggattatttgtggagatcatcttggtcctccggtttttcttcttccagtatgggattgtataccagcttaaaattgcaaacggatccaccagcctttttgtctacttgttctcatggatatacatctttgctatatttgtgctcttcctagtcatccaatacgcccgtgacaagtactcggcaaaagctcacatacggtacaggcttgtccaattcctcctgatcgtgcttgctatactggtgattgttgctttgctcgagttcacgcatttcagcttcatcgatatcttcacaagccttcttgcattcatcccaactggctggggaattctgctgatcgcacagactcaaaggaagtggctgaagaattacactattttctggaatgctgttgtctctgttgctcgcatgtatgacatattgtttgggatactcataatggttccagtagcgttcttgtcatggatgcctggattccagtcaatgcaaacgaggatattattcaatgaagcttttagcagaggacttcgcatcatgcagattgtcactgggaagaaatcaaaaggcgatgtctaagtttaaaaaacggtaaagctccttgttctcaacaccttatgttatgatcgtttaaatcctggatttcacaccaatgcgggctttaaatttgtgtaggtcttaagaagtaaatggtagttcaaatcctattggtatgtggcgaaggaatcagttggaggttagttttcccgaaacaaccgaattcgaagttttgtttcgtctaaagaaaaactcagatgctgatgatttatctttgtattttaaacaggtttttggagagtttggttggatgaggaatcgggaagttggtttgattcggttagatgggtttagggagatatttgattgtcagtgtgtgtggagggaactctgattcttgtatggtttttgttctaaaggtacagcaatttgtgtagtgaggctttgtgtatttgttctccttctctcattatagagctttagagcatttttagtttatattcagattgttatctaatgtcatctcgcagagcttttgttcacatttcacatcttttcttctccttcttagtagagatcagtttcagattagatacttgtccatattccactactctcgtctattatcggtttctgcttgtcaatttctgggtccaaaattgaaataaatttatataattggaccacaacaccactttgtcggttttgacttttctacttggatgctcctgaacttcttgctcccttttctattacaaattgggaaacaatcagtgtgaattggggaataaaaaaaaacagaattgagcaattaaagccacgtggcaagaaatcgacgagggaccaacgtgtttgtctgcaagatctaatccttttattaacaaaacggcgactgatctaacgggaaacttttaaaatcgagaaattgttaataataaattcaactacttctgggccatcatcatcaatcttgttcgtcttccttttgatcttatcaaactacagtcaaatcactcagagaaagctactaggtctctcctcgacatttgctttcaattcgatccagtaattttcttctcatcggagagagaaaaaaaaaatg

SEQ ID NO: 20928 - DNA, 3003 bp, Unknown; identical to SEQ ID NO: 20927
  misc_feature (1)..( 3003): 2750-1469P.txt file - cDNA_ID_1830037; gDNA_ID_2926216; Annot_ID_142222

SEQ ID NO: 20929 - DNA, 3003 bp, Unknown
  misc_feature (1)..( 3003): 2750-1469P.txt file - cDNA_ID_1830057; gDNA_ID_2926132; Annot_ID_196966
tcgaaccttgccttgtttactccttcttcacttgctagtaaagcacttgtgttcgcctttatccatctcaatggaaaactcttctgcatcatcttcatatccagtatccttcttccttgaggatcgttgatgagacatctgttgtcttcaaataagactctgtatcccttggataccatttgagaaacagtcaacagatttcttgctaaacccggcactagaaacacctctttgatgatcttctctcattggcttgtcatcacttggatatttccttttcctgccgtcattacatgttgaccattccccactttgatcggtacctttacactttgatcaagagtgatgaagtatttaacttccttggtcatatggttagtgcatccgctgtcaactagccatgtctcatcattcacgtttgatgatgtttcttcttcgactgcactgaacagcatgtgatcctcatcatcatttgtttcttctagacttagatccactcgctcggtccttctaagtctgcagttctttgctagatgtcccggtttgttacacacgaaacatcttctctcattgttccccacttgttgcgaaagaacacctttgttcttcttcatccagcaatcactctcattgtgatttttacgttcgcaaacgtcacaccatttcccagcctgcgtttgacgcttgtcttcacgtttgttttctccatagaacgctccttccgttgatcattcgtctcgcatctctacccgcttctcgtgtgctttcaatgtgcctatcaactatgttacggacaacgaagtcagatccttcgtttgcttcatcatagccactatgatgtcaaatcttttcggaagagaaattaggattttttgcactatttgatagtctgatttctcttctccatgaactctcagttgatttcccatctcaatcaacttggtcatgaaagtgttgatattgtcactttctttcatcttcaaattctcatactcccttctaagagattgaagctttatcatcctgacttgtggtgatccttgaaattccaataccaaggctttccaagtgcgcttgatgcaggggcgattctcggaaatatggaatctgagacggcagtttgaagaatttgcaaagcggttagatcctttaaggatgctgcttcacatcgtgtcttttgttgcactgcttcagggctatgatctccttctgcgggtggttttggaactccttcgtcaacaatttcccacagtttctttgtctggaaaattgttttcatcttgatgcgccaaaaaccataattctctttgttgaagattggagtcacaatgtgtgacaccatctccataactctctcgtgtttattaaactctttacttgaaatgtttggcccttgaatcagtagggctctgataccatgttggaaattgaagcctcttgttacaaagaaaaaacaagtgtttacttgttgttctgtttcttatgagatacacaaagcaaaagagaaactgacttttattgaatggagaacttgttcgtttcatcacgatacaaaaagtttaaatagaaaacaaatagacacaataagtaaagagttgtgtctctttctctctaagataaacgacacaacctaatctaaaagtcacgactctaacaaacaccttttaatacaacataattataacttatagaccaaactcaattataaactaacagatttgatgcagcttcctaatttccaacagctccatgatgtttatcagctcgttgttgtcagaatctgcatcttcataaatttataataaatataaatatataatgtataactgtatgtagaaccgtatattgtggatccgtgaattggtggaagagttgctattgcggaatcgtccaagaagctattcataaaatcaatcacgaaagaaaaagaatttgttttgctattatctctatattgtgggtagccatttttggaatctttgaaaaatcaaccaatacgcattttctctcagtttggaagttaacaaagacgcgttttttcaaggttttgtggggactggggaccaaaagttcttaatatgggttaacgtctcacaggtaataccaaacatttcatttatttgtgtttttctatcactatcttttccacattttagtattttactattacatataatttttgactaagaagttgattgtgaatgagtctgtacatcttcctagaaatgattataagtatattatttaatttgttactccctctattgtcatttatttgtagtttaagtttcaaggttttggcacaaatgaaattatttcgttttttattattatcttttaatatagttaattatctatttaaaaacaattcaacaaattgaaaaaaaagttttgtagaatttctaagagtcaaaaataataaaatttccattaaaaattgaaaacaacaaataaaatgaaactatttgtttttgcttaaacaacacttcttaaaaaacagaggaaccattgtaaaatagatttttcccaacacaaatcgaaaacgtaacttatataatctctatatttttagtaattcagcgacttatcatttcattgttaactatttttcactgacatgtttctcgttatataaaagtctctgtttatgtcaatggtcgtatgtgaatggttcatgtattatgcaaaactgtttatgataatattgccggggaaaaaaaactgccatgtttcatttttttactagttattacatttgattattatcaaccaacttaccattgaaagataacttgtgattattatttacagtaacgaagaaaattaggccatattttgttttctttttggaacctttcaaatgtcaaagctggtaggctatataaatataaacaaagctcaaaaatttattactatacttaacagtaacgaagtagactacttcaagtagtacatcaaaaaaaaaaaaaccaaagaagttgttatctttaacaaacaaaaatg

SEQ ID NO: 20930 - DNA, 3003 bp, Unknown; identical to SEQ ID NO: 20929
  misc_feature (1)..( 3003): 2750-1469P.txt file - cDNA_ID_1830057; gDNA_ID_2926132; Annot_ID_138771

SEQ ID NO: 20931 - DNA, 3003 bp, Unknown; identical to SEQ ID NO: 20929
  misc_feature (1)..( 3003): 2750-1469P.txt file - cDNA_ID_1830057; gDNA_ID_1620846; Annot_ID_50933

SEQ ID NO: 20932 - DNA, 3003 bp, Unknown; identical to SEQ ID NO: 20929
  misc_feature (1)..( 3003): 2750-1469P.txt file - cDNA_ID_1830057; gDNA_ID_1620846; Annot_ID_170211

SEQ ID NO: 20933 - DNA, 3003 bp, Unknown
  misc_feature (1)..( 3003): 2750-1469P.txt file - cDNA_ID_1830072; gDNA_ID_2926131; Annot_ID_196953
aaggaaagggaaagtatgagagagatagacgaaagagagagagttaactgttgttgtttttccgcacggtttacaatgaaaaagagataaaaggtattgtaaaaagacgcagttgttgagcgcgaaaactgctcagtaaaccgtgggaacaaaatggacatttcacaaccaaatgtggtatgagttgtaatgcccgaagaaatatggcagattacataacgattgggaaaaatatggcagattttataattttcctacatttaattcatatcaaacaacatttgaacatttaaaaccatatacatttgaacatttaaaaccattcaacgagaaatcataataaagccatcatctgaacagtgccaccgaattagtgtttctactttatccccatcaactcaatccaatcattcactatgacaaattttggattccgattcttaaaagaagaaaaaaaatctaggttaagtttcgacgtgccgcgcgttaatgaacagacaagaaacaatttaacatgtcaatcttcactaaaatttactttcggattcgagacaaacctgagagaagcgaaacagatcaaagcttgctcgggaggaatggacgagaggttgaagaagcggtagcggcagcgcaaataaacgaagaattacaacaatcaacgtagaacaaacaaggactttcagaaaaggctcataaataaactttttaatggaccatattgtgtggtaagaagataaatatatcttatcaaataaaatataaatttactaaaacattataacacaactatacttatttattttatagaaaagaaattaaaagtaaagaaaataattataaaaaaaatgtatatatcttattaaataaaaataggaataaaggtagagaaatttggatctataaccaaaaaaatttaataattaagaaactaacctaaaaaaaaaagctgttgtgatattttttgtattttgtatattaagaccactttacccttctcacctctcacctctcacctctcacctcttatctctggcatctcatctctttttttctatatcgccttcattaaaacagaacaaaactatagttttctattttactttcaattttgttacattctatttgctagaactaaggaaaacaaatacgaagactcaccagatctaattgaatattttctggtttgatcaatatctccttaacacaaatttaaacccaaaatcgaatcgatttcaattcgatttaagaaaggagaaaagagattaagagtatataaacatgattttttcagacttctaaaaactgaaacttgagatgatttcatttagtttaattatttttgtttgggttcatataaagtatcatccttagggtttaatttttttaaatcaatagatgtttgtaattagaatggattgagataaaaaaaagttaatttttctggaaattttttattgaattggggagaagagaagaagcaacgaagaagatgatgaaggaaaaaggtctgttaaataagaataaagtggatatttcccagttctcatatgttagtttcttaatttctagaattatagtgctattttcttaatttagtgttgaaaactagttagttttccaattcacccataaaagtattttcagaaaaaaaatatagaaaaaaagaaaaaaagtattagtgtacttggaacctaatattattcattatcaatcatggaatttttactttacaccgaagtcgaaactctactctggacgataaagtgtatgattggtgccgacaaccaagatgtagccttttttatatactgttcagacctggtgaagatagttttttcctcaaccgaatagtcggcgttttcagcatatttggaggattttcagagcgacaaggaagaattcacaagcttctctttatctttaattttttgtaatgcaaatgttaaaacggacaatttggcacgaaaatttgtactaaatcgttttatgtcacttatgtaaacaatattccgcaagattgattcttttgagctcaaaacaaaaccgatgacaaaaaaaaaaaaaatcatggaatttctaagaaccgtagacacttacttggtcaccgttgccaactacgacgaaatatttataacatttctaatatgctacttgacaaaacaaaaaaggctacttgaaaatcgctaatttttgtttttcttcctcactagtcaatatcacttatgaaaagttatttgtaaatttgcaattactttccaaagtaaggttttgtgagtaaaatgtatgttttgataggaataaacattctcaatttactaagcagttatgtatactatagttgttttaaacgcacaaatgaaaacttgtcaaatgggattgataacaaacatatcatactactttctttctatcttttgtcaatatcgtattactttatgttaaatatatagtaaaacttctcgataaattaataactatataaattaataaattcttccgttccgagttgagatcaatgtaaaaattgatacaaatcaatatattaataagataataatttttttgaaaatcttatataaatatatggtctcatttaccttttagattaaatttttgtaaaaagttacaaaatttgtaaaatctctctataatttaaatttattaattaatcgataaattaatacctttttaaattaataaattttctcggtttcagtattattaatttatagaggttttaccgtatttcaattatatcctaactatacaacgaaaacacataaaataataaaatttgaacatgaacatctctgtatacatatatggacatgagaacctacgcgtatgtccgagtactttcctagtagtaacaaaatctgaccaatacaccattttgtcaagtcaagtagtgtgtactcgttgtctcaagtcaccttataatatacaaaagctctatagtaattgattatcctcgtaacaataacgtatgatcaaaaagatatg

SEQ ID NO: 20934 - DNA, 3003 bp, Unknown; identical to SEQ ID NO: 20933
  misc_feature (1)..( 3003): 2750-1469P.txt file - cDNA_ID_1830072; gDNA_ID_2926131; Annot_ID_138768

SEQ ID NO: 20935 - DNA, 3003 bp, Unknown; identical to SEQ ID NO: 20933
  misc_feature (1)..( 3003): 2750-1469P.txt file - cDNA_ID_1830072; gDNA_ID_1620847; Annot_ID_50953

SEQ ID NO: 20936 - DNA, 3003 bp, Unknown; identical to SEQ ID NO: 20933
  misc_feature (1)..( 3003): 2750-1469P.txt file - cDNA_ID_1830072; gDNA_ID_1620846; Annot_ID_170199

SEQ ID NO: 20937 - DNA, 3003 bp, Unknown; identical to SEQ ID NO: 20933
  misc_feature (1)..( 3003): 2750-1469P.txt file - cDNA_ID_1830072; gDNA_ID_1620847; Annot_ID_170250

SEQ ID NO: 20938 - DNA, 3003 bp, Unknown
  misc_feature (1)..( 3003): 2750-1469P.txt file - cDNA_ID_1830084; gDNA_ID_2926131; Annot_ID_138765
gttagtcggcctagctgttatttccggtgggatctttatccgtactacagagcttttgacaatgttgtaagagttcctgctcctcctcctcaagcttcttctactattatcgattacgggagagacgagaaaagttttcaaggaagcaacatagcaattattgtggtcccttcagtcatcaatctcatcatatttgtggttctaatattctcttggaagagaaagcagtcacacaccataatcaatggtaaagtcttttaaaataagcaacatatatattccttatcttactaagagtttggttttaaacttgacatgttttatttgatgacgtgcagatgtttttgattcaaataatggtcaatctatgttacgttttgatcttcgaatgattgtaactgcaaccaataacttctctcttgaaaataagcttggccaaggtggatttggatctgtctacaaggtaaagaaactagtaagaagagtcctaacaaaatcttaagatgggtcagtgatctttaattatagcatgagaattcgttttcagggaatattaccaagcgggcaagagatagcggtaaagagattaagaaaaggttcaggacaaggaggtatggagttcaagaacgaggtcttactcttgacaagactccaacataggaatctggttaagcttcttgggttttgtaatgaaaaagatgaagagattcttgtctacgagtttgtccccaattcaagccttgaccacttcatattcggtgagccttcgcgagacgagactttgcatctttgcatgttacactacttttagaaaacaagaaaaaaaaactgtttctttgagatgtgcagatgaagaaaaacgccgagttctgacatgggatgtgaggtatacaatcatagaaggagttgcaagagggcttctttatctccatgaagattctcagttgaggattatacacagagatttgaaggcaagcaatatccttttagacgcggagatgaaccctaaggttgcagattttgggatggcaaggctgttcgatatggacgagactcgaggacagacaagcagagtagttggaacatagtaagtaagctctgtttttatttttaaagattctttgatcagcatcactattaatatgatttggttaatgcagtggatatatggctccagaatacgcgacatacggacaattctcgacaaaatctgatgtttatagctttggtgtcatgcttctagagatgataagtggtaaaagcaacaaaaagttggaaaaagaagaagaggaagaagaagaagagcttccagcttttgtaagcttatcacttatgtcgatcatctttactcttcttcttcatcttcttatcgaaattttaaaaattatttgcaggtgtggaagaggtggattgaaggaagatttgcagagatcattgatcctttggctgctccgagtaacaatatctcaataaacgaagtaatgaagctcattcacataggtttgttgtgtgttcaagaggatatttccaaaagacctagcattaattcaatcctcttttggcttgagagacacgctactatcacaatgcctgtgcccacgcctgttgcttatcttacgcgaccatcgttatcacttggtcattaatgaaccgtcaatcatgtatgttttatacctatttgtctctctctgtacaatgaatgacaaatgttgagaaaagagatgccgtgtaatgtaagcaaacttatgtttgatttgtgctaaacttatttatattaaatgaatatttgatatagccagcgttttggataatgttggaaattggactgaaacggaggaacgcatagatgaaattaaagtccaatttctatgaaagttcacacgagcagaaacaaaaactttgatctaatgtaagaggaaatgcgtgcggtaggggttgcgtagtcataaagaaaggacattgaacaaaggcacatttttaaacttatatgtaagagcatcatgggctcttaaccatatttagaatttaaatattgcacaatcaaaatacccctcatgagtttttatttttgacaactccaatggtagaagttctaatgaggctcttaaaatttaaatttttgaaatttatatgtgtttgtgtaacaccccgatttcaggaatatggtggtgcatacggtgaaatttaaaataattgatttgaccatttatattaccaaaatgcatttatcttttcgatcaaagatgttgaaaatgctcaagtaaataacatttgacattatattttacttttttcatgtttacaataaagcttcgttttgtatgatctgaaatataaaattttctctatatttataaccaatttactatagactaaatatttttaaattacaaataccgaatgactaatccataaaactgtgatggacaccatatataaagctatattggacgattgtgggtgttgttcattaaattgatgatttccactatgtcaaacctttcctccaaatttaagaatgacaaactatccaaaattattttcaaagatttttgaaagactcactacgagtttctcagaaattaacaattgttacaattttcacttcttttttcttcctgaattgtcacattctttatacagtatatgagtatgactcgtagaccaagcaaaggaagacttttttggtcatgcatgcgaccaaaaacaagtacttacataaccatattgaaaggacaatattttcaatacttctagagaagaaaaaaacccttagttcatacgaagtgattaagaaatgtttaccctttctctacggctatttgaatttgaatggccatctttgaagtcaaccattactcaaattttttcatgtgtactcaaccaaaacccattctctctcatgtcacctaattatacacatatataaacatttattacctcattaacaaaaaaaaaaacaatgaacaaaaccctaaactccattgcttaacaatgataatg

SEQ ID NO: 20939 - DNA, 3003 bp, Unknown; identical to SEQ ID NO: 20938
  misc_feature (1)..( 3003): 2750-1469P.txt file - cDNA_ID_1830084; gDNA_ID_1620847; Annot_ID_50950

SEQ ID NO: 20940 - DNA, 3000 bp, Unknown; identical to SEQ ID NO: 6127
  misc_feature (1)..( 3000): 2750-1469P.txt file - cDNA_ID_1830092; gDNA_ID_2926131; Annot_ID_196947

SEQ ID NO: 20941 - DNA, 3000 bp, Unknown; identical to SEQ ID NO: 6127
  misc_feature (1)..( 3000): 2750-1469P.txt file - cDNA_ID_1830092; gDNA_ID_2926131; Annot_ID_138763

SEQ ID NO: 20942 - DNA, 3000 bp, Unknown; identical to SEQ ID NO: 6127
  misc_feature (1)..( 3000): 2750-1469P.txt file - cDNA_ID_1830092; gDNA_ID_1620847; Annot_ID_50948

SEQ ID NO: 20943 - DNA, 3000 bp, Unknown; identical to SEQ ID NO: 6127
  misc_feature (1)..( 3000): 2750-1469P.txt file - cDNA_ID_1830092; gDNA_ID_1620847; Annot_ID_170242

SEQ ID NO: 20944 - DNA, 3003 bp, Unknown
  misc_feature (1)..( 3003): 2750-1469P.txt file - cDNA_ID_1830100; gDNA_ID_2926131; Annot_ID_196944
gtaacggagatggacatattctgctataagaaataacggttttactctctatcatcttcttctttccttcttttttgtttttgatgagtgaaatcgaaaagatagtatagggattccaaatggatcccaattaaatttgtattgatgagtaaaatcttaaccctaatgagagtatagggaactcaaatgcttcaatcatagacacatatcgaatcaattatgaattttaattaaaaatctaaattatttgagaactttggatagggagttacttggataaacttgatccatggagttctttgaatcccttatagatgacaacatcttatcaatagagacggccttttcattctcacacagactcttatctctcgtaacaaataatttgggattattttaaaaattacacttaaaagctgatcctaatttcataagaaccataattgcaaaatcaaattagaatctaaatacaaaccaccgacgaattaccttattgatttctttgagggaaaatgaagatcatgacttgctatagagacaaaggagagaaaaaatggtaaaatggtcactcaaatgagagagaagtacctaattctataagaatattgaaaaatgatatgagagacaatgacacaaagttttgaaaaatgatatgagagacaatgacacaaagttttttgtgctttatctataattgatccaaattaagcgtgaactaattcgactttagtatggtctgcatcttactacacaacattcaaaggctatacatgttttcaatcaaatcaatatacattcaaagcctatatgttttttaatcagataaacagccagtagtcacatcttttacgtgctttcactagtacttatacactctaaactatatgcatgccttgaatggggaatagtatttagacactaatttaggggttagaatgaaagaaagaaaacttgaaggggttagatgagcaaatatgaaaagttaaaacttcaaggaaacgtatgcttatgggtcccacacagcgtcaacaacgtgaaggcgtttgcttgtgccacaaatcaaagcaaccttatattttccatttgcagcaaacaccaatcaaccaaagtaacaaaccatctattattaattattgtgcaaaaaaaaaaaaaatccttcgcacgttttaacattttattgtgaacatttcagacatttagtgtttttctatgtgagtggagataaaatttttttttttttttttgaagaaatggtataattggggtggcaaagttaatttaaagacgttactgtaacactgtttaagaaaggggttcaatcatattgctctttgctaagctggacctaagcatgggttcaacgtgaagcgtacctaatgctaaacaaacccatatctacggatattttgctaagtataattctcatccattaaaaacagttagacaaataaaatatattgtcttaataaataaataaatgaatgagacaattcttctggattttaaaacaattctttttttgaatcagacaaatatttaaaaattaagatgatagatttaaaaatttcgttgtttatatatatcttggttttaaacctatattgcttaagatcctacttttacactttcagttattatatacctttttaaaaatatttttttattaaacttactatgatttcacttatcttgtagatttttatttagtactaagaaaagttatttatattatataaaatgaataaaaatttagttgagtaaaagaaattaatacataaggttctcttttgaaaatagacatataaggctcttccttgcacacttcaaatagaatgaatttgatgtggaaaacagactaaaccaagatatcatcctagaagatatcttaactatgtacttaatagaaaattgaaaagaaaactttatacttatgcaaaaaaattattaacttttacttaagagaacaattgggatcaatatgaaaataagatataacccaagggtcgataaattaaagtgaattaatatgaaaatgaactttatccttaataaacacaaaacgaattttgctgatctgtctaggtccacgcatagcaagcaaggtttcataaacgtgacgcttgcttatgaaactaactcacacttataactttaatttaattccttcatattcttcaaaagtttccatttacaagcaacaactaaactaattgacatttgacaataaaaagctgaactttattatgtatctctaggttttttccttgagagtttctctctttgaagtcatttacgtatatatatataaacccttgcaccattcttcttcgtcttgttaagcttttaagaatctctactcacattttctctgtgagtgttcttttatacttctttgttatttccaatttttctttctttcctctaaaaattttaggaactattgaatcatttaatttctgtttgttgataaaatttcgatcaactgttctcggcttaccgatgcattttttgtaaaaccgtctttttttggtgaataaaattttaaattcatacaaaaaaaaaacatatttgatactattttagctccattgtatctgaatcttcatttgttaatttttttgtttcctctgttctcacttgaattttggaatattttctctaggttttaccttatattcttcactttaagaactatatgaagatttgattggaagtaataatattcggtgatagaatctgagtttgtttgattctggtgtggggcttatatctaacttttttctttgtaccaatacattttcaattttacatttttgattagcttaaaatgtgaaggataccttgtaaataactattacactattgcttgtcttagtctaatagtcttcactaatattttgtgcagtagaagtaaatattataaagagttgttgtttgattatagagagttgttgtctattctttaacttgatgtgatgttgtttttgatgacaggtaaaaatg

SEQ ID NO: 20945 - DNA, 3003 bp, Unknown; identical to SEQ ID NO: 20944
  misc_feature (1)..( 3003): 2750-1469P.txt file - cDNA_ID_1830100; gDNA_ID_2926131; Annot_ID_138760

SEQ ID NO: 20946 - DNA, 3003 bp, Unknown; identical to SEQ ID NO: 20944
  misc_feature (1)..( 3003): 2750-1469P.txt file - cDNA_ID_1830100; gDNA_ID_1620847; Annot_ID_50945

SEQ ID NO: 20947 - DNA, 3003 bp, Unknown; identical to SEQ ID NO: 20944
  misc_feature (1)..( 3003): 2750-1469P.txt file - cDNA_ID_1830100; gDNA_ID_1620847; Annot_ID_170239

SEQ ID NO: 20948 - DNA, 3003 bp, Unknown
  misc_feature (1)..( 3003): 2750-1469P.txt file - cDNA_ID_1830150; gDNA_ID_1620849; Annot_ID_50984
tgtcagaaaatgtaagaggtattaaaatcacactctgacagcatgttatcttaatgtatattatgtagctcagtagagaatgataaggttgcagattgcacaatgcttttgtgctaatgaagagttaaaccatcttaaaaatctaatcatttgcagggtatgatgtatgcacttctctagggcatgcctcaagcacaaaagttgatattattggtaaggtttaagatatgtgaaaattgagactattttcaccctgtgttctaagttgtgaaaaagctaaattgttaatgctgttttctcccaacttcgtttgcaataataatgtaataaatgtgcctcaggatttttgttttgaatatggtagataaagaggatcctggcaaaggcgtcattgttcagatgtcaactggaaataggaaccaaaattgctcgctttcagtttctgttatttgccagaaaactaaagttgatgtaaggatttgtatatcagacatcctacttaagcgtatgaattgaagttgattttaggagtttttaagacgtaaaacctcgttcaccattttcttttctcagggaccactcactttggcgaaatctggtacctgtcagtatgtgagtgttcagtaactcatctatttgctcttttcctgtagctttcaaattaccaagtgtgattgtttcttttgtgaattttatgggttttaagtttgaaaactgagtttttatttgcatctcaatatcttgattcttaagaagtatggactctgggtagttatggtcttgtttcactgacaggctactcagctgcgacatcctgccggttgtgcagcagctatatccggccatagtagtggatggggctggtttagtaccttactaatcatgtgagcaaaccaatctttttaatgtgaggcctattggaatatgtttagatatcgtgggaatcaaaaatgaaatgttcttatctttctcagtatcttgtgcctgtttggagcttatctggtgggtggtgcagtatatcggtatttctcccttggaattcgtggcatagatgtatgtttcactaccttcctttatatatgcaagtttttctcatgtactgattctatcacaattgaaatgtaaacaccctgttttataggtaatcccgaatatggattactgggccactgtacctcacagtatacaggtattgttctgtgtttctatattctcttctggtagattggtgtctaagaattaaatttaatgagcttacgtttcctcttcatcttgcagagctgttttggctcactattttcaagattcggggggtctattcgtggtcagcaaacctcatattctcaggtcaacttctgagcagtctcagcatcttctctgatccatggtctggagacacatccccaaactttccttgactggttcaaccaattgcaaacgccgctagattgttataccctgagtactcttttggccattatatgactgcaagttataaggtgcctctccttttcagcttgttatgtcatggatccctgtagaaacaaaagaatcttgttcattggatagaaacaatgtcaagccattgcaatctgcagcctttcccatttcgtgtgtttgctctttggagattgtttcagtttcttgatgctgattttgagtaatggtaaccgatgtgttgatgttttagcacattttgcatccgcttggcgttggataagtggatatctcttttctttcagtgagttttctgataggcgagtgatcaatgtttaggatagagatgttgcaattgaccaaaaatccacgaaccagattgttcttttagtgatctcggttaaatttgagccgatttagaaactggtctagctgagccaaaccggtcaaactggccggtccagtcgtcataatatacagtagttgccaatgaagcttcttgaaagcatctctttgtacaattttgagtattgtagcatctaaagaaacattggcttagtgttttgttttgttggacgaagagtgtgtacaaagaggaaaagtgagagccaacaacttgagcttgaaagcccaacaatttctcaactaattccactattcatttcatcttgaactctctcctgatagttactatataaaaaaaaaaaattatagaccgataattaagattttgtttgatctcacattgttcagtattaattttaataaatgtcagttttgttctatattgttttctaagtaacatcaaaaatccattggacaaaggtaaagacaacgatgtctcatctttacaaattgatcaactgtacgaaaacacctcaaggacacttagcttagaagccaagtgaatttatattcctcacctccatcaatcatcatctcaaagtttccaatagcctaagaaactaataatttttgttcctttttgacagatattagaagagtattcatagtaaaaaggacaaaggaagccaatgatttaatcataaccatctaggttggatttaatcaaatacaaaacggactagatgtagtccacagtgaactcagtgattgtttttgtcttaaaatcaaggtaaatcacatgattacttaaaaacaaacagagatatacatttttgctgaaaacacgaatgtgtatataaatggattaaatcttacgaaaaagcattagttagtagacaaccactctgttgcgtcaacatttacctactcatcactcttaagtatacttcctttgctaattcacaaaaatttcatcacctaatataatcataaccatattataaatagtttaatcattgtacaattcacatctttagtatttcttgaagcaattccaaaataaagttcttttggcttcctcctcccacattcttatttggttgaggagaatgagatcatcaagaacacaaagtgttcatttcttaattttatctcctcttttcctaataatataaaatttgaaatcacatttgtaacactaattctcaaatcctaaacatg

SEQ ID NO: 20949 - DNA, 3003 bp, Unknown
  misc_feature (1)..( 3003): 2750-1469P.txt file - cDNA_ID_1830154; gDNA_ID_1620849; Annot_ID_50983
gtcctaaactagctatggtaacatatcttaaactttttcacttatttacatttaaagcgtattacaaaacgtacatgtgatatttatacacaactttattagaatttttggtctttttcatttgagaaattaacaagtcttataataaacttgaatttttttatagactatgggatttgcattcgtgaacaactcaaatatcaaagacataacatcactcaacagcaaaatgggacatttcaacttcttctccgtccatcactttaatattaccggcgtcactataacagcttccggtgatagtcctaacaccgacggtatcaagatgggttcatgtagcaacatgcacatctccaacacaaacatcggtaccggagacgattgtattgccattctctctggaaccactaacctcgatatctctaatgttaaatgtggtcccggacatgggatcagtgttggaagtttagggaagaacaaagacgagaaagacgtgaaaaacttaacagtaagagacgtcattttcaacggtacaagtgatggtattcggatcaagacttgggaatcttcagcttcaaaaatcctcgtttcgaactttgtgtacgagaatattcagatgattgacgttggaaaaccaatcaacatcgatcagaagtattgtcctcatcctccttgtgaacatgagcaaaaggttaacattctattcaaaaaacaagcttcatcattctcttatttcatcaaaagaataagaacaaaaatataaaagacaacttgtgtttatttttcttcagggagagtctcacgttcaaatccaagatcttaagttaaaaaacatatatggaacgtcaaagaacaaagtggcaatgaatcttcaatgtagcaaaagctttccgtgcaagaatattgagctaattgacattaacataaaaagtaatggacttgaaaatagttcttccattgcagtttgcgaaaatgttgatggttctatgagcggtaaaatggttcctcaacattgtctgaattgatttgacgagccatcaaaataataacgatgtgttgtgtatatgatactttcatttatgaataaaccaaattatttgatgtataggataatgtttttttttataaccgaaattccaaattaaaacataaatatgtatataagctttcagataaaataaaaaattaacatccataatctacaagaaattgtattttctgaaaatcgaatagaaacacatgattaaacaattggacgaaagaatttctacataaatctctgaataaattcaataaatccggttcatctgaagaaactaaattgaaccatactctggttcggtttttaaatgggccgtttgagatttgagaaggcccatagttgataacattcaggcttcaaattgcaaatgatatacaaaaataatttatgcggcttattcgtaagaattactaagattaagggtacaattgaaatttcgattgaaccaacggcggatgtgaaatcaacaacagcgacgactgcagccgtgccgagcactcatctcttcttctctctcagtctcgctcgccatctccgtggagatcctcggacatggtcatgagatcgtaagagagaatcttcaaaaaattgaaattggaaatcgataagctaggagctaaggagaaatgtcggggaaactttggatcccgagatttattctcatcactctactgtttattagctcacgagttaactctcaatgtgaattcagtttcactggacgcaacaaggtctttcatttcaacctagcatcttcgattcggaattatcctcacggtgtgctcagcgaagatgggtactttcgcttttccttttgtcccagattccatttcttatatgcttgaagttcgctttcaatttcaaattctgtacatcttatgaaattattatgtagaatgttgcatttggtattgtgatttgtactggatggtgttaagttaaaatgttcgtctatgttacttcatttgtgttgtgcttatactaaatgcaataattggataagcaggttttataaagtggaagcgaacagttccgtgttatggtttcaggttgtcttctacatcaggttacactttgtttctgtatttttctctgttacactgatcataacatctatgatcctgtatcttggatttctcgcgtgcctgtgtaattcatcttgttgtatgtaatttctgataactggtaacaaggaaaaaggaatagataggttaatggaacagtagaggaagaacgatacgttgcttagattaggaaagcatttagagttaaggtggttctgatttgaagatgtataactgcttggtagtcatactgccgtttatgttttacactacgccattgtgatttatgtttgttattttttttgtaaaccgtcttgtggaacagctttgtgacgtgctgattttcaatcatgatccccctcgatgtgttggttgcgaagtaagatatttggctacttttcttgtcttgatctatccttctacagaaaaagtttctattttaactttgagaatctcaatcagtctctgtgactttgcttttcttcacttaggattgtggaggtccatctcactgcggaacgtcatgtagtgcacttgtgtcagaaaatgtaagaggtattaaaatcacactctgacagcatgttatcttaatgtatattatgtagctcagtagagaatgataaggttgcagattgcacaatgcttttgtgctaatgaagagttaaaccatcttaaaaatctaatcatttgcagggtatgatgtatgcacttctctagggcatgcctcaagcacaaaagttgatattattggtaaggtttaagatatgtgaaaattgagactattttcaccctgtgttctaagttgtgaaaaagctaaattgttaatgctgttttctcccaacttcgtttgcaataataatgtaataaatgtgcctcaggatttttgttttgaatatg

SEQ ID NO: 20950 - DNA, 3000 bp, Unknown; identical to SEQ ID NO: 6143
  misc_feature (1)..( 3000): 2750-1469P.txt file - cDNA_ID_1830159; gDNA_ID_1620849; Annot_ID_50979

SEQ ID NO: 20951 - DNA, 3000 bp, Unknown; identical to SEQ ID NO: 6142
  misc_feature (1)..( 3000): 2750-1469P.txt file - cDNA_ID_1830163; gDNA_ID_1620849; Annot_ID_50978

SEQ ID NO: 20952 - DNA, 3000 bp, Unknown; identical to SEQ ID NO: 6142
  misc_feature (1)..( 3000): 2750-1469P.txt file - cDNA_ID_1830163; gDNA_ID_1620849; Annot_ID_170291

SEQ ID NO: 20953 - DNA, 3000 bp, Unknown; identical to SEQ ID NO: 6141
  misc_feature (1)..( 3000): 2750-1469P.txt file - cDNA_ID_1830167; gDNA_ID_1620849; Annot_ID_50976

SEQ ID NO: 20954 - DNA, 3000 bp, Unknown; identical to SEQ ID NO: 6141
  misc_feature (1)..( 3000): 2750-1469P.txt file - cDNA_ID_1830167; gDNA_ID_1620849; Annot_ID_170288

SEQ ID NO: 20955 - DNA, 3003 bp, Unknown
  misc_feature (1)..( 3003): 2750-1469P.txt file - cDNA_ID_1830180; gDNA_ID_1620849; Annot_ID_50969
aaattatagagaaaggtaatttgggcaccgacgtgaatttgactaaattacgagagagaaagaaagagagacttggtcacgaaggtgttaattagcatgaaagagagagaaataatcgtcgttgaccattgaccataacttagtcagtcatatatataaaaatccaaccgcccactattgttcccctattcacaaggtccttgctttctcagacgtaaacaacaagaaattatattaacacaacaacaacaacaaaaagaccaaccctatttattcatattttctcttatatgcaactctcaaagaatccgatcaaacaaacgagaaatcgagagaagaattacaccgacgatttcaccatgaagagatctgtaatcatggctcctgaatctccggtttttttcccacctccgcttgttttctctccgacgtcggtcaaaacgccgttgtcttctcctcgttcgtcgccaccgaagctgacgatggttgcttgtcctccaagaaagccaaaggagacgaagactacgggttctgattctgaaacggtgttgaaaaggaaacgaccaccgatgcttgacttaacggcggctccgacggttgcatcgtggtgcagtacgacgagagagacggcggagaaaggagcggaagttgttgaagcagaagaagatggatactactctgtttattgcaagagaggaagacgcggaccaatggaagataggtatttcgcggccgttgatcgtaacgacgacggaggttacaaaaatgctttctttggggtatttgatggtcacggcggatccaaggcggcggaattcgctgcgatgaatctagggaacaatatcgaggcggcaatggcatcggcgagatcaggagaagatggttgttcgatggagagtgcgataagagaaggttatatcaaaacggatgaggatttcttgaaagaaggttcgagaggtggcgcgtgttgtgtaaccgctttgatatcgaaaggcgagcttgcggtttcgaatgcaggcgactgccgggctgttatgagtcgtggtggaaccgcggaagctctcacttccgatcataatccttctcaagcaaatgagctcaaaaggattgaagcattggtgagttttatccttgtgcattggattttgattagtaacatcacataattgtggaattgcatttcaaaaaaaaaaaatcattgaattcgtggaaaaagcgactctagtaaaaatgcggttgataaaatttttgcaaattggagaatcattctaccattttgcgttcaaaataatgttttagtgcggtttggtttaatttgtgtttggtttacttatttttgaatgtgtgtagggtggttatgttgactgctgcaacggcgtttggagaattcaagggacattagcagtctcacgaggaattggagaccggtacctcaaggagtgggtgatagctgaaccggaaaccagaacattacggattaaaccggagttcgaattcttgatcttagcatctgatggcctgtgggacaaggtaagcataacaagaaatgcatgatttcaaaaatttgattttcatttttggtctttggatttaatgttgaagctggtttgtcctataggtaacgaaccaagaggccgtcgatgtcgttcgaccgtactgcgtaggcgtagagaatccaatgacactttctgcttgcaagaaactggctgagctatcggttaagagaggctctttggatgatataagtctaattataattcagctacaaaactttcttccatgatatattaacacatagtacattagctaaacttaattaatttcattaggtcgtagttattaataaattttgttcggtattttacatgtaaatacataaaggtttggaaaataattaatttattgttattgttcttagagataagctccaaaatatttttggtttacgatataaacactacataatacatgaaattgcactatctaaccatttatcatcctttttatcctcaacttttttattctcatgcattttgaaaaccacattctaatcatatttctgcttttatgtgtaaaaccaacaaagatgtacatggttgatatacacacgtagacataaccttgacaagcaacatcttcgtcgttactcattttacagatttctacccatctgccttcaataaaacaaacatcaaccatattagtaactgcatggtaaccaagcatacgtgagtttttgttgtaaggaccggtaaacactttgaacctataaacacctccgcctcttccaacaactcagaataatgaacaagatcacatgctaaggttttgtaatgcttcttacaaacaaaagtttatttaaaaagggaagggagagtttataaaatataaattagcattgacattggtgtgaggttcttcacataatcatatcattctgaccaaaatattagtcggaaaatggttagaaacacaccaatatgagttgttttcttgtagttctgagaaaacatagatgaaccaatatatcaacgtaagtaactaagataaattgtgaatcatgagaatgcaagaaatattttctcatgattacatgagatgaaatactaccttacaattcatcaaactttttgtagaaaaaggtattgaagaaatgaaaattggatgtagacaaaaaaataaaaaattcttgctgcaagatcctggacaaagacaataatcacattaagaacaatgtaaattttttaaaattagtaaaaactctctataaattaataattcacaccatttaaattttagaggaggtgatgaaaggacattatcatcaattttggtagttaacccccaattatttaactaatcaagatacaaggggtacaactgtaatatattcatagtttggtgtgttttctacaatattcagaaacacgatttaagacgattgaaactaaaaataaaaagtgtcggacttgtaaattttcgctcagcgatctgcttccaatg

SEQ ID NO: 20956 - DNA, 3003 bp, Unknown
  misc_feature (1)..( 3003): 2750-1469P.txt file - cDNA_ID_1830199; gDNA_ID_1620849; Annot_ID_50964
gaattattttttacttttagataacaatgtatactctatggtaacattgcatcaattatgaatggattggccaagtataaaatttaattatgattatacctcaaattcacactacttaaccatctattttcaggctattccattaattagtttttattaacacagtaatttatttgagaacagatttgaaaatattttgctaaactacttaaccttagactaactggaaaacaatatttaactaagtgtctgctaattaagaaaattaaagtatcgttcaccttctagacacactatgtcgattactgttttgagtgcaactagtgtattcgaaataatacttgggtgaattaagtttaagctttgagtaactaaaaattatatataaggatccataagttttgttgaaatagaataatcggaacttttacattcaaaaactttttcatatatatacagaaattcaacccccaataaacaaatgactaatgagtgatagtctgataggtgttaatgactgtcttaatatgagatacataagaaattttgaatggaattatttaataaatgtgaattatgtgggtgacttgactattcagtgttcactgaacacaaaaaggtaccaaaaaaattattccaatcagtgagagatcttcaaaggaaagattctcattcgcgccaatatttttgctgggaaaaggtaaaactttttagattattctataaattattttgctgatgttcccttacgaaaaaaacagtattcagtaccaaaatgtctggcacatataatcgtatagacgataagtagttgtcgaaattttatagggcaatggctcaagcaagtgaaacattgacacctagcccattcacatctatgtcactatatatgtgggttcacaaaggtgacgttttccttatgtgaatcatgtaaatgctataaagttttgtagtacatgagcgattatatattattacgaaactcctgaaatatatgatatataatcagatgggttgaggtagtgacaatagtttgtaagtgcaccaaaatacgttttgagctattaagtccgaagtttaggtccttttaagttatcgaaggtatgcttaaaaaaatttactaccttttagtttttttttgcatgatcgttattcgagaaacatgctgacgcacagattgatcagacgctgtggtaatccaagtgatagcaacaacacaaaatcatgtggagaatgatgatgatgatgcacatatggatttgcataaattttgtaatctccgaaatattgtggagaatgaaggaggagaaacataacattttaaaaatggataaagaaaaagaaagtgatggaaaaataagtatgtggtagaaaaatagggttccttcttctcatttgtctctttcaagctttatgatgcaaagcgacccttctttttcttccctttattttcttttattgttatcgttagtgtcactttctttttattaatttcataaagtcgtatgatcgtatccattgtttttattttgctccgacaggaccgacactgatctttctatatctttcggtaattaatgttataggattcctttttcagatcacatcatttgtattttatgttattttcgtttaacataatacactaataaaatgacttcataaaagatatggtttaggttggggaataaaagatatggtcgagccatacttctaatccttaatttaggttgatagaacatctaccgtcactaacaagtaatgaagtcagattaaaacttgatcgtgacaaaaattgtcccatatattttaaatgaacatgataacatattaattgaaaaatgttttagtgacttagttgtattgaatagcaaaggcaagtaagtagttatatacaatgactttcctatactcgagaagaccgtatccaagtaaatcaagaagatcgatatatatctagccggatctttggattgtcaagtgtcaacaatcttaattagatcaaaacagtctgttttaaaacatatgccaagttgtcaaacagaaaccaagcttttcatcactcaaaggagaatcacaaattctgcatggcgtgggggatagatatatatcatcgggagccactgagtccaagaaattgaatctattgacttcctattgctaatctatttcaaaataaccacgtcagagagatacgagtacatgtaatatcaatgagatattttcttaggagtaatttgaagatatttaatttgcggttgtaataatcccttttgaaaataatttgacttgtacacacggcaacaaaagaatgatctaaaggcaagtaacaagaatctgagtatccaccacctcttcctgttcctgttcttgttcctgttcgattccaaactctcactttctctgcccccctcgtgtctggctcccaccttttgtgtccactcaaccaacaacaacagtgtatctcttctcctccgttaaataactttatatttccccgttacatttccttattgtaacaaccaaaaaataattcacctgagactcacattctttaaggttttcgcatttaatatttcactttcttgaaatctcctatatttttgttatatatggtcgtcggcgatgccaacggcggtgaatgtagcgaaacaatgcttaacggcagaagcatcctacgcattagaagaagctgtgaacgttgcacgtcgaagaggacactcacaaacgacgtcgcttcacgctatctcagctttactctctctaccaacctcagtcttacgtgacgcatgtgctcgtgttcgtaactctgcttactctcctcgtcttcaattcaaagctttagatctttgcttaagcgtttctttagaccggatccagtcgggtcatcaacttggatctgatgattcaccacctgtttctaactctctaatggctgcaattaaacgatctcaagcgcatcaacgtcgtttacctgagaacttcaggatctatcaagaaatg

SEQ ID NO: 20957 - DNA, 601 bp, Unknown; identical to SEQ ID NO: 6183
  misc_feature (1)..( 601): 2750-1469P.txt file - cDNA_ID_1830214; gDNA_ID_1620852; Annot_ID_51017

SEQ ID NO: 20958 - DNA, 3003 bp, Unknown
  misc_feature (1)..( 3003): 2750-1469P.txt file - cDNA_ID_1830222; gDNA_ID_1620852; Annot_ID_51015
ttgaatttataactatggaaattcatctataatgtatcttaaacgcaattgcttgttgtaaaatcgttgggtaacaaacgcgacaattttttcaatattcccataacgatcttttatgtgaccgttaaataacaaacgcgataattttttcacaccctaaacgactttttgtataaccgttagataaaaaaacgcggcaattttctcttaaacctttcaaaacgatcttttgtattaaaacgatgacgtattctaacttgagtatttcttcttattttagaaaagtatttgtgaaaacatactcaaaatctctttaaattaagttaaggataagatgagagatattgcattaatgctaatagaattctcacattttaaggatactaattggtaagtatatgctagatatttatgtattgttgaccaaaaaaataataacacaaattagcttacaagttacaaccatttaattttacaccatgttggattgagaattttgatggttattcctttatatgttgaagaaaccttctgggccaacaactttccaaataggcccaattcaaacccattgtacaaatgcaaggctactttcgtcatttttcgtaaggcgcttgaattttgcgttttcagaatcttggtttctagggtttcacttaccttccctccgcgcccttgagctctctacctgagcttctccgggattcctaaagctgaaattcaaacacctccattttcatcctcaaggtttgctctctctctctccctctccatcgatccattagatagtgtgattactcctatttgtgtactgtcttcgatgattggcgtcaatcttactaccttctcgtttaaaacccagtaacttgcgattttgttgaactttttcctcaattttctttcgattaatcctctagaaacccgtagctaagcttagattagtgatttcaatcgcaagattcaatattgatcttgcccaagtgaattaaagtcgcaaaattgatttgtttttgtttttttagctttcttatgtaattttgctcaaagctatatgattttttgtctttgcagggagataaataaaactctattgagtagaaaatgagtgctgcagcacacaggactcctaaatcagggaggcaatctctgctatttcaagatttagcttctcctgtttcagcacgtagagggaaattctcgagtccgggacaggcagctgcggtatctgcactatggcgtgagaatttcggaggatctgatcttccaccacctccaatgtatactttggatgaccggtccgatttctctcctgagtctggtattgcagactactctgcgtctccagatgctaagtctgacagaagaacaccattccagagttctggaaagaatattgtaactcctggtaaaggaaagttggaagcaagcccttctttttctctactgaatgcacaacagagtcagcaagtttcagggagtccgagttggtggtcgcagtcaaaggcaggtagtagtaccgagcaggatgataaagggaagggatctcctgtagaaggggtggttcagccaggtgcattggtcactcttccgccgccaagagaagttgctaggccagaggttcagaggcagattatacctacaggaaaccttgatgaggaagagtgggtcactgtctatgggtaaggccatttaagctttattgctctcgtttttctcactttactgttgcaaatgttcttgatttgtcaacattctcgtgtctctgaaattctaggtacatggatgataacagttatattggtactgggtagtgttattaagtgccttaacttgtgtctgtctcccatgtttcaatcttagagaactgttcataataaatgctgttctttaccatcatgatgctcaaatatcagcctttgattgtgattttatgttttgatcattgtgaattctgactctttacatggataataactggtagtgttattaagtgccttatcttgtgtttatctcccatcttttcaatcttaagaactgatcataataactgccttcagattttctccaggtgatacaaatttagtactacgggagtttgaaaaatgtggtatggtcttgaaacatgttcctggtccaagaaatgccaactggatgcacatcctctaccaggttactgttcttcccttcaaacctgtttgatgcatgttgataagcattcatagttcttctagacgagtcatcatacatgatagtctaatcaaatcttttatataaaggaaacaacgaactgacaatggtctgtgtatttgatacagaaccggtctgatgcacataaggcgctgaacaaagcagggatgatgataaacggagttgtaatagtaggagtgaagccagtagacccaatacagaagcaagcgttaaacgagagactcaacaaccaaggattcatgcctttacctccaccatcatccactagaaacactgctcgacccctgtctcgtcctcagtacttgcaaaacggcagcgctttctctcctcaaccaagtggtggcgctatggcctctccgtcaaagtcaatggtctcaaagttctttgacttgatgttcggtgtttaaaagctacttcaatggcatttcccgaatgattcttctttacacatagtttgaagtttttgagagcagagtggctaagtaaatcttagagcgtggtcaaaattaaaaattgtaagaggtgtttcaaattgtcttttgtattgacgacggctaaaaatttggtataaatctgattattaaaatctcctcttttagccgtttcattgttgtttgtatttgagcagactagtcatgcctcgtgaatgattgaaagaaagacactgattccatggaagcctcacgggcagtgttttagaaactccattaggaactagccacgtatctagcctgttgtgtttatatatcccctctcgcatgtaaattacattacaaaactcagtaactcacaatg

SEQ ID NO: 20959 - DNA, 3000 bp, Unknown; identical to SEQ ID NO: 6168
  misc_feature (1)..( 3000): 2750-1469P.txt file - cDNA_ID_1830234; gDNA_ID_1620852; Annot_ID_51011

SEQ ID NO: 20960 - DNA, 3000 bp, Unknown; identical to SEQ ID NO: 6168
  misc_feature (1)..( 3000): 2750-1469P.txt file - cDNA_ID_1830234; gDNA_ID_1620852; Annot_ID_170356

SEQ ID NO: 20961 - DNA, 3003 bp, Unknown
  misc_feature (1)..( 3003): 2750-1469P.txt file - cDNA_ID_1830234; gDNA_ID_1620520; Annot_ID_159439
tctagtgattgttaaaaatcgttatttacttacttatttaaatgtcacatagagagaaaagagatttgcatacttgtaataatataatcgtgcttgtataagaaaaaaaaaactttatgagacaagaaaaaaaaactcgggtgtacgtacgtcgtaagtaaaagggccaatgcaagcaagctgtttggctctttccttaaagcaaaataaaagaaaaagttatctttttctccttttatttcaacttttttctttaattttcttttccattttttatgcttaatttttcaactccgagatatgaaactctctactttgtgtttagtttgaactcttttagtcataaaacaacaaactctgccgcaatcaacaaaaagcgaaggagtcaaataaaaacttctttttacgagtgaaagtgactattttacttcaatctcttttgattttcaaaactaagaaaaaaaagaatggaaatcaaagttgtgcatgttcttcccttagtcgatatgtaaaagtgatttgatagacattattgtatgtaaaagtaatacaactctgaaaaattttaagaaaaattgctagtatcagctaatccaacaattagttatatgttttggagaatgtgtaacatgaccgattataaagctaacatcactttatttattgaatttataagtaatgcaattatttaaataggtcttctcgaagaacatctagatggtatacgcttttgtgaggtgagctcccttttatgtttgatttaatagaagaaatgtaatgtgtaatgacttgcttcaaatgatttgtatgttcctattggataagggcatcttgattttatttttattttttgtatctataatgtgcagtaaactttttacttttcattttagtatgatagctggagtttggttgtttcaaagataggcaagtattgtgtttaacaactaaaaataaaacaacacatatttttcaatagaattatttacaaattataaatctaaacacagggaaaatgttagatacaaaaacaaaaaaagtatcaaagacaagcagtgtatcagacatatataatatcatattttcaattcattagaaatacaacttgccatatcgcaaattagtccataatcaccaaggtagggaacgattgtctatcgataagttatgattgaaagaaaaggatttcatgaagaaaaaaaaacttaatttttcttccagaatcgtgacttagaatttttgttaacaccgacgaatttagataacaaaagctactccctcattgactaagccaagaaagttgagtagttgactaacaatgggactaatattttagcaaaatcaatacaattttggtaattattttggttcatgaaaatgttcaatttttttggtctgaattgtggaattcacgatttatttagcctttttgcggtatatataaaattaagatatttttatgtaacactttgttttataaaggataagcttgtatagtttatatataacggctagtcatgctcaaagcctttatcatctgtgggcttcacaatcttatttcttcgacccatttgcttcaagcctcaaaccaaaacttggctgagttcttcgaaagctcattatttcttatatagtaattcttttacatagtgttggaaaatgaagtaaaagaatatcgaaacttgaacgcttagatgacgaatctgtgacattatgatttcaagtatcgacgtgttttatcaaagtgaaaagttgttaatgttggtgttgggtccgtgaaagctcgaagccatggagattaatttcaaacacttttgacctttgagccttgcaagtttggtttatttgttcaacgccagacacgtttgcacagatatgagttggtgagtgcaaatcccatcataccaactaatataaagttataccatcaatgatattctatcgtgaaaaaatatgtaaagtctaatatcattaagtatcatttattaaaagaatgaattgaagggaaaaaaaaaaaaaaagataggcaatccactagtgttcataatgaaagatgatggtcgatgtaatatgtatactaatattatatctctagctttgatcctcaatagtcaatatctatagtgtttatagtgttttaacagcttttgtataatgttaactgtgcaaaatacatgacataaaataaatgattttttttggcttttatgttataagtactattagttggttatctgttttaaaggtttttccttgaattagaggatcagatttacatgcccataacagaaccaagctggtcaccaaatccatcttatgtagtggcataacagaaccaatcttggtcaccgaatacagtagtttcacctttctctttctccaaatataataaaaaacttttttattttgtgcaaaataaactttagtgagatatattgagcaaatatgtatatatatataaagatttcttgagacgatatctctttgcctctttgggtcattgttaattccatgtatcgatttttagggttgaagagacttgtttgtaactttgaccaattgtctactctttttagaccacaatgttagtaagtatgtaggtaggacttgtttcgaatgtgatgatttatttaggcccagacaaattatttactagacccattgttgttctattatttactgtttgaaagaagttgtttttgtcgttgattgtttactagtatttcaaagaaaagggtatgcatagtttaaacttcaaggaaatcccttatatatagtaaaattaaaagaaattccacaattagatttcgtaatacaattttctataacaaaacctagttaattagtccacatgtcctagctcttacccactcagcccgcatattcctcacgctttctttttattttccgaaattttttaaacggctaccaaatcaaaatgcataaataaacaaacccttctcttctttaccaattcccaaatccaccaaaaaaaaaaaaatg

SEQ ID NO: 20962 - DNA, 3000 bp, Unknown
  misc_feature (1)..( 3000): 2750-1469P.txt file - cDNA_ID_1830238; gDNA_ID_1620852; Annot_ID_51010
gagaaactgcaggcgattcatggagttccgaagattaaagagaagtataatccggcgacatggatgctagaagtgagctcaatggctgcagaagctaagcttgagatagattttgctgagcattataaaacatcatccttatatcagtaagttcaacctaatattcaaagctaagatcattccagatattttaactcaattagaattgttcgtggtgtagacaaaacaagaatcttgtaaaggaactaagcacaccaccacaaggagcaagcgatctctacttctcaacgcggttctcacaatcattgttaggacaattcaaatcttgtttgtggaagcagtggataacttactggagaactcctgactacaatctagcaagatttttctttacattggctgcagctgtcatgctcggatcaattttctggaaagttggcacaaaaaggtttgtttaattacttgaatcgaatacagaggcctcaaatctagtatcagagtccttacttatatctaaactctatacaactgttttcaaaaacagggaaaacgctaatgatcttacaaaggttattggagcaatgtatgctgctgttttattcgtgggcgtaaacaactcttcatctgtccaaccgctaatagccgtggaaagatctgtattctatagagaaagagctgctgaaatgtactctgctttaccttatgccctagcacaggtgagattaaactagaaacgttttagttacttgacaaacaagaaaccttaatgggtcgtaaagcagtctttaactaaaactttcccatggtttcaggtggtatgcgaaataccgtatgtgctgatccaaactacatattatacactaattatatacgccatgatgtgtttcgaatggacattggccaaattcttttggttttacttcgtatcatttatgtccttcctctacttcacatactatgggatgatgacagttgccctcaccccaaatcagcaagttgcagctgtttttgccggagctttctacggacttttcaacctcttttctggttttgtcattcctagaccggttagtgttggttacttttctggcaagaaagctgaaaccctaaatgattctctattgattctatcataagctggttttactttcctcttgcagagaattccgaaatggtggatatggtattactggatctgtccagtggcttggactgtgtatggattgattgtttcgcagtacggtgacgtggaggatacgattaaagttccgggtatggcaaatgatccgacgataaagtggtacattgaaaaccactatggatacgacgcagattttatgataccgattgctactgtgttagtgggctttactctcttttttgcgtttatgtttgcttttggcataagaacgctcaacttccaacaacgatagggtgtagttgcctgccggatatgtttggcgtgaagtagaaaaaaatgaaaaatgagggtttatgccatatagtttgtgattgatgctttattgattgtaagtaaagtgtacaatatatacaacacaatagattgtggggagaatttacaaggacaaatctaattataattaacttaagatctaaatttatgtatatcctaacagttatatccgttttgtacactattttaaaactttttacagatctaagataaacatagatttattttaagaatcaaattgtgaaaactctgcgtggaaaaaattaatcatgagtcatgacaatgatgagctagttaaggttccaagtgattgcaatcacattttgtgagcactaaagaacacatacacacactatatatatattcttgatcacctaacgagtgaatcaaaagagatgagtagtttattgtattttgggacaaacttcgattaaataatatttacactatttcatgaaaacatttgatcactcatcaaatacatcttatgaaggcgcatatatatctactgtttatgaaatctaatctactttactatatgaaaaaaacatacaaatttgccggagctttctaaagacttctcagcttcttctccggtattatcatccctagaccggtcaattttggttacttaagttgcaagaaatctccgtgtaacccaaatttcataaatgcgtagtgggatttactcttcttcttttttggtttcatatttggtgtttgcctttcgcgtaaaataccaacatatagcaaagagcgtttagacgtcaaatgtgtttgttttatttgtgtagagtatacatacttttttaagaaaagaaaaaagaagttatgaaagcttgttcttttttgttaaagattatgaaagcttgtttaaatcctaatcacatctcgtactaaataaagaactatatgtgtgtgggtaatattatccaatctctttaaatttaaaccacttgtctcatctcatatgcaaaacgtgtatcttgtaagaacacacgctcttctaatatagaaatagatcgcgtaacaagtggacttggaaaagctatagtttatggcgttttcggacagatttacacttaaataatattatcctcacatcttttaaattcaattatttcattatcttggttatcagaactgagttttgtcggtaacattgtatctttaaaaaaaattatcctaaacaaagaacgaaacgatacaatagtataaatttgttcttgtcataaacgataatttccaggtaagattaaggataaaacaaaaaagcttataatagcaatttaaaacacgaattcaacgtacgatccaccacaatcctcgtcgtctttcaaacttaaaataccgaaactacccttaccttcttctttccataagaaatcaaaaccaagtcctatggtcgcaattgtatctctatctaaaaatcttctttgaatttgtgtatacacaaatcttattcaacgaatcatttatcaccaaaaggttctctcttttttgtttgtttctgtcttgtgtgaatg

SEQ ID NO: 20963 - DNA, 3000 bp, Unknown; identical to SEQ ID NO: 6179
  misc_feature (1)..( 3000): 2750-1469P.txt file - cDNA_ID_1830242; gDNA_ID_1620852; Annot_ID_51009

SEQ ID NO: 20964 - DNA, 3003 bp, Unknown
  misc_feature (1)..( 3003): 2750-1469P.txt file - cDNA_ID_1830246; gDNA_ID_1620852; Annot_ID_51007
gaaatgaacatcatctacttcacatccgttaaatccatacacaatccatactttcccttgcaccacttcgagccctgctcctcctcttatgctaaaggaatctcctggattcgaacaatgaaaccacgtcttgtcaacgatattgtaagagtctagtgtcttgattcgatccatagcacccactccaccgaaaacgtaaacgttttcctcatccgctgccatcgaatggaaactacgaggagtgggtccttcttccaccggagttagcagtttccactcgtttgttgtcgtgtcaaacgagtagaaaccgttgtattggcgtgaaaagtctcggcctccaaaggtatagagggtcgatcctactgacaccatacggacacctaagcaagagaggtgtggaacgtctccggtggctggagcaatggaccaagtccgggtctcgaggtcaaagacgtaaaggtgtttatcgatgggctgatttggtatgagctcaccaccaaaagagtaaatcttgttgcctacttgagctatgccatgtgagcatcttagccctgggccttctccattttgctccaccttataattaattagtaatatttgttagctatttttaaaaggatttatattctgattagtaaatttccataattgtaaaataaaattaatcaaattataaattgcaaaactgtcattaattatctaaattccaatttttccctctctttttttttctttcgcgtccgtggtttagtatttttggtgctaacaaacaaaaccttcaatatacatagttgtgggagatctttgtatgttggtctaagtgattactaccttaatccagtttccaagcaatttgggagtggacggcaaagaaacataggcccctagggaatgtagaacgtcggtcgaacgtccatgaaacccaacgatttttccaccatgtagcacaaacttaaccccaggttttttaacgataggctgagaggttttgcctttagaagtcttgaatgaaagaaacgtgatcatttctgaggtcatatcgctaactttctcacggtaaccttccacgtagacgatgtagtcatccgaatcaatctcaaactacaaagaaaccatataattttcaatgcggaaagctaagcaacaaagaaaagagacactcttgaccaatcacaacatagcaatcttttttagtacctcttcaactcctagctcagtcttctctccatgttcatctccaacaaccacttcagaaccattggcatactcaaacttgacgaaggctataccatactggccttgccctacatatacctttgtaacattgtcgtaaacaccatcatcccatacatctcccgtctcaccaccctgtgcaactagcttttgggccatctcttttgcttgcgtttgataaatcttacgatttattacctgcgattagaaacgtaaccaaatagtttcaaaaagattatcatatataatgtaaccaaatactatactaactataatcatatgagaaaaggtagagagattacctgagaagtaagtaatggttaattggtgcagtgatctatgttagggaaatttcatggtatttattgacctggggaagatatggatgatggtcgatagggaagacttttagtttacatgatatggcaactcgtttttttcttctctttcttatttcttttatgagaagaaagattctcactatacgtaataaagatctgtatcttggccacgttcttcaaataagtataatctccccttgcatttttggcttaatggattggtagtgttgccctcaattctcaaaagggaaaccactttaagaattaatagttgtatcatgtgtggttgattaattgattgaagtaagatcatgtatatttaactatactaactaattctaaagctgatggaacgtgttcacgcacattctatttcatatagaaacaacgtttattcggtttaattcatttgaacctatccagtaacataagctgtcgaccaaaaacaaattaaataaatgaatatagtgggacgtaaacaaaggaaacgtaaacaaggggaattcttaccctttagaattttttttacagaatacaatttataaatatttggttgacagttaagttttccggacaagaatacaataattttgagcaggaaaataaaatataacttttcttttttaactcgtcgaaaagattattattatagaaaaattgtaaaataagttgtcaaatcttcgattgtttcaaattaaagacatgaaaatttcgttagggtgaattagtaggtaaggtaatctgattttgaacataatttaaataaatgactataatggcaagtaaacaagagaaattcatttaaaatatactactttgttatttgtcaaaagaatatgctactttaagattctcatacatcatatgaacaaattagattaaaatataatttctagaatacacaatgggaaaatatattaaacaaatcaatagtgtgtgagttggcattgacatggtaaatgcaaaatcaaaatacagcataacctatgcaattacatgatgggccttataaaaactacatactaaacaaacccaaaaatagaatactagccttattaatctaaaactcaaataagcccaaaattatttggaatgggctcacttccatatttggataaatttaaaatttcgggtatgagcaaattaacgcgagtttaaccactaagccatactcgcggcgcgtggagttccgtacgaaatatcgtaccgccgtctctgtgcgcgctatgattacggttataacagaacgatacatacatctatatatacacactccaagacaaaataagacctctctgctttctctcgtcttctccatttactcttttttctctgcagagtttttcggaaaaagaaattgttctttctcattgattctacatttctacagaacgagagagagataaggatttgtgagagaacaacaatg

SEQ ID NO: 20965 - DNA, 3003 bp, Unknown; identical to SEQ ID NO: 20964
  misc_feature (1)..( 3003): 2750-1469P.txt file - cDNA_ID_1830246; gDNA_ID_1620852; Annot_ID_170352

SEQ ID NO: 20966 - DNA, 1433 bp, Unknown; identical to SEQ ID NO: 2331
  misc_feature (1)..( 1433): 2750-1469P.txt file - cDNA_ID_1830246; gDNA_ID_1620520; Annot_ID_159443

SEQ ID NO: 20967 - DNA, 3000 bp, Unknown; identical to SEQ ID NO: 6164
  misc_feature (1)..( 3000): 2750-1469P.txt file - cDNA_ID_1830250; gDNA_ID_1620852; Annot_ID_51006

SEQ ID NO: 20968 - DNA, 3000 bp, Unknown; identical to SEQ ID NO: 6164
  misc_feature (1)..( 3000): 2750-1469P.txt file - cDNA_ID_1830250; gDNA_ID_1620852; Annot_ID_170351

SEQ ID NO: 20969 - DNA, 178 bp, Unknown; identical to SEQ ID NO: 2836
  misc_feature (1)..( 178): 2750-1469P.txt file - cDNA_ID_1830250; gDNA_ID_1620607; Annot_ID_161804

SEQ ID NO: 20970 - DNA, 3000 bp, Unknown; identical to SEQ ID NO: 6162
  misc_feature (1)..( 3000): 2750-1469P.txt file - cDNA_ID_1830254; gDNA_ID_1620852; Annot_ID_51004

SEQ ID NO: 20971 - DNA, 3000 bp, Unknown; identical to SEQ ID NO: 6162
  misc_feature (1)..( 3000): 2750-1469P.txt file - cDNA_ID_1830254; gDNA_ID_1620852; Annot_ID_170348

SEQ ID NO: 20972 - DNA, 3003 bp, Unknown
  misc_feature (1)..( 3003): 2750-1469P.txt file - cDNA_ID_1830254; gDNA_ID_1620607; Annot_ID_161808
ctatcaactataatcatatacagaaagaaaaaaaacaagtgttacatcacgcttagcttaaaagtttcgactttttgcaccgtcatatttcacgtgtaagcaagaaatacaaatgtaaatagattataattaatgaattctctcgactctctcaacatagtatataaaaggaaatctacacatgaaccgtatctttctcacttttgaaatattttgatgttttaaagaaattttttcaaaattttatataaattataaattaatttaatattttttgattatttatatttttcatcagtcttgttcataattggttgaattgttttaaagtaaatatttctttagctaaaacatcttatacaattaaaagaaaaaagtgtaatcaaataaccaaatataaattagtatttcaaattatacttattgcagggtgataaaccttttgtcccaagtgaagttaaacctataaatatataccccatttagagggtcctatataactaaagtaccacatatttggtggtttatatcattcaatttttttgtaactaacttaatatttgatatgtaaaatcatgttaaaataggatcagcagatagaatatataaaaaataagtcatgtacaaacgtaacgttcttcatatcttaggtaacgtatctaacaattttgttaaatattattattttaaaaaattgaacatattatttggaaacttttcttttgataattttgaaatggcactttgtaattaagagtttaataaagaacacgtcacacacaaaaacgaagaaagagattatagaaattaagttgtgttttcaatcttcgtgtatacaaaacaaaaataaaaattagaaatgatatttcatacgatgttgttaaataatataattatgaaaattagttgtgctttatattattatttttgttggaagctctagaaacgatcgacctaatagtatatttttgtcactaaaaagtgtgattaaaatatatatatatatatatatatatatatatatatataatattgtaattttcaaccaattctcggtttaggtggtttattattatattgttttttgaaaaaattaaaaaatatatccttattagttcattcttttctggtcattcgttcacactttacaacttggttaatggccacttctcaagttatcgttctttcatttgttctacagtcgcaagaaattatcgttctttcatttgtcattatgcataatgatttctcttttctttttagtgcataatgatctcactacataaaaaaatctatcttacgattcaactatatttagtcccatgcactcgctgcataacacattactttcttcgatttagagtgattttcacaaccttgtttctgtattgtatatttagttagtgtttgtgattaccaaaaaaaaaaattgtttcttcttggcttagtctttttatcttttttttttttttgcttcatctatttttcctcccatgacagatgaagacggcaagagatgcagcaaatctcatttatgatctatctgaagaatcagcgtcatcgatttggagactcgaaccataacaaaaagagcatcacagtttcaatttaattgctcctggcgcttcctatttcagcaacaaacattaaataattaatccaatagagatgatatatatggaaatttcaaaaccaaaaaaagaaactttcaaaaccaaaattgcgaagccatagaaatcgtggatcatggaattgcgaagaccaatgttgacatatgggaatttggtgtcccaatgagcagagatcactaagattggttttcgggaggaactttttgagttcatgatttgaagaattgtctcgcctataagctatcgtccatagtttgagattcatgcgacaagaagaaggtttgattcactttctccatttaattgaatcatcttcatagatatattttcatacttaatcaatgtttttaccaaaaaaataatgttattttattattttggttttatgtggtttgggattggtgtagattataaaccgattaaaccaatgtttttgtgttctgagatttcaaacttttgaactaaataaatatacgttttggggaatatccaatatcaatatgtatcatagtttggactctatctattccagtatgataattcccgtggaaaaatatatcatcgtctctattttatacatgcacttgcaacacaaaccagccataaagtgggtctattcttataatttatgacaacatggaacactatcattgggccacgatgcaaggagcgaaggacgatgcgagaaggtgctttactgatttgatgaacgtggaggtgattctgaatgatacgagatctctaagctgaatatataatagtatagtttttcgtaatttttttttgttaaattttttatcgctgctaaagattaaatggcgagtaaaactatactattatactttcaaagatcacccgagaaaatgatgactgcacatactttcaatatcccatagatgacatatctgttttatttccatcaagctattcatcgaaacaaaagcacatgacgattatgggagagaaacactactctaaaatcccgtaataagctgcaccacctaattttttgtgccttgaccaaaaaaaattcaatgttgcagttcaacgaaccttcttacggaggatctttaaacaaaatttatttggtacatagagaaaaatattttaatatatactaatttaatgcctcgcgatcaacgagtagagaaaaaatatgtcgcgtgtatcttcttccattggtcaataaataccaatgcaatgtttactacacaaatcattacttcagtctcactctcaggtcagctctctccacatctctctcatatgattgtactatgtataagatttggtaatatttgtaattacaagtaaaattcgtaaatacagataatattcgtaagaggttgatcaaacgaaagcaaaagagatg

SEQ ID NO: 20973 - DNA, 3000 bp, Unknown; identical to SEQ ID NO: 6157
  misc_feature (1)..( 3000): 2750-1469P.txt file - cDNA_ID_1830264; gDNA_ID_1620852; Annot_ID_50998

SEQ ID NO: 20974 - DNA, 3000 bp, Unknown; identical to SEQ ID NO: 6155
  misc_feature (1)..( 3000): 2750-1469P.txt file - cDNA_ID_1830267; gDNA_ID_1620852; Annot_ID_50996

SEQ ID NO: 20975 - DNA, 3000 bp, Unknown; identical to SEQ ID NO: 6155
  misc_feature (1)..( 3000): 2750-1469P.txt file - cDNA_ID_1830267; gDNA_ID_1620852; Annot_ID_170342

SEQ ID NO: 20976 - DNA, 3003 bp, Unknown
  misc_feature (1)..( 3003): 2750-1469P.txt file - cDNA_ID_1830267; gDNA_ID_1620607; Annot_ID_161814
aatactagaaagaaagaaaaaaaaaacttttgggcaatttcaagaaatacaaagatttgtgtacctcctctgttccaagtagtgtttgcttcccatgttcaagtgatacaatcttaccatctttctcgtaatcaaacttgacataaacaacaccagagtcaccttgtccaacataaactttctttacattgtcataagcaccaccgtcgtcccaaacatctccaccacgaccaccttgagcttccaatttggtcagaccacctgataccggcggagtcagcggtgtagtcgacggaattatataaactccaacagaatggatcaaatcacttgaacttccatgaaatccaacgattttgccacctcctagctcagcttcttctccagaggttagtccaaaaggctgagaagttttccccttgaatgtcttaaagattagagccgttacgatctctatcggtgatccaaagagcttctcgtagtaaattttcactgatgttatgtaatcttctggatcaaccacaaactagcaaaaaaaaaaaaagacaaccaaaaatgatcagttaatgttgatgacaagagaactctcattgaaaacaaaatatttacctcctctgttccaagtagtgtctgcttcccatgttcgtgtgatacgatttttccatctttctcgtaatcaaacttgacgtaaacaacaccagaatcaccttgaccaacatacactttcttgacgttttcgtaagcaccaccatcgtcccattcttctcctccacgaccaccttgagcttccaactttttcgccatcttttcttcttaacctaaagttatagtacccatttcttagaaactgtaaacgcacaagagccatgaacagacactactcaagcactttcatgatgatgaaactaatctaatctgaggactataatacttccactaggacattactttaaacaatggtatcatattctcatagattcattatcatataaagaaattcaataattcaaataaaactagtaaaaatcaatataacgattttgtgaaagaaagaaaaaaggagtacattaaagggaaggaagaaacacctttgagtgtgagaaatggagatgaagatggaatatgaatgagttaatcttgggattttgtatatatactatatagtatatataaaacatttttgaatacgaacattaaattctcttttcatccaatactaaccactttttttttctgccaatactaaccactttttcttttctttttgagagactttatattcaaccaactcgtgcttcacgagggatggaagctttgattagttaggacttaggaacttgtattaatctaaatatctttttttttttaaaattgaatctaccttacaacataaaatttgtaaagagaattccaaaattccaaaaaaaatcacctaaaattttaaaatcgtgaaagcagcatcgtaaagatgttctcttctgttttttttttttttttttaactctcttttgaatattggattagagattttcacagtgtcgtagattcttcgtagagtctgttatgagttgacatttaccataggaattgcattatcgtgagaaggttaaatgataaattgacatttataaattctcaaaatgtaggttatgagttgtcaaagaaatgtaggctatgaaaaaaaaaacttacgtctaaaaaaatgcaaagttaagaaagaaatactcaaagttcgtggcatttgaccatctctcagctacacctcaaattatagctcatgagaatggcccatgaatatgattgtggctccgttaatcacgtggtattaaaactcacacacgaccatttctcatctgcctccaattatagcgaaaccgttacaactcgttgttcacgtgagcatcaaaatgtgcattactcctttcaagttcggcaaatcctaattatccattttaatggactgcagagactttaattagagcttatagaactttaaacattttggtttaaatcttaaaatagaaatttaaccaatctcaaatgatttttttttcttttcttttggcataagtttcataactcgatgatgaatgctacgataatatagacatacagtatgatgattagatgaaaacagataaagaagaaaaagtgtatcgtacgccccactcggtgataatgattaatgagactatatatgagagtacccaaatatgattttttccactcatgaatcgtattgcactatttctgcattattaagatagacccacatttaacattagaccaaaaaaaaaaaaagatagacccacaccacctgttatagtatttagtatttttacacatccactaaacgacgacaattgacaaaatcacacaaacctttctcctttattcatttttgtttaattcgggtcccttgctttttagcattcggctctcattcttatcttcccatggatggatagtcatagttatataatacagttcaattgaagttatgcagtatatatatgcaccacacacgagtcttctatatatgtggatactacgtttcaaaataattctattaacttagagaagataaactttcttagtacttttttcgtttcactttacacacacctcaaaaaaattcttgtttcatttgtgactgcatgtaaatgtcgttaccttacttgaatttttacacaatggtacgtgaaaaagaaaagaaaaaaaatataattgagagaaaatataataggatcacaccactacaatacatgggctttaaattcatcttttctatatgttataatttgggccaagactattatatcatatgggcctatcaatgtaattagaagcaattgcccgatccaataaccttaattaggaaaaaaaatcgttcccttctctcgtttcttttcagctctgactcggcctctatctctctcccgtcgtcagccacattcaccggtactcatctgaccaagctagggtttcgcagtcatcatcatg

SEQ ID NO: 20977 - DNA, 3003 bp, Unknown
  misc_feature (1)..( 3003): 2750-1469P.txt file - cDNA_ID_1830584; gDNA_ID_2214482; Annot_ID_133282
tactaagatgtttattggttgatctggcaaaaagaggaggttacatctagtggcgggcctatagtaaataaaattcctgtttctcacccttaaaaagatagaagagtggtccacaagcaaagtttcgtgattggctctgtttcactgggccattaatacacacatatccacagtctttgtgtatacaaaagatgattatggttgtaaatagacatatggaaggacaaaacacgtcataatagaaagcttaggaacctatgaatggtggaaacagcaaggtcttgtcgcatcgagtaatctgtaggaaacattatctttaacagttaacagtacaatgcaccactttggcactgcctttgttatagtcaagagaaatgtacgaagtgagaaagaatctttttctattagtggttatacgtttaacccttaatgtctctcaatgtccttctcatagatatctaatagctaaaacctaagttacctcatgctcatgtttcaattctttgcaagttgcaatgtgaggccaacaaagcaagcctgtcaaatcgttttcagtcgtatccttaaccctcgtgcaaatcttttgtcatcatttaatcttcttttgtactctttgctccattatcacggctcttgaccatatgctaacaaattaaccgtcaggctttttgggtgtacctggacttgcttcttgggactgttcacagtctcggcgaaccgcgactgcataagattcccgcagaaccagaatatatcatgaaaagattcagtattattgttgaatatccggaattatgaactttagagtttgtgttatggttaacaattaacaaactttatttatgtaacgtaatctcacacattgttttgctacatttgggttagaaataagtttgacaatcctttgtaacacaatgataccattgagttattgcatctaaaaaaacacgtggtttcattatttggattttggacccaatgtcattttattgggcagtcttttacggtaaagtcaaatctcagaaatggttggaaatatttattttccattccttctttggttatgtttgttacgtgttgttctcagcatctcacgctccataatatctgagctcatcacataacaaaaccatttttgtcattttttcaaacaattttgggatttcgaaatggacccaatgtaaaagaaaaaatttccattaattctgtgtcctagaaaaatagttttgacatattttaaaattatttgaaattattaatatacctcgttttaatactatttactaaactataacaacttaatctgagttatgccaaaagtaaaaaataaacatcctattaagtgtcatgttaaaaagaatatatataataactatatcatgatatgtttgtgatatgaaagaagtaaatgtaaaaatgtttctagtttagtgatgagtttacgaaattacagaaaggtaagatattgcttcaatattaaagtggatgcattaagttccatgcatgtttccctttctctaattgtaatgacaagggacatcaaggcttaaatcttggggcaagatatcgcaagctttttggaccactatattttttttctccatcttccaattttattggatgcatcaaacgcgtctttggaccacagtcgcttttgattttcactgcaagcttcatttgttcatgcttgaaacagaatggaatgtctcagaaattttactattgatccaagatacttgatttgtcataaatttctaggtcggcaactactgcaagtgaaaaaggtcatcctcatacatacagttgttctatgacgagaatatccggatattttgtcttgattcataggactcaattttgaagatcatagtatcaaaaagaacttgaaacccgaatgaaatagtattcaactttccgttcttattagtttcactataaaaaaataacgaaaactttatttgtatttcgtacaaatccaattcaatagtgcatttattttttccatgtgctccttagatatactgcacgtgtagtattaaaatggttggatgtatttctggtgatgaggcttaagtagctcatagaattaggagacctaattaagtaactcggaaaatgtagactctaactcgcagtaatgtgaaatcttactgtattacactttattctgaaaatctagtagaaaacaccatgagttttttaatatgacgaaagacgaaactatatatacttgtaaacgtagagaactaaaatttatatacaatttagacattttttgttggaaatatttatgatatttttttatacaacttttatacgcctcttcctatgagtatttttagtattgtcggtcaatttcatacgaatacgcttaccatcattaacagaaaaaaacaaaacaaaaaaacgcttatttcatcaagcatagtacggcataaagtaatacaaaagaatatgataaattcaaaacggcttattaagtttttgttgttgttgttgagaggatggcataggtttattgagtgattcttatcattggatacctgttgctgaccagaattttcggccaaatatacataggacttttgttgtattttcttccatatttaaactataataaacaatgaaccaattaaaaaattgtatatgccatccaaggatttatactgatgatgatgatggtggtggttacatgaccaatgtgatgatgatgacattaatgaaaaggaaacaaaaaatctagcggtggctttatatatatcacatacttgaggagagtaaggcaatagctaaactaagcaaatctctaagacttgttctcattttgtttgttcaaaatcccattaaaaaaaaacacaatgcaaccttaaattatttccgtttagtctctctcttcacagtcctgacctctctcaactctcacaacattaccaaatacatcccataaaaaaacaattctttaaaaaaaaaatattttgatataaacagaaaaaacaattaatg

SEQ ID NO: 20978 - DNA, 3000 bp, Unknown; identical to SEQ ID NO: 11236
  misc_feature (1)..( 3000): 2750-1469P.txt file - cDNA_ID_1830751; gDNA_ID_2214485; Annot_ID_133350

SEQ ID NO: 20979 - DNA, 3003 bp, Unknown
  misc_feature (1)..( 3003): 2750-1469P.txt file - cDNA_ID_1830895; gDNA_ID_1620863; Annot_ID_51288
aaggacacttttaaaggcttttcaggttttggatgcgatatacctaatacctaatttctttgacatgattatactataacattaatttacatttgacttaatactattattgtatgtttttgtaaattaaactcaatttttagatatgaaagatgcacacgagattataaaggcaatttgaattgaataatattagtttggtaggtggttcatgtaccaaacaaagcttttgatgcgtgttttgtaatttttggcgtataaaaaatctcttgttaattcttaaaagaaaaaaagaaaaaaaaagaaaaaagaagaaagaattattttgttagtagattactttttcttatttcattatcctacgaaaacgtacaaaaactatatatgtgaggtttgctttcagaaaaaaggaaaagtgtacaaaacgaaatatgacaatcttatataattattttaaaaagattgcataattgatgtctttggttactcaatttctaatgttattttttttttcgtttttttttttatttttttttatttttaaatgtactacacaatttgtgattactccattgggaagctatatgtactacatatattttaccgtcactcttttgaaagctatatgtactatacaaattatgttttaaggaaccatgaattgtttttaagattacttgaagtctacgttttaggtcttgacaacaaacaaagaaaaaaagaaaggaaaaagactaatagtctaatacatttaggtcaaagcttatctcttgatctttcttaagtggaaggttcatattgttatctttgcctttgtttttcttgttttttatttgttcgtagaaagcataatgaatgattcagacagagagaaagtatatttggtgtattagcttttgataagtggagtggaagtcacattccaacgaaagaaaaagtaaactaactattccaatgtttcagaatttggttctctgtaatagttccgagtttatatcataccaaaaaaagaagaagaagagttatagataaactcattagatatgcgattttggaaatacaatagatataaaatgaagaaaaccaaaaccaaaaccatagctatatttttttaagaatatccaatggcaatagctagtatcagaattcttagattaacgcacatattattagcttcacattgcatgatatcattcgttacaattactatttgattaatctaagaatataattaatatctaatggcaagagctaagaattagaattcttagattaacgcctatattatttagcttcacattgcttgttatcacatggtacattagattaattgacgccatggtatactcgtttccagtactattagactaacttctatcatagtttttattttgacttttgtctttgttagttttttttttgtaattgttttatgcaattattttaccaatcaatgtttttttttaccaactctagtctactactatgtttagtagtctatattagtcagtaaagaaataaactatacatattaatttttcaatgttttttgtatgcatttttattgggtaaaaaaatagttcaattggtaaattttgtatgcatttttttcaacaaactaaaaatagtatcattggattttcttaaagatatctaaatgatactattttgatacaatatttttttaacatcatcttgaatttgaataatactaatctgctactaaaaaattagtaaaatattggcaaatcatatatttgttctaaaagtcatttataattgaaaagattcttataatttgatttaaaattactgacaagttacaacatgctatcaaaaactagaaaatttatcgaaattagatttcaaacatatattattgcatttttttcctcattttcaacgtttaagtataaattaattataaacaatgggtgcatttatttgactactactactatttaaaaatataaataggtctcacgagtctaccactcctcgggatcagactaggctacatccattgaaccatagtaaaattaccgtggaaaaaacagtacagctgtaacttcctatataaacacaaagatccatgtgcccataaacatttactactagtctactactatcgtattttttttccttcgtctatgactacactaggttgtttaattttggaatcaaattaattagtagacgacgacttcaaacaataattatttaacatacacgttttgaacaactgtatgcaataattaaaaaatcaacaagaccaatcaaaatcattaacaaatgctgtaaaaaaaaccattaacaaatgtcatttaacatgtttctaagaatatttaatgaaaaaagtatagatcaaagctctagtgctctagatttttcattaaaaatctattaatattttcagttttttttttaaatgttttcagatattttaaaactctattaatatttccagattttttgttaactcttgaacaagtactattaatatttcctttaattacatacgtacatagtaataatagatttctcctataaaatgcttttctttttttacttcagctcctatataaaatactcggataaatagatcctaatcaataaataaatagattcagtttttcttttgatttagtcgtgtacaatgacgatcacaacaaaaaagcccataaatataatttactcaaagtgattaagggtaaaattgtcattatctgatacgtgttttagttgaaaaattgctatcttccaccttcttctatctctctacgaaaataatatttttgagttttgtttttactttttgtttttttttttaaaatttttttttcttcaaaaattcctccattgttattacataaaggaaaaaagaaaggtctctgagattttcaaatcaccatcatcatcatcgttgaagaagacgaagaagataccttcctctttatcttctccgatttctcaaccttcccgtctgcttgtcgtaaagaaatg

SEQ ID NO: 20980 - DNA, 3003 bp, Unknown
  misc_feature (1)..( 3003): 2750-1469P.txt file - cDNA_ID_1830899; gDNA_ID_1620863; Annot_ID_51287
taaaagtaggcaagatttaaacaaagtgattcatcaataatgatatgatatgtgtcattcatttacaaattatgtaacacataatagatattttgtaccctaaaattttgaaatttattgtacataaattttagaaaatctgttggactgtgactagttcttcaacttatagagagttgagtgtgtttataatcacatactgcctctttaaaaaacgttaaccaagtcgaaactcgaatatggtactaccacacatgacaaaatagaaaaaacacttgaatgtttaccaagtagtacttggtccattggcccaaaaaaaatgagaatttgtgctcctttgaaaggagttttcaactgctagacccaacccaaaagaatgtacgattaggcacattttccataattgatgtaatgtaaagaaacacttgaattttaagttttacatataatatttacatttaattcatcttcctcatgaatatgttgttcaattatcaaagaacctacaaagatacagtattataactataagatcaccaaagaagaaaacaatcatttgaataacaaaaacagtaaaacaccatataataaaaccgtgttctagatacaaatgtaaaccatagtatctcaccttgcttatcgattcatctttgtaaaaaaaacaaaaacaaatgtgttcaacttggtttgcaaaaaacaaataacacaagtacacaaccatccatccaataacacaatcacaatatttgtttcccaacatttatgcaaccttatttttagtggacactaaccatagaagaacaaatttcagttgtagtgttacaaagtccattaaaattacgcgttatcaattacaaaaccacatctgttttttttttttttaaacactttaaattttgtgtcagataaaatgaatatatgttatgacagcaatcactttcaaaaggcctatcaaatgggtcccaaatgtataatcctaatgtcaatcacaagtaacctaagttcggcccaaatacctgatggtccactttacaatttttcattaaataaatattaagtaaataaaataacagtaaaaaaaaagagttattcagtctgaagaacattaaattaaggttattaacgtcaaagaaaagataatcattttctctggtggcggcgttttaaaaacatagatttgaaatttttaactttattctataaaactaaaaagctctctgtctagtagtatctaaacgaatttaactaaaaccagctaaaaacaagaagcataaaaataatatcaaagtagaaactaaaggatctaataagtaagacaaaattcgaaattaagatccatggcggatttttgtctcttctctcattggatcgcacttgacacaaatgatggttcgagacataacagcagagaagggtccggtccgaaccgaaacggaggaagaaagcaaaaaggcaagacctttgttgttgggttgttgataaagagagagagagggggacacgtgtagtgaaaagagaggaagagaggtcactctccgttcccggttctgtctcgtgcggtgcgattgttgggtgccatgtcagagtccgttcccctatgagcccggcgaatccgaatcatatgcctttcttttcgctatctctctctctctctctctccctttaacccaaacccatctctcaaagacttgacctttctctctctctatctctaatttatttatcgtttcgcgtgtcgccttctctctttctctcattctctctctctctttcccttcgtatctctctctcgtgaggccgtgccctagaagaagaagaagaagaagcccctttctccgggacttcaatccctaacttccgtcgccggatttctcgtccttgattatcggaggactctttaacaactttattccgatttcagattcccagatttgtaagctgctttctcctttctgggtatttcctctttttgtatttgcttatgtaatttcgatgatttatcttacttggtgaggggttttgatgcttgtgtaatgttaatgctgtttaattaaggactgatttagtgtgattcggtttaattgagtttctttgggggggaattgggtttatctccaatgaagctttatgtttagtgccaatgtgtgttgtttagctcttttctctattgatttgtgtgtgaaattatgtttgtttgagtttcattaccaatggctgtctttacttgaatctcagtgattcatgaattctaccatctgtcgttgattatttcagttatataggatcattgatctatgttttagaactagtgtattattgccttagagaacacctgattttgaagtagaggaatgtagtttgcagtagaggaatgtaattaagtatgaatttaatggaagtattcgtaaggagtgagggaacgaatcgtttattataaaagctgtgttaagattagattacttactaggtttgtgtctcatctttaattaagacttttgattacggatggtgaggcttctaacgttataccaccatttttaggggtgacatcatttagtttcttagcttctatagcttatatgcttggatgacgctgtttgatttcatatcggtttaaaagtgaatgaaattgtggttatggccttatggtttggtacactgtgctttgtccgatgctgcatcattgatttgagttatacttcatttaatcttatcaatttttctgttcagtatttctgagcatgtgtacaatttaagtatttaactacctcactgttgtttcagtgtctcttgatcttagattatggtttacattactcgttttttgtttacaattttagtgtagagacagagttttttgaaggccagtattctttagttacttcggtagctgtgatttacacatgaaggtctatccggttctctatcaagcatatggtatggaaacagaagtagaaaatgaaagattcaggcagtgaaatgattaaaagagattgggtcatg

SEQ ID NO: 20981 - DNA, 3003 bp, Unknown; identical to SEQ ID NO: 20980
  misc_feature (1)..( 3003): 2750-1469P.txt file - cDNA_ID_1830899; gDNA_ID_1620863; Annot_ID_170389

SEQ ID NO: 20982 - DNA, 3003 bp, Unknown
  misc_feature (1)..( 3003): 2750-1469P.txt file - cDNA_ID_1830914; gDNA_ID_1620370; Annot_ID_154967
ggtttgtagagagattggagaagaatgttaaagggggtgactttttttgaagatcggatggattttttttttctcagagatctcaacagggagagaaaaaagacaaggaagacggtcacttcatggttaaaaaagtttgttggaaaatgaactaaaaattctaaatttagcatcaaagacacgacgagaaagaaaagagacagggtcaaagattttgtttttttttttaaaaagaaatatagttcactaattaaatcatggttaattaccttcttatttgctaagaaaatttgagacagttaactaaaactcacttttcttcgtaagcattgtaggaattcggtactattcaaaaagagggaaaattccaaaacaaaaacacaattatttattaattagacgtttaatatgtaatactttatggttagaagaaaaatatgcatattaataaaaattgtgcaattttatcttcaaaaaactaattgatgttattttcatatcaataattttacaacaaaattttaattttaattttactcttactagttcaattaatcattaatatttaagtgatgcaacattaattttattttatttttaaatttactgtttattaatattttgtttctgtattcatcccaaaagattttgtttttctaaaatagattattttatttttaaaattcaagagaaaacaaattaaccatttttatgaatagataaattttgagaaatacaatgactttgggattgagattttgtcgaaaatacttttattggtgaagaatttaaattcaaatagagagtttctcacgacgaagaagaagttcatatcgatgttcgttgatatcatatccatcacaacgaaaaaaaatcgtgaacggctatcgaattcgatgttggaaaaagagggcaaaaggagattgtttaacggcgattcacatagcgattaatcgagaaaatctagaatcaaaaattgaatcctaagagaaaacgtctctttcattttctcctaattttttatgttgaattttaaaataaatgaatatataatagtaaatgaaattttaaaattaatgtacataaaattaatttctttatccaaaagtgtaaaattaatgccacgtcatcttaaaaactaataattaattgagatagtacgtgcataattatcatatttttttatgatatcgttattatgaaaataaccacatttaaatgtttaaatattaaactacacagtttattaatctttttcatccaaccaaaaactattagatattaaacgtccaaataaaaaatgagattttttcctttcaaaatatgtttacaaaattgggctttttttcttttgaattttgattttatacttctcaacctagcaaaaattcgatgtcggttataaaaataaatctctatcaaaaatttgttacgtagaggaatacgactaaaggaagagaagaaaatagggctatattaatttatatacccagaaaacataaaaataaaaaataaacttataattttttttataattagttctctttccacaacttctataagttggactaaaataccctttcgctcataataaactaattaacaacataagaaaattgttaccgacatcttttatatgattcagatgatattgtttatcaaatatataagtaagaatatattatgaattaactgataactgttatgttaacaagataacaaaatatatagcaataagtttataactatattgtgttaaaccatattgtatcgcgataagtttataaatatattatgttaaattatcttgtaccaataattttttgttgttcattatgttttgttatttgttaattattttaatatgatgtaattatattgatttgatatgatatacatattattttgatataaaatttaatacttatccattaaaataacgtgtgcataatcaaaatccggattattatgattaaatcctcttattattaaaagagaagtacaaattgaatttttgtctaatttgacctcaattttgatttcaattttggattttcttctttgctattcaaaatcattaagggtaatttggtcttaacaatctattaaactttatatgatccgattcaatctaaaccgttcaataaaattaattcccttcaatctaaaccgttcaacaaaaataagtaaataacaaaaaaaaatcccaattattatttagttatgtttgttttaaaaatttttatttataagtttaagatatcaaatttattcaaatatttagtataaaaaccaaataaaccgattgtccgcggtaaaccgcgggttaaatcctagtagatagttaaaatgtatagcaaaatagaatgcgtaagattaaaattttagtttttagaaatttactaaacaaaatacagaaaaggtgtgttgacaactatttaaaatttaaatataatcaataagatatagttaaagttattaagtgtatagcaaaataaaaattgtaagaataaaattggatttaaaatttttttagtaaattaaatattttaaaaatagggattatcatttactgtttagaattcaaatatcatcgataaaaatttatactattgttttataaatccgcttatctagacgggcctaacctagtaaatatataatacacatcttatcattcggtcaaaatattatgaaaacatcattaaaatttgatgattacattccataagtaatttgttaaagcattatgcattttcctgttctatggacattaatttgaaccatacgactccatctaattcacttgttctcggcagctagcattcgaatcctgacttttcaaatacaaattatcggtcaagatgggtgtgcgttacgttcatttacaaatcactaaaaatgagtggtgaataatcatttggacaatacggatacattcatcgaagttgactccattatcctaccgtcgtctcctaacaatcgaagcacaactttgcaatg

SEQ ID NO: 20983 - DNA, 3000 bp, Unknown; identical to SEQ ID NO: 6184
  misc_feature (1)..( 3000): 2750-1469P.txt file - cDNA_ID_1830914; gDNA_ID_1620863; Annot_ID_51281

SEQ ID NO: 20984 - DNA, 3000 bp, Unknown; identical to SEQ ID NO: 6184
  misc_feature (1)..( 3000): 2750-1469P.txt file - cDNA_ID_1830914; gDNA_ID_1620863; Annot_ID_170381

SEQ ID NO: 20985 - DNA, 3003 bp, Unknown
  misc_feature (1)..( 3003): 2750-1469P.txt file - cDNA_ID_1830918; gDNA_ID_1620863; Annot_ID_51289
atagcagcaggagtgtttttcccggttctgcgggtgcaattaccgccttgggcagccggagcatgtatggcactctcttcggttagtgttgtttgctcttctttgcttcttagaagatacaagaagccaagacttaccactgttttgaaaatcaccacggagtaaaaagtcctttgttttcttacattggagtgactcgactacttttgttctgaaaataatttgtatttacttttcttttgtgctgttgttgttgtaatcatgtaacaacgatattggtcttggagaggtttctttttttctgtaagaaatgtgtcctctcggcctttgttgtaaaaaaatggtttcgatgctttgtgctcgattattaatgtaaaatggtgaaagtagtgaattcctctaatgtgactataaaatgatatttttatctgataatcgaatacagatttaacacgacatattgaatttagaattgttctgaattttgcgacatcaattattattattatgtaagaagtaagcaactatagcttttgccaatctttagcgagatttccggtttaatatacctaaggtttttgcttcacgagtccattgaagtccaagattaattatccattcaccatcttagtgactgtttattgggagttgattttcgtatcagaccgcactgaacagcagttgtagatcatttttgatctttcgtttcttgttcctcacattccatttgtttcttctttttcatcttgtgtaggagtggttagcttacgtgaagtgggataccttctgtcttaattttcaagtcaaagatcttaccaactttttcttcctttgtacttgacgactcatacatattcttcttcgttctttcaatttgagacttcttctccttctttggtcttcttgtcaattggatgattgagtagagaatcaacttccaacagtaatcaaatgcctcaaagtttacaaagttgcattgtgcttccgatgattgttggactgtcaagatagtgtctccttcgaccatgttcatagtagagcacatgcatagatcaaattcgtgaaagctgatttggcatctgcaaagatcaaagtgatacctatacctataagtattaaccaccagtcaccagatttaacattgttagagaaaaacttgtatatattcatgatgtatatctaaatctaatcatcaagaaagtattttgatcaagtcaaaattacagaattgttttgttatttgaatacaccaaaatttataatatactagattaggacttgcatatctattaacatgttgaatattgataagtacctcatttaaaacaaaatttcagttatacgtggttaatttcgcaatacaacattaagaaaaaaaatcacatttcaatatcataaacttaatatcaatcaataaaagccaaaacatttcatatcagaatagtataagtatcatatcaaatttacgtacatacatagttagtattacacaaataataataataataataataataataataataataataaataataataataataataataataaaaataccatgagtacagaaaatacaatttgacatatcgacacgaaaattagaaaacaaacatcatcttaaattaatttttgtcggcacctcataatctcatgactaataagtaataatgataccacgtgtcacatcagtaagaggcttataaatatattaatcttttcatgaaccagtagaaaatttattcccatgatctcattttgtttattttttagtttcctttttgtacaaatcaaaaacactatggtacaatgctaaacattctaattttagatatatataacttaaattgttattttatattgttacactcattgtttttattgcatattcatgtgtaagtgcatggaaatattaaaaatttgaaaaccttattacataaaattgagtactcaatctagtctctcttataagtagacaatgagttcaaaataattaaatcaaatatagtaaaaaataaattcaattccaagatttattaatatagttttcattcgcatgacaatttgtttcgctgtttagcctacgaaaataatcaaactttaaaattagtaatgtaaagtttgcaaatttgcatgcctagtcttatcaactcttcgaaaacatgtttgaatttgtcatctctagtgagaagtgtcaagtatggtgttttgaggcttgcgacattcacatcctttcatatagatttttctagtatttttcgaaattcgaccatacatcgatgagaaacttttctctgacactcatgtcacacttcagaaaaacatattattgtattatttgattgatatttttggttcaaaattttaaaaaattatgaatgtaaaaactaaaactaaataatcatatttgaccaactgaatgtggaaattatatttgaccaactgaatgtgaaaattaaattttatgaatgtaaaaagtgaaacaaaaaatttattaaagtcaaaatctcgtccgagctcagctgaatgtggaaattgaatttaataattagagttgcatcaattgcagttataggtatttcacatttcataaaaagcatattataatatcaattggcttatctttttagttcaaaattacatgtttatgagggtaaaaaataaaatacaagtctcggctaagtttgatatactacaaaatcaactaaaatttcgtcataaaaaaaaaatcattgtggtcgtatctttaggttaactgtgtataagtgaataattaaggataaacgtcagattctaggccttttggaataacggcccaataattattatttgggcctgttaatcacttgtttccccttaaacctttggcgcccaaacaaattagggctttatcttatcttcgcgattctctcatttcctccctctaaaattccccggcgacacagttcaccggaaatcgtagaataaatcagattctttctctttagtatgaaacaatg

SEQ ID NO: 20986 - DNA, 3000 bp, Unknown; identical to SEQ ID NO: 6189
  misc_feature (1)..( 3000): 2750-1469P.txt file - cDNA_ID_1830925; gDNA_ID_1620863; Annot_ID_51293

SEQ ID NO: 20987 - DNA, 38 bp, Unknown; identical to SEQ ID NO: 6202
  misc_feature (1)..( 38): 2750-1469P.txt file - cDNA_ID_1830941; gDNA_ID_1620864; Annot_ID_51318

SEQ ID NO: 20988 - DNA, 3003 bp, Unknown
  misc_feature (1)..( 3003): 2750-1469P.txt file - cDNA_ID_1830941; gDNA_ID_1620724; Annot_ID_49254
aagaacaaagaaatcaaatttcaatactgaaaaatcaaaattaggtaaatttaatgtaagtgaactaacaatttaaaagaacagaagacttacaaacatgatacgatcaaccggcagtaaagagatgacggtccaaacggttgcgtttgcaaacattgcaaaccctaccaagaacgacatatgttcgacgctcttagttcttacaactttcacttgcgtttatcattatttcgttgttaattttttttcgtattagtaatgcgaggatatttattaatctttgatattcataaactaaacttaccaatacagacaccggagaaaacgcaacagacgtccacaataacaaatcaccgaagacccaaagattcgatgaaacctaaagccaacgtggcaaatgtagttacagataccacctcgagtaccaaaatgataatcactaatcgctgcgtagagtgcttgcaaaatctaatatatgcggccaaatagatccccatgatcaagactccaatcccattagtgatgagggtaggagtcccaataaaaaaaaagacttacaaacataattggatccacatgtagtagatagacgatggtccaaacgattgcgtttgcaatgtttacatatttagcttgtttttgttccacatcataaaagtaattaaagaaatttttattaattaaagaacaagttctctcgaagatcacgaaggagagaagaaagtgcaatctttatagaaatatgaaaagattagatgatagtaaattataaagatatagatacatgcataacataagcaaaatatatacataacataagcaaaacataagcatattttgtttatgcgcatatcacattatatagactttgtttagcaatgtaaacatcataaaattgattcattatgtagagtaaataagaagaagacggagaaagcggtaaaaaaagatagataagaaaacataagtatatgtcttaaataagaaataataaatataggttatggtaggccttggcaaaaaaaccgtacctgaaaactcgaaccgaaaccgattcgaaaaaccggtttggggcgggtacgtatattagctatttaccctattgggttttagattgttgtacccgtggatataggataatagccgacccaaacccgatacccgaaagggtatcaacttatccgaaattacatatacttattcatagatttatacatataaaaatttattttatatttaatatttgaaccaaatacatttatatccaaatatccaataataattactaaaaactaaatgtacctatatttaaatacttaatactaaatattttatatatgcaaaatattcgtaaatgttttggatatttggacaaaatttcggttattcgggtaaaattcagatatttgggtaaaattttcgactatttgggtataatttcgggtatttgggtaaaattatcgactatttgggtacaaatttcgggtatttggtacaatttcgggtatttgggtaaatttttgggtatttggatataaaatacatgaatccgaaggatacccgtttttttcgagtatttaacggttctaaaattctatacccgaaccaacccaaacccgattagaaccgaaccaccgaagttttctatttactctattggattctagaacagtatacccgtacccgatcgggtattacccgaaccgacccgcatacccgaatacccggccctacgttatggctataagtgtatttactatacagaaaacgttaatccaaacaaagaatatggaaagcatgcatatctatgtagactaatgttaaggctattacaattggcaaccgaaaatttcgtgttaagttgtaatttagtatacgtacaaaatctaaaagtacaatagctttgtattaatatttgcaattttctaacttgatggattcagaaaagaacccaagaggtttcacttcacatacatgtatttttgaaaaataaccatgtcacttttacaattgttttttaatattaacaacggacggctacgatggaaccatcactcgaggaaatcgcgatcctacaattacatttagccgcgattcggtgagtaaacaaaccgagaacccgaacccgacccgccatctccagcttcgactctatttccactgttgacccggaccgatccgaattttgaaattgggcggcggagatttgagaactagaggccgccgcgagaggaaacgactgaacggagaaagtagctaacatacgcttggttcgacccgattcgatctcaccagcaggtacgaaggtataaccgatccggtttccatagtaaaagagctggattacattgttgtagtgtgagaaagctgcgcggttagggtttctaacggcggagaattgagaaaaggtgaaactaacggagctattagcgacggagaatgaaggaaccttgacgctagtgacggagatctcaggatctctcggtctaaagactgtgagataaacagtaagtgcggcgatgattaagaagactatgaagagcgtggcgacggcgcatgaagcgaggtttgaacaagacttcgacatttctcggtggagatgtttggtagcgatgatttaagtgttcactagttgggataaagagtttatttttggttaaagggaaagcaaaacgacgtgtaaaagcaaaaggatgttttgtttggacatagtgataacgttacaacggagtttggacttaagtgtgtgtgatgcagcgaaggtggccgactagagctaaataaattattttagtgaacaaacaatgtacccggaacagaaaccgggtttcgaagtcgggtcgaattgttgtaatttagagctaacagaacaaaaacctcctgagattgaataaacctccgattgctctattttcttatccagaacgaagagagattcaaatttcgcaatgcgattctagtgaagcttctttttcttctgtacatggttatcgtcgtaaaatg

SEQ ID NO: 20989 - DNA, 38 bp, Unknown; identical to SEQ ID NO: 6202
  misc_feature (1)..( 38): 2750-1469P.txt file - cDNA_ID_1830941; gDNA_ID_1620864; Annot_ID_170439

SEQ ID NO: 20990 - DNA, 3003 bp, Unknown; identical to SEQ ID NO: 20988
  misc_feature (1)..( 3003): 2750-1469P.txt file - cDNA_ID_1830941; gDNA_ID_1620724; Annot_ID_165902

SEQ ID NO: 20991 - DNA, 3003 bp, Unknown; identical to SEQ ID NO: 20988
  misc_feature (1)..( 3003): 2750-1469P.txt file - cDNA_ID_1830941; gDNA_ID_2926184; Annot_ID_140705

SEQ ID NO: 20992 - DNA, 3003 bp, Unknown; identical to SEQ ID NO: 20988
  misc_feature (1)..( 3003): 2750-1469P.txt file - cDNA_ID_1830941; gDNA_ID_2926184; Annot_ID_200488

SEQ ID NO: 20993 - DNA, 3000 bp, Unknown; identical to SEQ ID NO: 6204
  misc_feature (1)..( 3000): 2750-1469P.txt file - cDNA_ID_1830949; gDNA_ID_1620864; Annot_ID_51315

SEQ ID NO: 20994 - DNA, 3000 bp, Unknown; identical to SEQ ID NO: 6204
  misc_feature (1)..( 3000): 2750-1469P.txt file - cDNA_ID_1830949; gDNA_ID_1620864; Annot_ID_170433

SEQ ID NO: 20995 - DNA, 3000 bp, Unknown
  misc_feature (1)..( 3000): 2750-1469P.txt file - cDNA_ID_1830953; gDNA_ID_1620864; Annot_ID_51313
aaaagatatttaattgtgtggtggaacagatgatgtacgaagacatgaagagtagagtcgaacatgtggtcgagagcggaaaagttgagactgcgtttatcgcatgcgatcaatttagttgtgtgttcgatctgtggacagataaattcactcgtcatgaccatcctaccattattatggtatgtaactattttgtaatgcatggtaaaagtttcgtcacaaattaatgtttctaaaaactcgtttttatctattaatttgtggtgaaggtgctacaacataacgaaacagagatgatgccaaaccttatatatgtttcaagagaaaagagtaaagtttcaccacatcatttcaaagccggtgctcttaatactttggtatcaactaatccatatctcggttaaactgtcatttctatatttgtaatatttcgttaaccacaacatgtattttctttgtagttacgtgtatctgccgtgatgacaaactcaccaatcattctaacactagattgtgacatgtactcaaacaatcctacaacaccacttcatgctctgtgctatttgtcagaccctaaaatcaattttgatttaggatttgtgcaatttcctcaaaaatttcaaggagtaaacaaaaatgatatttatgcatccgagctcaaacgcccatttgacatcaacacggttgggtttgatggacttatgggaccagttcatatgggaactgggtgtttcttcaatcgacgggcgttttatgggcctccgactactttgattttgcctgagatagaaacatttgggccaaatcggattgccgataagcccattaaagcccaagatattttggcgttggcacacgatgtagcaggatgtaactacgagtgcaacaccaattggggatccaaggtaagattaaaatgaactttagctttcttttatgtatgttgattttttggttatgtttacagattttgtttcttttacatcaactagtcttctcaaaatccatatttataaacatattaacaaaatttttgtgtaattaacataaacacaaaacacacataaaaatgaaaaaaatgaaaaaaaagtatgtttgcattcacatgtaaaacaatcgactctccaatcttgatttctgtgacattgttttgttattacttactagccatttgtcaaactttacagataggtttcagatatgggtcattagtagaagactacttcacaggatttatgctccattgtgaaggatggagatcaattttttgcagcccgacaaaagctgcattttatggagactccccaaaatgcctaacggatgtaataggccaacaaatccgatggtccgttggacttcttgaagtagctttttcaagatacaatccacttacctatggaatcaagccattgagcctattaatgagcttaggttattgccactatgcattttggccattttggtgtattcctctcgttgtctatggaattttaccccaagttgccctcatacatggagttagcgtctttcccaaggcatcggatccatggttttggctttacattatcttgtttctcggtgggtacgcgcaagatctatcagactttttattagaaggaggaacttatcggaaatggtggaacgatcaaagaatgtggatggtgagaggactctcttctttcttctttggttttacagagttcactctcaaaaccctaaacctctccactcaaggatataatgtcacgagtaaatccaacgacgataatgaacaaatgaagcggtatgagcaagagatcttcgattttgggccctcttcgtccatgttcttgcccattactacggtcgccatcatgaatctgctagcttttatgcgtggcctatatggtattttcacttggggagaaggacccgtccttgaactgatgctagcgagtttcgcggtggtgaattgcttaccgatctatgaagccatggtgttgaggatcgatgacggaaaattaccaaaaaggatttgtttcttagctgggctcctcagttttgttcttaccgggtcaggctacttcttcctcaagtaacttcaccattaggccattgtaaaaaaaaaaaaaacacttcaccatgagggttaattttcaacaagaatgatatgaattaatgcatcttgctcaagctgaagcaagagagaataatgtaatgaatccttcttaatatttacttttttatctacaattagcgcgcgcacacactatataacctatttgaatcttggttatgattggtcacttcttggattcatatatttttgctataaaagtatacacaaacgtagtatacattatacattttatccatatatacgaatgtcttaatcatacaatcgtgtggaagtaatggtggttcatattactatatcgctttaagtaaataaatctcgttttcaatgtaattggaacatattgctatgtgttagattacgacattatgaggtaactatttgggtactattttaatattttttcatctcctctctcgccgacgccaagatatgtgaagactgaagacagttgctctcacaacccctatcatcagccacgtgtttttttctcctttttattcaacattttctccttttaatttctcaacaaataccatcttttagaaagaaaaaaacaagtcaatatatatttttattatttatatgtatgtgtttaaattaatttgctttcacacaattttactaatataactgacttttaatacaaaaatggtttaggtatttaaaacaaatttcagtaatagtctagtgaaagaactaaaccgtaagcttaaattaaccattcattttgtgaaactgttgaaaattgaaatcctaaaattgtctgggagaacatatcgactctttttgacaactaaactataaatatcatcaatctagtagaggtaagtttaccagtcttctccaaaacaatttgtaaaaatagagtaactaaaacgatg

SEQ ID NO: 20996 - DNA, 3000 bp, Unknown; identical to SEQ ID NO: 6211
  misc_feature (1)..( 3000): 2750-1469P.txt file - cDNA_ID_1830961; gDNA_ID_1620864; Annot_ID_51306

SEQ ID NO: 20997 - DNA, 3000 bp, Unknown; identical to SEQ ID NO: 6210
  misc_feature (1)..( 3000): 2750-1469P.txt file - cDNA_ID_1830965; gDNA_ID_1620864; Annot_ID_51304

SEQ ID NO: 20998 - DNA, 3000 bp, Unknown; identical to SEQ ID NO: 6207
  misc_feature (1)..( 3000): 2750-1469P.txt file - cDNA_ID_1830969; gDNA_ID_1620864; Annot_ID_51301
  misc_feature (2520)..(2520): n is a, c, g, or t
  misc_feature (2538)..(2557): n is a, c, g, or t

SEQ ID NO: 20999 - DNA, 3003 bp, Unknown
  misc_feature (1)..( 3003): 2750-1469P.txt file - cDNA_ID_1830973; gDNA_ID_1621104; Annot_ID_55953
tccaagcaccctcctttaaaacgccgttacacttaacggagctttatcctcatcttcatggtacgatgtagtttgagaatgagacaaaaagagaagacgttacctaaggtcgaagtaaaagcttttgaagaggcggtgtaatggagagagtgttaacggcgttagtgtaggaaacgacaacgtgggatgctgctgtctgtgtcagggagaagagagagagagagttaatgaagatttttgtctgtattctgaaacaaggtcgaatgttggagactaaggaaacaaaaataaagctttttgatggcttatgagtctttgaaatagctacaccgctcctctcaccttagtctttaacctaataacccccccccccccccccccccccccccaattttctctccctatcctctcatttttgtagtgcgcactgagagagacaaaaaaacaaaaaaagatggagcctttgtttttaaggttttctttatgttgaggacattaggctaagacaaaaagctctgttttctttctttgttggatttttgggtgttgcttgtttgaagaaataaagctttgagtatctccaaggtttccattacagagacaaaaggggtatttgagcttagtttctctgtttatgtgtttgttgtgcttttaaatcggggtttaaggtttatagaagtggtgtttctggtaacagttgagactttttgaggggatattacagagttcaggaaataaaaaatatagaaatttgtgttttgtgtttaatgggaacaagagcagaacgcaaggaagattttgttggtgggtttggatttggtgttgtagaaaattcgcataaagacgttatggtgctacctcatcatcactattatccatcatattcatcaccttcctcttcttctttgtgttactgttctgctggtgttagcgatcccatgttctctgtttctagcaatcaggcttacacttcttctcacagtggtatgttcacacccgccggttctggttctgctgctgtgactgtagcagatccttttttctccttgagctcttcaggtttcaagttctcacctttttgttgacttctgagctatgaaaaaattgaattttgttgttatgtgttggttttgatgtgattttggtggataaaatccaggggaaatgagaagaagtatgaacgaagatgctggtgcagctttcagcgaagctcaatggcatgagcttgagaggcagaggaatatatacaagtacatgatggcttctgttcctgttcctccagagcttctcacaccctttcccaagaaccaccaatcaaacactaacccggatggtaagatctccctagcctctcacttaaacgtttcccatttttgtcaatttgtcttggtttcatgtgttcttgatctcttgttatcatgtttgatgcaactaaaagccattatgatggtattagaatgtcaagttttttaccagtgttacctcttagtggatacatataggagtggaatgtttagtatttatgctgattacaagaatctgccgttgtctatgtggatgacagtaactgtggcagtggcgacaggaggctcattgcagctggggattgcttcaagcgcaagcaataacacggctgatctggagccatggaggtgcaagagaacagatgggaagaaatggaggtgctctagaaacgtgattcctgatcagaaatactgtgagagacacacacacaagagccgtcctcgttcaagaaagcatgtggaatcatctcaccaatcatctcaccacaatgacattcgtacggctaagaatgatactagccagcttgtgagaacttatcctcagttttacggacaacctataagccagatccctgtgctttctactcttccgtctgcctcctctccatatgatcaccacaggtgcttttacttacattcttgtagtcaaagtattcaaatccttcccctttgaaatcatttgaaagactgaaacttagtggttgatatgtgaagaggactgaggtggtttacgaaagaagatgatgccattggaaccttaaacccggagactcaagaagctgtccagctgaaagttggatcaagcagagagctcaaacggggattcgattatgatctgaatttcaggcagaaagagccaatagtagaccagagctttggagcattgcagggtctattaagtctaaaccagacaccacaacataaccaagaaacaagacagtttgttgtagaaggaaagcaagatgaagcgatgggaagctctctgacactctcaatggctggaggaggcatggaggaaacagagggaacaaaccagcatcagtgggttagccatgaaggtccatcatggctctattcaacaacaccaggtggaccattggctgaagcactgtgtctcggtgtctccaacaacccaagttctagtactactactagtagctgcagcagaagctcaagctaaacaaatggcgctcgagttccggtttagtgattagaaaccatcgttgttagtgttttgtttgaaaaactgagaccttttagctttctgttggtgttttacggttggattttgcagtagactgctcttatgaatggaaaattgtttgagacaacgctttactttcactgctggattagtgaaaagtcagaataatcacttttgctaaacatttgactaattatttcaagagttgaccagaccgacaggtccaagtattgccaacgggaagcttctgtgattttgcaggatacgtgacgtcggcaatgacgcgtgcgaagaacaaattaaaaagcatatatccccttaaagcgacttcgcagcaaaacctcttgtctcgtttatctatataaagaaaatttagtagcaaacttctcgattccttgattcgtgggaaaaagaaagtctagatttttgtggattttgattttgtgattccgtgattgtatgaacttgagccgttttgcttcgagattaagaatg

SEQ ID NO: 21000 - DNA, 3000 bp, Unknown; identical to SEQ ID NO: 6201
  misc_feature (1)..( 3000): 2750-1469P.txt file - cDNA_ID_1830973; gDNA_ID_1620864; Annot_ID_51300
  misc_feature (320)..(320): n is a, c, g, or t
  misc_feature (338)..(357): n is a, c, g, or t

SEQ ID NO: 21001 - DNA, 3003 bp, Unknown; identical to SEQ ID NO: 20999
  misc_feature (1)..( 3003): 2750-1469P.txt file - cDNA_ID_1830973; gDNA_ID_2926185; Annot_ID_140726

SEQ ID NO: 21002 - DNA, 3003 bp, Unknown
  misc_feature (1)..( 3003): 2750-1469P.txt file - cDNA_ID_1830995; gDNA_ID_2214489; Annot_ID_133418
cctcactatgcaagtatcctttgttactttagaatttcgtgagatggtatgttgttgtcttgttagtctattccagtgtaaacgtccttaacctcaaaatcaggaaacaaagcagttggagtgatgaaagcaggtcagactttcacaatcgagccaatgatcaacgcaggtgagttcaatgttaaatgtccttaacctgcattcgttaaatgttttaaatttgttactccatacttgagttatctatttacaaccataagggcattgtcatgataggggggtggagggatcgaacatggcctgatggatggactgcagttaccgcagatggaaaacgcagcgctcagtttgagcataccctattggtaacggagactggtgttgaggttttaacagcgaggcttccttcatcgcctgacgtatatccttggcttaccaagtgattaagtgtttggttcctttttggttgtgattcgtaaacttgggaataatagtgtcatctttttgccattatagaccatttgatgttgttaccttgttgtctttgtttatgtaattttattattactatctgaaactgaatcttaaagacagagtcatactgtttcaaacctatttttatcaccatgagaacttttttgctaaaaacgtctgaaactgaaatactgacaacaaacgaaataaaaaaagttttgaggtcgcttggctaggatatatcacaagagacttgctagttgctactgtcatcgaataacgatcgacctaaagatgttgagacgaagaagatattaattccatttttttttaacaatagatgatacatataggcttgcttataacaaagagaaaataaaagttgcacaacaaagtgggaagaagcattaagagagttcctgagatccttcactcaaggaccttcacaccagaaacataaactcggctttgaatgacactgccaccaatccaaaacccaggcataaccataagaccaactcttgggttctcttctttttcatccacaactatgttcttcacaacactttccatgtatgaatcagagaactcactaccctttttcacttggaagatctttgcagctggatcaaaagagtaagcaagcctatgcaagatccatatcgactttatggaatgttaacaatccacagaacaaacatatcaaacaaagcgactgtgacattttctttggaatgcaaagccttaagtggtacctttcctgtataatgtaactgcggcttgctatggctatccacagatgtctttggataaagttttggaagacgaggttgttgaagatacaggggaatcacaagtctttaacttgcttaatccagaatttgtagactttgatacttgtttagatcctatcacaaacgaacttccaacttccggtgactgaaaaaaagatgcaagtacaaaactttatcaaataataacatagctagcaacatgtatactatttgagtttttttagagtttctaagccaatcagaaggctctatttcgtacccactcgcagaaagagcgcgttgagcgagtgagagcgattctgtgggtaaacccctttccaattcatgactttttttatcgacgcacatctctccaaattctctatcgcgtgactcttttagtttttttccacaaaaccaaatgaaaccgaaccgaaatcagttttaatttcaaaaccaatgcaaaccaaaccgaatcagcaaatagtgtgaagcaacaattctggacagaaattttctcaacatcccaacaacgggaaaaagagaaaacaccacaactcaaaatcacaaaaaaaatatccaagaaaatcacaaaagcctttgacccttaaattgcactacaactcaaaaatcacagtaaactttcaaattgcaaaaatctcagaatcaaagccaaagaagattcctgaagatttctacttccatggcatccaatagatgaagaagaacatgaaaaacgaccgaaagagcttagctttactagttttagtaaaatttctcggcaacaaagtgacacataaaaaaagataccaaaaagaattgtagattccataagaacaaggacgatttgcaataattaaggtttatacagattagacttaccagttgaaatctgaaagcatgaatctcgttgtgagctcttcgtgtttgcctcgtccttttattatctttcttattttctcttctttgtgtgatttcaactcaccaacttttatattttactctgctgcttcgagatcaacgcattaaaagtaatggggtacatttagaatatttagattttaaggggttgaagttgtaattttgaagaagtggaagatcaataaaaaataatagaagaacagagacgacgaaacctgccggagaactgaggagagaaaaaaatccgtcgaaaatgggaatttgaattcgtcttctgttgatcatcgcttcacttctgcttccaggtcttcatcggaaccaatctcactttcactctctaatttctaatttgaaaatcgatcttatcaattgtgtgtgtgtgttttgttgcagagcttttactcagaagaagcttgatgatctcaaatctctctttgtttccctcgcttccaagtctcacagcaatgaccaatacgtctcgtaccctgttttccaggttttgacaaaaaaaaaaattgtgttctgttctcatctggtttttgtggttgatagttttgaattaagccttacacgatgtgtgtcggaatagtgtccaaatctcttgtttttctcaaactcgcaaaaactcaccaaaggaaactcaacaatttcactcgggagtgttgttcttcacttgtgttttttttgttggtatcaacgtgactgaaaagcatgggccatagaatgcgatgctatacagtatgtagagggagtaagactggcccgtgaatgcacataatgggccttaaactggcccatcaatgctttactctcctctctagctagcgaggagatg

SEQ ID NO: 21003 - DNA, 3000 bp, Unknown; identical to SEQ ID NO: 11351
  misc_feature (1)..( 3000): 2750-1469P.txt file - cDNA_ID_1831091; gDNA_ID_2214491; Annot_ID_133459

SEQ ID NO: 21004 - DNA, 3000 bp, Unknown; identical to SEQ ID NO: 11351
  misc_feature (1)..( 3000): 2750-1469P.txt file - cDNA_ID_1831091; gDNA_ID_2214491; Annot_ID_183653

SEQ ID NO: 21005 - DNA, 3003 bp, Unknown
  misc_feature (1)..( 3003): 2750-1469P.txt file - cDNA_ID_1831425; gDNA_ID_2214497; Annot_ID_133585
agcagctcaaaatgctcgatccttgctttctaaaatttctggaagctcttcggatgaagttgatgatgataatgattcatccaacagtgaatctgatagaagcatacccactttgcgacagttggacaaaccatctcagatgctggaatctctttcaaatgacaaacagaagaaaagattgattgtaaagatctctgttaagaagccagcagagtctatgggaagcaagggagatgtgataaatcaggctgatttagagcaactatcttccaaacctttggaggagaatcacagagtgattggtatatattccagagaacccgggtcaagttctgtagatgcaaaaggtgattcagggtgtcagagtattccctactctatgaatacgccacagagagaaaaggccgataatcagttgataagatcttcagatcaagaccagaatatgtgcaagtggagggaagagattcctgtttgtgaacctaccgaattaactgcgcctgagaacatagaagaagcccaaccattttatgggtagggaaatcagactataatgggaacgttatgtttgtattatatttccgcaatatctaattcatcgtattctcttgcagggatgaagctgatgagattcttccaaagaaagttcgacgactgaggttaaagcttcggcatcccaacagtcctcgaaaactagaacctgatgaggtggcagatgatttggcagatggtggagatgggtttgcatccatagctccctctttcatgaatccgattatggattctgaacctgtgatagatagcgttagagattcttctgcacataactttgagtttggagaagctacagctgatgtgatacgtaggaaaagatccataagaagtgaatctagtacaagaaatagcgcattacgcataaggttgggctctggatctgtagacaaaataaagaaacaagggattccttccacaagcgtgtatgatgatgcatcacttgaagaatggccttctacctcaaaagctgggtccaggtctagatctgcaagcgtcagcaaaccaagtcttcatactgggataaggttgaatagtgtctcaggaaaaatctcatggttattgttgtctgaacacgaggaaggctgccgttatatacctcagctaggggatgaagttatttacttcaagcaggtacgtcctcttggctgctaattcgttgttcacttccttgtattaatttgccagctgtgatattaataaactttccttgactgtcgttttcagggtcatcaagagttccttaaaactaaagaattaaatgacagggaccgatcaaggtaccttccccgaaacctaggagcagtagagatttgcaaagtcgagaaacttaactatgatacatatcctggttctggagatagctgctgcaaaatgaccctcagggttctggattcttcttcatcacatgcctcccgcaaagagtttcaactgacacttcctgagctcattaatttccctgattttattgtggagaagactcgatacgacgctgcaattcaaacaaactggaaaattggtaatgagtgccgtgtgtggtggagagacgcaaccggtgaaggcggggcttggtgggaaggtaggattgagtcttcacaagtaaaatccactgacttcccagagagtccatgggaaagatacagagttgtctatgaaacaggggaaacgagtcttcacagcccgtgggagtttgacaatcccgagtttccctgggaaaaatctaccatcgaagatgagagaagagagaaactgctttcattatttgctggactagtaaaatcaatcagcaagcatcaggtttgtcttctctcccgaaactatcatttctcatcttgctgttatccttgcttgcctcgtaactgttatttgcttttgttatatattttcttcaggatagttacgggatccaaaagctaaacgaagcagctcaaaagatggatttctgcaataggtacgatacttcacaacacttagctctctgcaattgattctttcaaaacctccctagtcctataaactcgaacatgaaaacccatgtggtatacttgagaagcagaaacgatagttgagtcggtgcttatttaaataactcatatgatcaaacttgtggattttcttatctggcagtaatgattcatgcattgtgtaactctggtttaaaatcgcaggttcccggttccattataccctgagctgattcacgaaagactagagaatcagtactacagaagtattgaatcgtttaaacacgacgtggatgcaatgctctcaaatgcggagttgtatttcgttagaagtgcacatatgctttcgaagataaagcgactgcgagataaattgacaaaaacgttaagaaagctgatctgaggataaggcaacaccggtatgcttcttttggtcctttcttgatcttgtaaacacgttaggctgcggcagttttttcattatatagcgaagagagtgttaaaaagaaaatttaaaagttttcactctaaacaaaagaagtcggttttgtttgtagtaacccgacacaggtttcatgtatagttttagtaccacatgtctgtaaccgaaatttactctgttgtcacaaaaatgacatcataagtctaattttattacaagaagattattatcatttcatttgcaaactaaattgtttttcgttttaactactaatattaacattttattttcgttttaactactaatattaacattttattttcgtttaaaaggtttgtgaaatcgaaaacaaacattacttgagatgaaatgtaataaaattaaattaaatgaaaaccgaccagagaaaagaataaaataaaaacagagtaggttgaatagaaaacacggctgagagaaagtaaagagaaaaaccctaatcttcatcttcatcttctcccgccgtcggccgtaagaggtttcgaagaagcaaagtgagcaacaatg

SEQ ID NO: 21006 - DNA, 3003 bp, Unknown; identical to SEQ ID NO: 21005
  misc_feature (1)..( 3003): 2750-1469P.txt file - cDNA_ID_1831425; gDNA_ID_2214497; Annot_ID_183854

SEQ ID NO: 21007 - DNA, 3003 bp, Unknown
  misc_feature (1)..( 3003): 2750-1469P.txt file - cDNA_ID_1831917; gDNA_ID_2214490; Annot_ID_133442
ttagattattaagcttatattgaagggttttatatttctttcttgcgtacatttctctttcgttttctctaatgatttaagttagattagagaggtcaataacgtatgcagttaaccttttccatttcccgttattgtggaaacctcagtttgactacatactccgaccactttttagtgatatttaacacaaaaagaacttttgaaaaactaatttatcggtgtgactttttttgttcgcttgtgcatttttttccaacactggtccataagtttaccatgtaacatatattagtatttagagttagtatatttctacaaatatgtgcacagctagctagcattacttggacccttaaaggtgacatgtattggatataggaaatcaggacccctttagcaaaaaaaaaaaaaagaaaaaaaaaagaaaatcaggaccatcttaaaactatttgttcctctctatataatggtttataatcataattaagatttaaagtacaaattatagttattaaaaaggttagttctcacagataataacagaaaatattttaagttaccaattttagcacataatatctaaagtttttaaaatactatgaatttaatatcaaaaatcttatataagtatttgatggacgctttacgcgataataatagaatcatgatttcaaattgtgattaattttttacgtaattcggtgaagataagtaattcttgtataaatttcactaatgttaattttaaaagtttatggaagatatgatataattgttcataaaacttgttataatgctattataagatatttttcttaaaaagacaagtaaattactttgttcgtcgaacacaaactaacttacgcttgatcaagctgtattctacaaaagttatacattattaatttatcattacaaaaattggaaaaaggttactttaacaattcaaaaatatatcgaaatccaaaaagatttatcaactccttttaaatttcacgttttacgtgaatcatgtgatataatcatatgcatacaaatgtcatctgagagatttcagccgacttttgaacaaggaccaaaacagcctacgccatgcggagaccacgaaaatagatattttattataaataaatggatttttttggacgtaatgaaacgagaagtggatcagaagattaattacataatcttttctatttataaatttaaactatttctttctaattcattaacaattttgatacatcaggacaatggtaacttatgttactataagacaatggtaatatctcaatagaagtttttttttgtaaaatcgcaatatatacatgaattaataatgacatatgatggtcatttggacataatataaaaatataaatatttggcaaaataaataagtaaatgaaggggagaggaatgtgtgagtgtgtgtgggtgtggatgcctttatgcctcctacatctcaacattgagcaaaattgcggctgcccaacaaccacccaaaagagaattagtcaaaattattaaaatcaatgcatgtcctaatctctctcacccaactctcaccttcatttcaactcccatgcatctttttggtcaattaatttattaatattataaatatattttttcaatgaattttgaaaagactgtgttgcatattaaaataatgcgttgtactattaagagtcaaattagaaaatgtacttttaactccaaattaatttacaacatcttagattatgttattttttttttttcaagtcttcacgtacgtggtgtggtttggagtaacgcgaagttggtccaaaagcagagagactctttatattaaaactagaaaactattaagaagacgcaatagtattatgcacgttcacatttcttggtattcttttacattttgttgtttctctggtcataaactaaattgactaattagccatcaatcattttttcttcagtgtttttttcaacaatggacttttgttataaaactatctgtttagtggttgttgctcgattttatccaattctgtcacagaactgagaaataacattaaagtaaataatcttctatactgaaccggtaagatataaaaatttatcaattttatccaattaacatcgaagtcccacgacgtatggtgtgaacagtataagataaaattaaatacttttagaggtagtcgtacgtgagtacgtgtataagacaacacagctgataactccccaatttccgaccaatgcattgtacagtattatgtattcattcgtgtgtgtacttttccccataaaataaacgatttagatttaactatataagaatagaaagactagagaaaaaataagagaagaataagaccaatgcaatgtatcatgagttgtccatttatttccccatccaaaattcacgtatattctttacacacaaaaaaaaataaaaaaaattcagttacattagtttatgtaatttttttaataaatactgtatattattaagaaaaagcttttaaaacgagagagctaaatcattgtaaaacgttttagttttggataccaatgtgttagtaaaaagcccaccaagcccaatagattttatttttgccaaaaaaaaaatcaaagaagaacgaagccttccttctccgccgtaacctccgccagtgaaaccctaaactcctctttccgatatttcactgttcatcaatcgctctgcgtcactcttcctagcaagctcctttaattttcctctcaatccaatcgtgattttgcatacccatcaggtttcaggttagtacgtagtcttaggagaaattaggtaatcagatcgatatcgctatttgttcatacctagattagtcagaatctgtaatcgaaattcgattaggatggtgtagttcaacgaattcatagatacagaatcacttcttcgtagttatggaaagctctttgtttaaaacctcttccgatttttgtatcagaaaaactgaaataatg

SEQ ID NO: 21008 - DNA, 3003 bp, Unknown; identical to SEQ ID NO: 21007
  misc_feature (1)..( 3003): 2750-1469P.txt file - cDNA_ID_1831917; gDNA_ID_2214490; Annot_ID_183630

SEQ ID NO: 21009 - DNA, 3003 bp, Unknown
  misc_feature (1)..( 3003): 2750-1469P.txt file - cDNA_ID_1832112; gDNA_ID_2214511; Annot_ID_133836
cgtagtactgctccatcatttctcttgcactctcgctgtgacccacgtcctcaaaatcatccgttgcatccttacctgaaaagagaataagaatcaaaaaccgatggattgatctccactaagccgggagcatggtgatagttgtgtttatacagacctgttgaagacaagagaacatcgtccccacctggatggtcttcaagaaacttggtcacattgtacacctgcatttttttgcaaatgtgtgaagttaggagaggcaaatgaaacccaattacagaacttctgaactttgaagatttcttgtcaaatcaagaagtttaaaacatgggaagatccacttctgaggcttatgattaaaatgtaagaaacaatggagcaacaaaaagaaaagttcttaggttatcgctttctttggactaaacaagatatggtgcatataactctaaaaatcaaacaataggaatagaaagatgaatacttgaaacaaattactgtaccaacaaccaagtccagagatacatttgggatcttctgaacttgataaaaaggattgttctgtgtacatagcaaacttgttgcacagaggtaaactcccaaaaaaaatgaacttaagtgacaatattaataagaaacataaactactgatggaacaacagaccaaaacatttaatgtttcctactttcttgtgataatctactgatttcacaaaccaatcaatgaagaaaacaaaaatcaagttcactatgaagggaggctcaaggatgtatctacagattccttcacaagttaataatcacaatacaaaaacgatcgatcttcagggcaaacaactaatcgacaagtgtcagtagtccatcccaagaaaggttgatgtcgatcaaacaaactctaaagacaataagaactatttctacatttctccatcttcaatcaaaattagaaaattttcagctgataaatagatcaaaagagctaaatcttcagcataagcttaataactacaccattttctactctctctacccatctaaagatttgatctgataattttagacttagaaatctgagacttcaaaagcttaatctcatgcaaacaccaaaaggggaaactttgaagcacgagatctctaatttcagaggtgagaataaggagaaagaagaatgaaacctttccattgatgacaatccaacagtcatgagcttgattatgctctgaaacttctgaaagagtgaagatctttgcttcgtctcccattgtttgtttgattcttgtctaccagaattaacccaccaaaacctgactctgagacttaaagctcaaaactttatacaagagtgtgagagagagttgttgagttaaagaccatttgacgaatcagttaaattccggtttaatttggttcgttctcaaagtaatcggttggtgagttttggaagctttgaaaaccggtttaatgaaaattgattttgagtttgttctcacatagtctgtacctaattgctgctctactgttttggccttatggtattcatctgtacgattttgaaaacatatgtgccaatgttgaaccgatgggttaagtggtttggtagtagttgttatttccggttgagtggatggggtaggtaggtaggcagtgcaaatgttgcggttgtgcgctctaattctgcctttttcattcaagatcggtaggtgaatgatgtgcaataaattttattatggtacatatgaattcttttctcataagtaatatttatgtagttttatattagtagatacaactacataagaaaaataaattgccgctgcttcataccaactgaccttatttattagggacacaaatctttttctttctaaagcttatataaaatgtacatattattcaaaatcaatagattgaccggtgaatttctgaccttgtaaacgaaaagaggtctgagaagtttcaaatttgaaccatcgacaatgaaaaaaatacattagccatgttctctagagaaaaacaagcaggttaaccaaaagattagaaccatcattttctttatgttttttagtaccaaataatgttattaaaagaaaaagttatacttttaggaccaccaaatctttttcaatactaaaaattgttgctttgaaaatattaaatacaatttacacattaaaaaaaactaatatatatataattttaaaatgaacaataaatataaataactaaaatcgtgtttgtttgttcatacactattttcattgaacttctgatacgataaacagataactaaaaaaaaaattgaatgcatatgtttttgaattacatcttgaaatgatttataagctaaataactagatgactttgttacataatcgagctaatggtcgaccacaccatcatcatagtttacgcttaccatttcgtgtaatgagctgaatcgatttatgataattttgtttataaaatttgattaaccgactgtaagtttattaatttctctatgatgccttgcatatctctataaagctttgtattatgttctgaattgcaacacattttattgatatgatatgatgataatttagcaattagggtatcctaaaagctcctaaaacttaaaattgtatgaccaaccaattttgtaaaagcaataaggagtttttgtaaatcttcaaaatatattggatccataactcaataacacaaaacttgagactaaaatcataataaagctatacattcggggcagtttttaatatcctgacttgttgggtaagtctctaaatattcgtagtttgcatccaagtccctgacttactatcttctcccaaatctccttttatttttactttcgtcctataaactaaaataaataaggaaaacactcttcttcaaatccagtagagagattcaagacgagtctcatcgaaagttcgaatctttcgtcatctgattagctttctcttagggtttatttcgatttcgatttagtgttctccatcaatg

SEQ ID NO: 21010 - DNA, 3003 bp, Unknown; identical to SEQ ID NO: 21009
  misc_feature (1)..( 3003): 2750-1469P.txt file - cDNA_ID_1832112; gDNA_ID_2214511; Annot_ID_184248

SEQ ID NO: 21011 - DNA, 3000 bp, Unknown; identical to SEQ ID NO: 11732
  misc_feature (1)..( 3000): 2750-1469P.txt file - cDNA_ID_1832288; gDNA_ID_2214513; Annot_ID_133904

SEQ ID NO: 21012 - DNA, 3000 bp, Unknown; identical to SEQ ID NO: 11733
  misc_feature (1)..( 3000): 2750-1469P.txt file - cDNA_ID_1832291; gDNA_ID_2214513; Annot_ID_133905

SEQ ID NO: 21013 - DNA, 3000 bp, Unknown; identical to SEQ ID NO: 11733
  misc_feature (1)..( 3000): 2750-1469P.txt file - cDNA_ID_1832291; gDNA_ID_2214513; Annot_ID_184355

SEQ ID NO: 21014 - DNA, 3003 bp, Unknown
  misc_feature (1)..( 3003): 2750-1469P.txt file - cDNA_ID_1832424; gDNA_ID_2214516; Annot_ID_133954
gataaacgttatttatatcaatcccaacagtagttcacttaataagccgtattactatatatacatatataaattaacacatttcaaagttaacaaacctagcgtctttcggcttatagaatcataaatgtttgtatagccaaaaacaacaactatatacagtatcttacataataaagtagtttatcacctatatttttaatagatgatgttttacattttatagagattaataaagatgtatgacatgttaatacatctcacttttttttccatatctctatttaatatagctcatctagtaaaactatacaattaataggaaatttaaaagcacattcaagcaaaaatgtgatttcataacactctttaaaaacacgaaggaaaatatatatattacgcgtgaatatatatatatatatatttgtgtcgatcaaaatgtaaatatattttctttaatcaaatttttgtacttttgaaagaagagaaccatctcatatttggatataattttttaaaaaaattaaggtataatcctgaagagaatagaaagaaaaagagagtgagaaattaaccagcataatgaagaaaggactatttcggattctgcagatgggatcacctaaagtgtcagtgaagagaagagtttggtggtcgtgaccaatctcacaactcttctccatacgacccatttgaattctgtccctacgatcatcgtagcatctgatcaccacctcttcatcaacttcttcttcccattgccccaccattctctatctctatctctctctttctctttctctttctctttatttataggggaaatgaaatgagaagagggataacaattcatacaaggaggagacccatcctatgttataatgtggaaaccttataaatagacacacaatatggaagttattaaagtgtcaggacgactaatatatatggatatgtcattatgtttttgtatattagttgtaaaattcataaaaagtttactataacttcattgattctaggataacaatttatgtgcaatctctcagatttgtagactaaaaataagattttagtaacagaataaatttaattaatattaattccaaatgacatatactactattacttttggcaaactagccttcatactttgactcaatcttttaataagatagtaattgttccaagtttataaatttaccatctaaaagaattttatatttgactaatgttgttagacatgcataattttgttttagtaattaatttcacattttgaaaataaaatttcaaatctttgttagggtgtgataatcacgtgttcgcattaaacttttcctaaccagttcaaagatacatattttccattttgactattttgattaattagtatttctaagttagcttgatataatcatcagaatatataattatgtagattatgaatgtaattttcgtagttaagtatcccccatgttgataatttcttgctattttgattgtatattgaaccacgtacccttgtttgtcaaagttccatattgattgtgtttctatgaattgttagatccgttgattgtggacacggtacgttgtcaagtgtaatttcagagaaatgtgttgaatatattgaatgacaatgcaacttaaactaacttttgtcataccttgtaactataatttgtaagtttcttgctttttaaagagtactttaatatgtgatttaaacaaatagaaataaacttttcatccgaaaaaaaatacaagtagggaaattatgaactaaccatttctgttaccatactaaaataaaagttggcagaccaaaagcaaaattatacaataatatgattgggagatgttttgggagtggagagaagaagtacagaacgaatcatatcttcactaacttaactaaccaaagccaaaacgaatacgtaactcaatatagattagcaattttctttttaatttgagcatttgaaaaatgtttttaaatataagatttattaccatttatgatctatgcaatgtattttcttaacattgttgagttttaggagtgatggtccacaacagactttacatggagcacaagtttagagtggagaacaatattctcggatatgaaatatacacatataggagatttgattaacatatctaattgtctggattttgagtaattgtcacataattttcagtgcgactgcagatttttttttttttatcacaactgcagatttagtcttttaacaggttttctttataaattacaaattaatatagtatgttatttcttaattaattaataaattacaaattaataaatatataaataagttcaattgtagtctagtttgggtcacaggatacttaagctttctcacctgagagtccatgaaaggccttgaaagacattaataaagcccaacgtagcccagatagacccataaataaatctgtcacgtttaccacgctttaacggtcaacagccactagttattaaatttatttattttttaaaaaaactcatcaaaacaaagtccactagttatattcgaggttataaacgtaattcaaggttattgtgctgttgggagctttgaagcggcacgatgataaataagttgacgccatgacacgtaagccgcttagtagcctctttcttcaaaccaaagactattcaccgttggattaagaaagctcactcaatcttaacccttcattttattaaataaatcctacgaccagaaaataaaataaataatttggttctgttatcctttcattgtcttcttcattcctggtaaaggcttttaatttcatggattatcttagcttctactctcatggtggctatcgagaaatcactcacaccaaaatctttgaagttctgagtttcaaagtttttcgaatttgaaactttcccgaagcaattttaaaccttttctcttcctttcgattttttctcttctggaattagaaaacttagttatg

SEQ ID NO: 21015 - DNA, 921 bp, Unknown; identical to SEQ ID NO: 11394
  misc_feature (1)..( 921): 2750-1469P.txt file - cDNA_ID_1833057; gDNA_ID_2214494; Annot_ID_133517

SEQ ID NO: 21016 - DNA, 990 bp, Unknown; identical to SEQ ID NO: 11399
  misc_feature (1)..( 990): 2750-1469P.txt file - cDNA_ID_1833057; gDNA_ID_2214494; Annot_ID_183750

SEQ ID NO: 21017 - DNA, 3000 bp, Unknown; identical to SEQ ID NO: 12032
  misc_feature (1)..( 3000): 2750-1469P.txt file - cDNA_ID_1833226; gDNA_ID_2214528; Annot_ID_134224

SEQ ID NO: 21018 - DNA, 3000 bp, Unknown; identical to SEQ ID NO: 12032
  misc_feature (1)..( 3000): 2750-1469P.txt file - cDNA_ID_1833226; gDNA_ID_2214528; Annot_ID_184840

SEQ ID NO: 21019 - DNA, 1369 bp, Unknown; identical to SEQ ID NO: 12535
  misc_feature (1)..( 1369): 2750-1469P.txt file - cDNA_ID_1833587; gDNA_ID_2214558; Annot_ID_134817

SEQ ID NO: 21020 - DNA, 1369 bp, Unknown; identical to SEQ ID NO: 12535
  misc_feature (1)..( 1369): 2750-1469P.txt file - cDNA_ID_1833587; gDNA_ID_2214558; Annot_ID_185786

SEQ ID NO: 21021 - DNA, 3003 bp, Unknown
  misc_feature (1)..( 3003): 2750-1469P.txt file - cDNA_ID_1833613; gDNA_ID_2214536; Annot_ID_134388
ttatcttacaaagataatagtttataaattttatatcattatttaaagaaaataatatgatgtagaactgtctttttaaatttctattaaaaacttaattttagaagaatttggattttttttacaaaaatttttagaaaaacttctcaactatttggtaattatttttttggacaatttgttctttttccagataaactattagcttggtaccataatgacaaaatagtatttttagttctttacttggtctggtctactagctaagcaaaaaaatatcttactaataatttataataattgacacgtcataatgtactggatcacgtgcatcgcatgtttagacgagagtatcatatggcgctgtctgatgattttggtagcattcatcattgcaactcgtaagaagaaaagctgaaaccagatcttccttcgttaactgttttcagctccagcttctgaaacggactgtccagaaacaaaatatcatcaggttttatctcaaacaacaacagattatatagtttgtatcttggactaacctgctgtttggatcataatagaaaccgctgatggaaccatcgctgcaggagaagcatacgtagtaaaatccagctattgttagtccacaatctgtgccaacgtttacaaagtattgctctttccatctctgcaccaccacaaaaataaacccgagttgcaggaattatggaatacttgagagaaaatgatgattggattcgataggaaaaactgagagttataccataaatatataaggataattgttaagatccaattgcctgccaccatcagattcaacttgtccctgcagtattaagtccagaacgttgcttaggagatgttactgactatacaaacaatgttactcgagtgttacctgaagaggcgaaaaagacgggaactttgaccaatgtctcatatcatcttccctcctgtgacaaacaaactttcaaaaatttattcacgataagaaatcatcagtttcaaatctacaagaatataggaattgggacatacgttgcttcccattttccggtgtaaaaggtataattctttccatcaacgatttccccttcccagaatgttatgacctgacactcacagaatcaagaatcgtgtcccctattagaaattcaaggggaagcaatatgaagaaaaaatgagtaagagtgtaagggcttacaggagtgtctgccatgggaacgtttagagcttccatggtgccacaaagataaccatgttcaaggtcaataccctgtatctggacgttgactctccaagcttcctccttctgttgattagagacattttgcgtaccagaaaatgcctgcagcacagcataaaaacatgtgtgttcctcatctttaggttcattatgaataaacaatctctttgagccaatgaatgttatacaatcccaactagatacaaatgcacttgaattaagcatacatgtcaacatgaaaaagatatgaagccaatcaaagcagacaaggccaacttctaattggtataacaaaaatcagcattactagagaatcgttatgcaaccagaacacttgaacaagttgcagatctaatgggaagaaagtaactagacccatgatgtttgttgcctgcctatgaatgatgctttgtgcctgaacaacgagacacgagatctttaagttcttttatgctaacctaagtagctaaacatcatggaaacttataactttccttctcatcttaccatagcctctctctcacaaatttcacataaagtatactagcaaacccttgtgaagcaaagtttcttctataactaccacagccaatcgacagaatcaacaataaaaaaattagctattcttgtgatttcaagtattcataagtaagaacttgtcaagtttgagagaaaattcacctttacacataaaaacccctaagataatgtctttataggtatactcagattctgcttacacataaggttatgttcataaaaagagtgtgcatacataaccacagatgcacaagcataactaataaagttctttctagtcctaaccaatattcccaagacctctatggtcagacacttgagagaaaaacttgtaaaaatccaagtatcatacgaatcctagaaataaatttctgcaaaataacatgttttgttaattcattaatcgttgtacctggccagcgccgagaagtgaactagggggaagtggtgatcgattcccaggatcagttcctaaatggcaacaaatctcaacaaatgagcgagagagccacaaagagggaacataaacaaacaaacctaaattcaaaacttgaagaagcgatcaaaaacctgaaacttgagcaggcgtgttgctctcaacaactctcaccggcattttcttccgtctcctcctttccgtctgataaaaatccgatctttggtgcgaccaaatcaaatcgtggagcctaatcaaaaaccacatctcatcatacccggttcggttttcttaaccgaatcaaattatacataaaacggattaggcttctccggttttcgactgcgttttgtataaaacctctcaaaaaccttttcttctctccccgtcagaccgatcttctctctcctcgccgccgcctccaaatccggaagaagcttttttccacctctattatcgaacttgctttataaaaatctaacctttggacctgactttccgacttctctctctgtctagctgcttctctcacccaggtttgccttcctctcaagttgaagctgcggctttattagtttagctattgactctaagaatgttacttgaatccattcacatgagcttcttacgtcgttttcattggtttagctattgacgttgacttgggttttgcttgagttcattctctattgtggtctaccatactttttcatgttacttgattgcatatttataaaacggtgctaaaagtattccgttttgtatagcattctagatg

SEQ ID NO: 21022 - DNA, 3003 bp, Unknown
  misc_feature (1)..( 3003): 2750-1469P.txt file - cDNA_ID_1834169; gDNA_ID_2214546; Annot_ID_134577
atacctcttgatagctccatatccatggcttcccacaacaagaatagaagcatgatgcttatctacaacttcacataggatattccttgcatcaccttcgaaaacttcgatcaccgcgccatgaacctacacaacaaacctaggaatgatgattgaaaagaagaagatagttgctaaccaaagatagatagttactataagaaaaaccagtgctacttagcttgaagctcttaaatgtgctagagattcacattcacattaccaaactcatctaatagagtccaatacaacacatgatgacgattataaaatccaagaaacacataaaacgaatttgaatgtttgataatagcaagatcgtaccgatctgctctgacaaattgctttggctttctcgacaaccttagcagcggtatgcttcagatcagcatcaacataaggtacaacctccgcagttcctaaaacacacagattaacaaaacctaaatgatctctccccatcgctgcccaaaacagaacccctagaagagtagattcgagagtgaaagcaaagagcgtaccgggaccagcgagaccaacggcggagacggcgttaggtttggcgtggacgatgaagagcttaaaaggataattgggagcgtaaggagcgaagaaacgatcgagcgtccactccaaggcgtaagtgctctgctcgctgtcgtcaactccgacgaccatcaccgatttcccatctccggtggccatgactctgacgttgttcgccggcgtgaagaaaacgcgctcttgtgtttgtggtagaaagaagcctagaagaatcctccaaagtgtttgcacagaaaaagagagttttggtatcttcttcttctattatttaatttctttaaataaaaagaaaagaggaatgtgatactttgatttgatgacgtggctggtcctcatttctttatgcctttccattagtaaatttcccaatatttaaagttacccacagattttaaataagaagaacccacagattttacacaaaatttattctaatttgaatattacccataaaacaaagtacataaaaggattttgcaggttaacagttattagctttttagtaacaaactgatatgaattggtttgataactttcgattttacttggaaattaactattacaagaaaaatctaatttcaaatagtggaatgatttgagttgggtaaaatccggctcagatgataacaattacaaaataaaaatgagacggccggctgtagaataatatgacgacgtgaagcaaaagcaggagtgcgacagaaacctctctaaccaaattgcttttagttatattcttcttcgtcttgacgctactctttacctttttttatctgatttcagatttctccagaatcttcagattcccatggccactgttcatgttgtcggtctgaaaatcaattctggatctccagggaaggacacatcccgaaaggcacctgatgcaattcatgctgctttatcaccgtcatcatctctatcattactcagaggtacatataccttaaaccccaaaccagtttctccgtagcattttgagacgtcatcattcttatctatcatcaaaccttgctctttgtccatataggagtgttaccaaagtatttcagctcagagttgtcagtggctcagttccggttggtcgaaggatcttaatacatagtggcatttggacatgagaagaacacagattcttgggatggatgggaggtaagagaaccataccctaaccttaataatgtcctacaagtcggatcagcagctttgtttgatttttgggtgttttgcagcttctacaaaggccagttttgatccagtacacggaggagagatgtctcagctcgagtatcataactgtctgaagccgccttctgtgttttgaaacaacaagtcagcattctcttacttcctttatatatattaatcttgttgagattctggattttaggcttgtgtctttggtaacatatgtggtttccggttagttatggaattgtcggtcaatctcgaggcaagaagagagagtatgtatatatgtaaatgttgaaccactaatcacttaatgattatttagttaattacgttggatctcatattgagaatactattttgcatatatatttttctgaaaaaaacaacaaaaagaaaggtcaacattacaagagtaaaattgcatatgaagagagtgataatgaaagttcaagtgtttgtttctgaattcttgacatgtatataatcaccatataactgtttccaaattgtagatggtaatgcaaaaatctgatgaggagggagatggttctgtttccagcaactagatttagttataacataaggggattgattattgttattgttattgatccttcttctcctgttgaattggattgagagttagttggtcaaaaggtgttatgggttttagaaaattaataaaaacaggtgggctttgtctgtacatgtccttaaattatttgttttgggagtagtttaatatcgaatgatacgtttacacgtaaaaagtcttttcttttgagtcgtcgtctcaggaaagatgagattcgtttctaggagaggttgactttttcaatccacacttataactctagaatcttatgtcattgatgacgacctcctctacacttttggatttgtatgtttacaaaggaaggaaggattaccttagaacagtttatgtgatgtttgtgtctttctatttttattcaatgaaatttctttacatgtacatagattagctatattgacatgaatctaactgatttttttgtttgcaaaataacaaattagtgaggggaattttgtttcagtcaataaatccgtgatttctatatgttagatggataacaatgcaataaataaaggggacccaataaaaaaaaaggaaagagagacgtgcctgtgggtagtgggtggtggtgagaagattctggaaaaatg

SEQ ID NO: 21023 - DNA, 3003 bp, Unknown; identical to SEQ ID NO: 21022
  misc_feature (1)..( 3003): 2750-1469P.txt file - cDNA_ID_1834169; gDNA_ID_2214546; Annot_ID_185412

SEQ ID NO: 21024 - DNA, 3000 bp, Unknown; identical to SEQ ID NO: 12429
  misc_feature (1)..( 3000): 2750-1469P.txt file - cDNA_ID_1834360; gDNA_ID_2214550; Annot_ID_134663

SEQ ID NO: 21025 - DNA, 3000 bp, Unknown; identical to SEQ ID NO: 12460
  misc_feature (1)..( 3000): 2750-1469P.txt file - cDNA_ID_1834466; gDNA_ID_2214552; Annot_ID_134706

SEQ ID NO: 21026 - DNA, 3000 bp, Unknown; identical to SEQ ID NO: 12841
  misc_feature (1)..( 3000): 2750-1469P.txt file - cDNA_ID_1835663; gDNA_ID_2214575; Annot_ID_135169

SEQ ID NO: 21027 - DNA, 3000 bp, Unknown; identical to SEQ ID NO: 12841
  misc_feature (1)..( 3000): 2750-1469P.txt file - cDNA_ID_1835663; gDNA_ID_2214575; Annot_ID_186328

SEQ ID NO: 21028 - DNA, 3000 bp, Unknown; identical to SEQ ID NO: 12865
  misc_feature (1)..( 3000): 2750-1469P.txt file - cDNA_ID_1835727; gDNA_ID_2214576; Annot_ID_135184

SEQ ID NO: 21029 - DNA, 3003 bp, Unknown
  misc_feature (1)..( 3003): 2750-1469P.txt file - cDNA_ID_1836205; gDNA_ID_2214705; Annot_ID_136955
tttcgcaggccctaattaagacattcaagaaaacaagaagaagcataagaagaggcctaaatgcccagagaattaaacaaatgggcctttaacaatattttaaacaacactgaacaatagatgagatctcaacttcgaaaagctaaagccttaatataaaaccaaacatcaatctctcgccgttaaggttacatctgtcgccgccgctgagaccgccacttaaggccgtctcctccgctctatccatatccaaaacagctataaagataaacttccagagcttggtgaaggagcagcaaccctagttttcaatccctaaaggtgaagtttttgttcttctttttctttgattctactcttttttcgtcacaatagcgcagtagcgatctgggttggcgtttttattgacggattttggtgggtttgggttcgtgttagattttactttcacagattcaggtatgtatttgatcttatttagctttggtaatactcaaaccaactagtatttgatcttaattaggtgacgttgatattttgtgtgttgtgggtcaatcatccactctaggttgatctgcgtctatgtttagtcctaattttgaagaatcattctaattgctgatgtttatttatgacaattttatgtcttacttcgaatttagctaagataataaatctagacgagtgcctttataaacagtttatgtatgaacaatgcttcgcttgtgggattgttgatttcactacatttgattaagaatgtacatactattacaaatgttatcgattaaaaacgtcattttcagatattagttctccagcgagttgacacaaaacccgattacgtttcatccggcgactcgctttgatattccatggattctcagttgaatccttccaagagacgcaagataaggttcgcgtctctcatcttttccccagttttttttcttattcgaatcacttaaggcttgagaaattagtggttagggtgtgtaaattgcgtttgatatagtgtcaggcacagatgcgttgcgtgctataagatgttcaatagacgagaacacctcgttgagcacatgaagatttcctaccactcacttcaccagcctcgctgtggggtttgcctcaagcactgtaaatccttcgaatccgtgagggaacaccttaacggtatgtttgtatttgtattcgttttccaccacacatcgtatgaatatggtggttgttgatgtttgtttgattccgtctttccaactatttcagttccagaccatctttccaaaggaaactgcaaagccattttcactaaacgaggctgtactctctgtcttcaaatctttgaggaggcctttgctctcgccgagcataaaaacaagtgtcacctctccccacctcgtcctcttgtaagttttgttgggaattatttagataatgtggactatatatgctctgccgcctccaatattcccgagtctattctttctgattattgaaatatcagcagttttccccttaaatgatctgattagtgctttattcatatcagggaacatctacccaaaggaatccttctagttcacttgctggttcacgtctcaaggctatggcacttgactgtgaaatggttggtggtggtgctgatgggactattgatcagtgcgcatcggtttgcctggttgacgatgacgagaatgtgatcttctccactcacgttcaaccactgctccctgtcaccgattacaggttctgcttgtggaccatttgtgcttgttttgttttataattcttccttttaaatctcaccccgcctcatgttcaggcacgagataactggattgactaaggaagatttgaaggatggtatgccacttgagcatgtacgagagagagttttttcgttcttgtgcggtggacagaatgatggggctggaaggcttcttcttgttggtcatgaccttaggcatgatatgagttgcttgaagcttgaataccctagccatttgttgaggtaactaactgacccgtttttgttgactctttgcttgaaatctaatgtaattgctatgcttcacctcagagacacagcaaaatacgtgccgttgatgaagacaaatcttgtaagccaatcgctcaagtacctcacaaagtcatatctcgggtaagttatgcttgggctttgatttgttgacattggattatgaaaacttggaacatgagatagaaactggttttgtttgtatgtgtagatacaagatccagtgcgggaagcacgaggtttacgaggactgtgtatctgcgatgagactgtacaagagaatgcgggatcaagagcatgtttgtagtggaaaggcagaagggaatggtctgaactcgcggaaacagagcgatctagagaagatgaatgcggaagagctgtaccaaaaatcaacgtcagagtaccggtgctggtgccttgaccgactcagcaatccatgaaatgaaatcccaatttctcttttaaaagaaagctccttctcttcctcccttaagtctctttttgttcgatgggaggattaagaagacttgttaagagcttttccggctagtttttggataatcaaatatgatatggcttcattcaacaacaactctccctttgggaactcgtataaaaagttactacttaagcttcaaatctgtgtaactaaaatggataaagtctgatgcatctgaggtcttggaatctgttgctcatagttgtggataccagcaacatcaaacattattacttgtttaccaaacccactctcagcttccatttcatcagtttgaagtcaagtggataaaaagactgtctacataactcaaatactgtagtattatattcacatataaatgagaaattgacatttcctctagaaaaagaaaagcaatcgtgtgagaagaaacaagtaaaaggctgaggaagaagacgactattagtccccgtcgaacttgtttctcccggtcgtccaacaaatg

SEQ ID NO: 21030 - DNA, 185 bp, Unknown; identical to SEQ ID NO: 155
  misc_feature (1)..( 185): 2750-1469P.txt file - cDNA_ID_1836205; gDNA_ID_3404; Annot_ID_146278

SEQ ID NO: 21031 - DNA, 3003 bp, Unknown
  misc_feature (1)..( 3003): 2750-1469P.txt file - cDNA_ID_1836253; gDNA_ID_2214546; Annot_ID_134589
ggggcaatgcaaatttggtataacctgtaaatttcatcatcctcagcctgctggtactactgtcccaccaccaccagcatctgcacctcagttttatccatcggtgcagtcacttatgcctgaccagtatggaggtccatcttctagcttgagagttgcaagaactcttcttcctggttcttatatgcaaggcgcctatggtccaatgctattaacccccggggtcgttcctattccaggctggagtccttactcggtgacctttttttttattgatgtatcatcaatacatttgttattcaccacagtctcttactgtctcacttttgcttttgcttcaggcacctgtgagccctgctctatctcctggtgcgcagcacgctgttggggcaacttctttatatggagttacacagctcacttccaccactccttcgcttcccggggtttatccatctctgtcctctcctacaggtgttatacagaaagaacaggcctttccagagagacctggtgaaccagagtgccaatactatttgaaaacaggagattgtaagtttggaacatcttgtaagtttcatcatcctcgagatcgggttccaccaagagcgaattgcgtcctcagccccattggtcttcctctacgcccggtatgctctgtgttaatatgtcataaaggttgttgatcatagttataacatttctgtctctaaatccgttgtttatcttgggttgaaaacagggtgtgcaacggtgcactttctacgtacaaaacggcttctgtaagtttggatcaacatgtaagtttgatcatccaatgggaacgatcagatacaatccttctgcgtcctctctagctgatgcaccggtggctccttacccagtgagctctctcttgggtgctctggcagctgccccttcttcttcatcgacagagctcatagcaggcggtgcaaaagatgcttacatgaccggtgtgcctacatcaagaagcacatcaaacatctcggcaggtttgattttctcccagagcggtgggtcaattccattctcagagctgcaactctcgagccagagctctcttcctctaacaggtagcagaatcacaagacaagggcgtgaaattcgtcgatccttttgaatagatcacctcagaaaagggtacgcatacgcaggtcctctggatcaccttttagcaattcttaatctatatgactattattatatagaagcatgtgatgtgaatttatatatataatcttcgtaccttgagaagaagaaaaagcctatttgagtagaagacctgagtgagaatcacatatatctgagaggaaatctatatgtgcatataccaaaaaagataacaagaaaaggcttcttctttttttttttggaatttgtgtataatgtttgtatagagacagacaaggtttctttgtcttgtccgtacttctacttcagacccattccggctgagacacaaaaacaaaaaaaaaaaaactgagacaaagaactcaattctcctcttcttttagtctgccaattggtgtacttctcgtgtgttaaggtttgttcttattgtagatgaatgatgtgtgttgttaattttgttatgttactgcttcacacattacatgtgttatggtgatgaaacaacctacatttcaagactagttttgaaggttggcaccattatcttgaatatatttatttccttaaaaaaaatggttttgaaatgaagttgagcggaagcacactaatcctagaatcgatcaatagcatcgggaaagtggtacaaaaaaagagacgagagaaatgatggcctagaaacaagttttaaaacaatatggagaaggaagtaatctttagagaaaaccctacctgagaaaagaaactatcatgctcaatttaatatgcttcgccatcatttgctcttatttgccttccccacttgtctctctctctctacactcttacttttctttttgtcaaaagcccaaggaagaagatgaaatcaactaaacttggacatccggctttggatttggattttgtagagtgggaaattgtagtttgttgtgaaatctaacaacaaaatatttaccaaaatatagatttgcttaagtgagatatgtagtattttaatgaattgcgtattaataggttaggagtagtaaactttttgtttttcttgttaactcgtttgagctacttccggaattgaaaagaaaaagaagagagacatagaggtatgattacaacccccaaaagtaatgcaaccattcacatttcctgcagtatagttttcttttaaaaaaaatataaataacctggtgtaaaataaacaaagagaagacacgataagagacctttttaacttttcaccgaaaagcataagtaataaacagcacacttaattgactttttacgcatatatgcatacatatattgcttttcaattacaaaaatagaaaagtacagaacatttagcaaactacctctgtatatatattgatatcctgtaagaaaaatctaaatattattaatatcacctttgaaacaaaccaaaaaaagaaagaaagaaagaaagacatttgtatcacctgacgtgtgtgtggactgtgggctgagatcatgtactcatacaagcattctcagactacctatagcaagcgagattagtgtcctaattcccggagaataaagttatatatatatattcacctaattttttattagtatatgatatgcacataaagaactgtttatttttatgaagaaagtcataattccactttaatcctgcatgaattcatgtgtgtttttaactctcactccatggcacaatctttcatatttgaaaagcagacagagagagagagcatttgcagccgacagtaaggaacatttttgggagaaacacaaaaacatatttgcagtaacacaaaaagaggtttacaactttatttggggagaagagatagataataataagatccaatg

SEQ ID NO: 21032 - DNA, 3003 bp, Unknown; identical to SEQ ID NO: 21031
  misc_feature (1)..( 3003): 2750-1469P.txt file - cDNA_ID_1836253; gDNA_ID_2214546; Annot_ID_185427

SEQ ID NO: 21033 - DNA, 3003 bp, Unknown; identical to SEQ ID NO: 21031
  misc_feature (1)..( 3003): 2750-1469P.txt file - cDNA_ID_1836253; gDNA_ID_1971751; Annot_ID_175303

SEQ ID NO: 21034 - DNA, 3003 bp, Unknown
  misc_feature (1)..( 3003): 2750-1469P.txt file - cDNA_ID_1836462; gDNA_ID_2214587; Annot_ID_135358
agagtaggaacagatggcttaatacaggaggccgaaacacaagatacttttactccactactaaaacatgatgagtacgaaatagaatcttatcaatccaagatgaagcatgtgtgatacatagaggagatcaaaacatagcaagggttgggactaataactttgagaatatgtacacttcaatgcctgtaagagaggctaactacaatgacgcttttcaaggatacactagcaagataacatcacatattaacaatgatctcacaagactaatgactgagcaggaaatcgaagaatccatatttgcagtggaaccattgaaagcaccaggctcggatggtttcactggcgagttctatcagcatttttggtcgaaaataaaaggctccattattcaagaggtaaacaacgtttttagagaaaacaagctatacgagaatcgtaaccacactaatctctgtctcatccccaaagtggaagccttgtcaccaatgggtgatttcagaccaatagctttgtgtaatgtaagctataagataatctctaagattctgggtaatcaactaaagaaacatcttagaggagtgataatagataatcaagcggcttttgttctggggcgaatgataaccgataacatcattatggctcatgaagtttattatgctctgaaagcaagaaagggtcgagcgtcctcaaacatggcaataaagaccgatattactaaagcctatgatcggttggattgggattttttggaggaaactatgaggcgaatgggatttgatgacaaatggatatcttggatcatgacctgcgtgacattagtgagacactcggttttgattaatggagcctcacaagggcactataaaccggaacgaggtatacgttaaggagacatactctcaccatacctttcattctgtgtgcaaaagtcttatcgcatctgaagaaacaagcagaagctacgaagcaactacaagggataaaaatctgcaacagaagtccttctttatctcaccttttatttgtagatgattcgttattcttcactcttgcaaattatcgatctggcatggcaatacagaatatcctaagtaatatgaggaggtttcaagacaggctgttaatttaagaaaatcagctataacctttggtcgacttgtgaagtcaaatacaaagagacaaatccgtcatttactaggaatcaacaatgaaggaggtggatgtaaatatttggggcttcctgaacagtttgatgaaaagaaatcagaactttttcaatacatcgtggaaaaggtgaaggaaaagactcaggaatggagcaaaatgtttttatcccatggaggaaaggaagttcttctcaacgcagttgctcttgcgattcccgtctactcaatgaatgtttttaagttaacaaaggagatttgtgaaaagataaatggcatataagcgaagttttactggagctcaggcaatgacaaaaaaggtatgcattggttctcctggaatcgtctaagcttgccgaagagagaaggaggtttgggattcaaggatctaaagaattttaacttggccttgttaggaaaacaagcatggaggatcttagaacagcctcattgcctgatgtcaagaatgctaaaaggaagatacttcccagacactaatatcatggatgctaatcaaggtcagaaggattcttttatttggaaatcaattttgcagggcatggacctactaaagaagggatttcgctattgtgttggtaatgggactctagttaatgcgtggttggatccatgctgcccattcacccgccgagaccgccacaaaaaaactagggatgccctagatcagcatatggttagtgagctcttaaactcaacacgcacatattgggatttcatcaaactcgctacttagataatacttgatgatgtggagaatgtcaaaaatattaaagtttgtgcattatacaaagactgacattatacaaagactggcatttagactatgaaatctgcatatgttatacaaacatatgttttgaaggagataatcatgagttggaatcaattatcaacagaagaagtccacacttttgagtttcaattttggatatgagagattcgagcttagaaacaaatatttctaggaagcaaatttttatgaataggaagaaaacacaacaaaccagcggatattctcgtaaagcagcaatgacctcaaggaacaaaatttatctttcataatcatattctttatgtaattcataatgctatgtgtttgtatcatacgttatttcaatattaataagaagctacaattcaaaaaaaaattaaaaccaaaatctacaccaaactttttttttttttttttttttttgtcgtcctacaccaaactttttaaaaccgaaaatacgaacttaaaaaaccaattatagtatactttttttttgttccgttttaatttttgttttatttcgataaatatctctggcgtagattagcgagagaggtttagctgtcgttttacattctctcaaagctctctcttttatagctttccaataacaaatcccaaatctgattctttcagctaaaaatcttacatcaatcaatcgaattgtcaaaaaaagatatcacaacccttcttctgaattctcatttcttaagcttatacacttgaaatctccaaaaaggtaccatttttatgactttgttatctccgttttgtgttcgttgtttgcgattctcaattgggttaaaagggtttagtcgttaaacatttccatcttcgtttttggacttgatgtgaatttaaagttgggaccttttatgttttgatccaaagaaaagaatctgcttaattgttgttttagtgtcagatttgtttcttctttgatgcaggggaaaaagaaaatgagttaggtgaagtttcagaaccatagagacgacgatttgatcgttgcgtaaaccaaatgatataaagcaaaagatg

SEQ ID NO: 21035 - DNA, 1462 bp, Unknown; identical to SEQ ID NO: 13172
  misc_feature (1)..( 1462): 2750-1469P.txt file - cDNA_ID_1837267; gDNA_ID_2214603; Annot_ID_135590

SEQ ID NO: 21036 - DNA, 1462 bp, Unknown; identical to SEQ ID NO: 13172
  misc_feature (1)..( 1462): 2750-1469P.txt file - cDNA_ID_1837267; gDNA_ID_2214603; Annot_ID_187117

SEQ ID NO: 21037 - DNA, 3003 bp, Unknown
  misc_feature (1)..( 3003): 2750-1469P.txt file - cDNA_ID_1837627; gDNA_ID_2214608; Annot_ID_135700
gtcctagatatccgaaatcttgtaatttgatagcatgatcgttttcattcttaatataatcattttgctgaaaacagaaaagaaaaaatccaatatataaacacttccatatagaagtcgcgggatgggagattaatgagaagaaaagacatgcagctattttataaaaatgctcgtcaatgcattatggtgatgaaataacatcattgggttttctataagttaataatcttattctcattaattagtcaaaatatacgattggaggtttatatatagattgactttgacctaaaccatagccgtaaatcggaaaatgacaatggtttatctttgtgcaatactagttcaaaatgcaataatagtaaaaaataggaaacgtagggccttctccattagtgtataaagtactcatttctaactttttaatatatctttgtgccaaaccacattatgacctcaaaactacttcctctcctcctcaatctcatcttcctcttcttctttccccttctaaacgcatccgaacaaaaaccttgctacagtttctcatgtagtcaagagagcgtcgttgctcgtttccctttctccctattctcctatcaacctgagtcatgcggctactcaggattcaacctcatatgcaaagatgatgccaatactaccttaaagcttcctaagtctgaaccctttcttgttaaggagatcgactatgaaacacagcgtattcgcctcaacgaccctgagaattgtttggccagacgacttcttaactttgacccttcaggatctcctttttcttttcttcgctctcgtaactacacgttcttgatctgtcctaaggaagcgaacatcactgcatccttcagagctatcgattgccttggtaataccacttcctccttctttgttgtgcagtttgagaatctcggttcgatgccatcttcttgtcacatctttaagatattacctcttccattttcttggtttgtcgcctacacgacataccctgatggccaaaacagtcgagacatgtggctcaaatgggactcgccggattgtagagattgtgagaggagaactaattcaagatgtggattcaaaaacaatacttcccatcaagtcgaatgcttcagttctgttaaccctggtgcgtacaatctcaattcttctctgttcttttgtacttcacgatattccaacttgaaacgacatcatctacttttgaaaaagttctttcccaaagaatccataaatggttgaaagcttcaaatccaaggagttgttaattaaacaaagaaatgaatctagttggctttaaataatgacattaaaccattgacttgattagtaaatcaatatattttcaaatagcaaacatgagagaatgtcgtaacattagaatatatgaatacttgtacatacaagtttcaccgttgacccgttttgttgttttgaaaacaggacttcacaacacaggcttacaagtactaaagataatgtgcctctccctagtcggaccactcaccgccttgactttttgtgtcggtcttgtcatgtgcagttccgagagagtctcttcacagatacaacaagcagtggttgcacgcctttctggatccgtaacgtcgcagccaagcaacgaagtcgcaaggataggtctcgatgagtctacaattgagtcatacaagaaagttgagctaggggagagtaggagactcccgaccgggtcaaatgatgttgtttgtcccatttgtttgtcggaatatgcaaccaaagaaactgttaggtgtttacctgaatgtgaacattgcttccatactgaatgtattgatgcgtggctcaagttgcatagttcctgcccggtttgtcggagtaatccatctcctttgcgcgattgattgctttgaatagtcttgtagcgtttgtatgtaatttggaatttggatctctccataaatgcattacaaactgtgtcaaaactcaaaactaagcccaaacgccaagtttattagaaaagtaaaaatgcaaatgagaattcgtagattttcctcggcagattctatgaaaccacaaaattgggaaatttcatgggctatgaggaaataagtgattaattctatataatatttatcgataaattaataattaatttataaagagattattttaattttgtaatttttaaaacaattctatatggaaagtagttttttctttgtaattaatatatttctaaaaccaattacaagtagataaataattatttagtttaaaattttttatcgatgtaataaaaataataaaaatgaactcttccaaaaattaatacaaatttatgtaaaaaaaacaatattaaaattctatttcactaagaaaatttatatataatattttaaatatatataataataatttatagatgtcatatatataatattcttcgtccatatttgttagttatttaaaatcgtaatttctaccatcacaatttttactaatcatcatttataatatagtcaaagcccttataccaaattcatataacaaaagtttatattgtttagaggcagaattatcaataattaccaatcggctcctaacttatttaataacggttgaaactgtatctgtgtttgttttgtttcagcaaattcccgcatcctttgcgtttaaaccagtcctcgttaattgaagtttataataataccccgtccgagggtatgataagtaggtgaacttatctctctgactttggtcgctttcactacactacactagactgtccattagcggattaaacgaagacgacgagttaagcttttgctgacttgcaaatttctcattcgtcttctttctccaaatctcgatgccaatttagggattctacttgacgttccgtgcaatttcttcttctgcgctactagaattgatttctctcgaaccctaaatttcctctggacctcaatgcttgtttgtttctaattacttggttcaacgatg

SEQ ID NO: 21038 - DNA, 3003 bp, Unknown
  misc_feature (1)..( 3003): 2750-1469P.txt file - cDNA_ID_1838125; gDNA_ID_2214620; Annot_ID_135856
tttatagatcaattaaaaaattacaagggggagaaaaagaaaatagctcttatagatcgatcaatcggatcactaagaattgtcacaaataatataataaatgaacacaaatcataacatatatggtgttatatacatctacttaaagtagatgaccggactattagatctcaaatcccacattccactttctttaaggtattcatggtatctagagaactccggtttagccgtcgctttcttcttgttatggcggcgataaccatcaaataaactgaagattggatggcttaatttgcttgtcaccactgttttagttggtttttggcgtggaagcttttccaaaatcacaggaaaatctccaccaagccttatcgatggagcatagtatggaacgctcgttgacctccttagctttgctccaagtaggctgaaggtggaatcatcgcttacacgctcatatccgccgcgacgactcctcgtcctcgtgcttaagtttcttagcatttgcatttctggattagttgaaggtttaaattgcttggaagagagaagtgacgaaggtaatggtggtggtgagaaagagataggcgtcaagagaagtgtattgttgtttgtggttattgtaacgagagagtctttgattgtctttatatagtttttttctatagagagtctttatatggttttattgataatataagaattgtaggtttaatgattttgcattatttaagttaggttgccattttggaaaattcaaacttcgtcggtcgtatcctcttttctattagtaataatatattttatcttccgttaataaactaaacatagactaagacttgcattgcatgataaacgttgtgttaacaatagaataaacacatacttattatatatgtgtttataaacacaattaataaacaaaagaaatgacgacaagcacatggttgattggtttatatattagtccatcacgtaaccaaatgattgaaaatatttgtaattcatgaatagctacaactgtaaaaagaaaattctgaattacacaaaaagaatttggttaaatttaaaggatagtatatgcacagagaccaatcttttgcattttcaaatcggtcaaagcatcagttgctttcgaatcgttggaacttggaagctgctaagcgctaactagagaaacttgtctttcgaccgataaaatttaaaggatatgaaattcgtgatacacacaaatttataaatagctgttaacatttactgaccaaaataatataagttatgtgaaaaagtttgaaaaataacacaatatttttttttgttcactaaaatattataaattatgcgaacattgagttttttattttgccatttaaaatgttcacagtggctaacatgattgaaatcttagtagtaagactcaaagttagtcattcaactaccatagtgaatcttttaaccacgaaaccaccataatcagtcttcctgtaaataatcacctaatcggatgttgctacctaataaaaaattattcatttaactataaaatttatctatcacaaaacgaaattatatatccgtttgggtttactagagaggattaatgattatattttatgattaaacaaaattagctatctgtttggatttataaacgagtttatattttacaagtaaatgaggttaaatgtcagttaagatttataaaagaatttagattttataattaaacgagattaaatatcggtttgagtttagaaaaaacggttagatttaaattttataattaaacgagtttaaatatcggtttgaatttaaaaaagagaattagagtttagattttgtaatcaaacgagatcatatatcatgtttgatttatgaaaaacaattagaccattcacattgcataacctctcatgtatgtcttaaagactaaccatagttaaaattaaagacatttccttttggatgtcaaaaatatcttccttaagatattttagacatctaaaaaataaaatgtttttaattttaatcatggttagtctatttttaccatggttggtcttggagacattaataaaagattatgcaatgtagatgcttttagtatttagaatggaagtgaaaaaaagaattcatcgtaaagatgaactcaagaattgttcgataatatatgtgttattttcaaaaatactttaatttataaataatgaatatttgatatcttttaagtaaataaaaaatgtggtaaaatgaaaataactaaacaaaaaaaaacttgaaatatacaagggattgggaaatgtcatgcataagatactttggggtttgatgacatagatgaataaagattttgaagaacacatgccggttaaagcctaaataattcggttaaacactcgcaaattggatttttggttaaaccaattggtagacgtgtcaaacctaaaccttccattgcgctaagacgtttcgaaactcacaaagataaaccctaaaacaataaacttttcctcagacatcagcctcggcgaccacgacaacaacttcattttttctcgtcgagtttttttctgggaattgcaggtaatctctcgttaacgtgcccctctggtttctcaaatttgggaactctgtttttgttctgttctgggaaagtagaacaattcgaattacggttcgaccgaagtcaaaccgggttttgtccggttaaataaattgaaagaaaaaacaaaggaacactgtaataaaaaccctctcctaaaaccctaatttcttcttctctccgtcttccttcttgttgttcccggtgcgatttctttcattttgatttcgatagtttattcttctccttgttttcactgtttgtgtgattgattctctccatgaattgataattcttacactattgtcttttagctcgactcttaaactgatttgttcttgttaccattgatggttttaattgcaggtggatttatcagagtgttgtgctaacaaatg

SEQ ID NO: 21039 - DNA, 3003 bp, Unknown
  misc_feature (1)..( 3003): 2750-1469P.txt file - cDNA_ID_1838273; gDNA_ID_2213646; Annot_ID_132385
tatgcttattgcagaaattgtgtgtcgtttactttttcgtcttatcataatcacttgtatcaagttgtacgttagcccctatggaacgtgaggacgcttacgtattcataatactaaaaagataaacagtgtctagttcttttgtagccatttttttgggtacttaaacactataaattctttaaataatatatcactgttttcttttgataaacgaaataagaaaccaatgttgtacataagttctgtgttatggttgacgtgataggtaaatgttgtcaagctaatcgtaagtaattaaactatatgattaagttattaatgcgtcactgatatggaatatttttgtgatctgttgatggacctgactttaattctcgattcttaggaattaggaaatggccaagttgaccaacaaaaaatgtggcgggtgtagtggaacccactcaaaaaaatcaggcaactttcgtaatttaatgaaacatttgggggcgaaaataaggaaaacgtaaaggatgtgaccgacaaattatttagagccgagacgtaattgaattggacggcactgccacgtgtaagcacgaaactcacttgggtcacagtacatgcggatccagaggatcttttatactaatccaattagactcatccacgtgtcaaattagttaaatttaagttttttttagtccgaaattaaagttagaatattaaattaatttccacacacaatcgtttttcttagttattttacaactagctagtataaacgataaccaaaatggatgacatcaaaataattaattaggccaaaaataataatatcagcagtcaataataaaattgtgtatgcatgtgtcatggtaccattgtttcttaagctcaaaacatttatgatgagcatggaggaatatgtgatttatgttgacttgtcatgcatgtatacaatttatagcttcttcagtcaacaaaaaaaattgaaaatgttaacttctctaaaaggagcttttccacagatttcaatcagttcatgattttctcgatataaagtaggcatgaaattgacgaatgaaaatgtatgaattgaagaaactatataatgaaaaacaagaatcatcaataaaaatcaaatgtttcttacatagtttttttttcttcttcaaggaaatcaactatgttttgtttttttatacaatcagatcattagattaatcgtatgtttttgtaacttaacttatgttgatcagcttcattaaaatgagagtttattcttgtaaacaaaaaagttagttgtgatgactaatatgcgtttccgaaacgaaaccctaaaccctgcaatagaaaagggattgttgaacttaatttgttttgtgcacgagaagatggatgaaacagaattgttaaccaaaaatcttatgaacctaattccaaaaatcttatgaacctcacagactttgagaatcgtttaaatgactaatgtaaagatgtgcaagcaactgatatgaagaattgttaaccatatattgtgatatctcatatttgtatatatatttgatatatacaaatatgtttgttccaaattttgttacaaactacacagccaaatataagaagctatcaaatattatttctttagcaagtttgaattaatcaaacgcaggtcattataaattaaatcataacaggtggtataaaaacaacgtattttgttaaatttaagtgattgtagtcttagaattatatataggtcttttgttagagatgaatagttgatttctgatgtatttcctagtattacatcattaacgcaatgaccatatataatgatatagacaacgatgacagagaggtgactaagttaacatgttatgatcctcgtctgaataaactagaagactagccgcatgaaaattcttagttaacaaaaaatgatgttgtctatatgtatatctactactaatatcatgaacccaaattactcaagaattaaagaaataatattcctaacacaagttggcttttcgtaaactaaacttacggtattgttttatgcatcgatcataatgaatattttaaaacactaaaacatggttaaaaaaaaaagtaatccacatgcgattgttttggattggtccttttaaataaactaaagttttggcagagaggaaccaagtaaaaatgggcattatctaagaatggtcctaattccaagaagatattacactcttttacagattggacccaaacactcatgtgaagatgaaaaaataaactaagaatacaaaaagaagaaaataaaagaaaaaatcagagatcccgtcggagaaagaaaaagagaagatagagagatacaagtaacggcttccactaatctttcgccttctacatttttgctgctccgtccaatttttgtgtctataaaataagacagcttctttctcttgactttccaaattcactcaactttctctcactccttttttctctctctctctctatcctctacagagctcgcagcaactagcgcaggtactctctctttctcactccttaatctagatactaaagctgatcattttcatatctctcagtaatccgtttcgtctgatcgggtaaaacacacttccaattactccggttccgacctcgttgactttttcttcagatagattccaaaaaagttctcatctttacttgttcaatctcatagattccgatttgggtctgattgttacctctccacaactattgggttcctctcaaaacccttcgatttcttgatccatccttccttaattttcgattctcgaaaaccgttttcacaacttttttttataaaaaaaaaaatctgcaaaaagatctctctgataagaatttttaaaaactttccctttatggatgctctgaaacataaaagagcttttaagtttataccttcccttatattctctgttttcaaatctgtcagaatctgatcactcttttctttttatctacttcaggatg

SEQ ID NO: 21040 - DNA, 3003 bp, Unknown; identical to SEQ ID NO: 21039
  misc_feature (1)..( 3003): 2750-1469P.txt file - cDNA_ID_1838273; gDNA_ID_2213646; Annot_ID_181442

SEQ ID NO: 21041 - DNA, 3000 bp, Unknown; identical to SEQ ID NO: 3990
  misc_feature (1)..( 3000): 2750-1469P.txt file - cDNA_ID_1838404; gDNA_ID_1620678; Annot_ID_48291

SEQ ID NO: 21042 - DNA, 3000 bp, Unknown; identical to SEQ ID NO: 3990
  misc_feature (1)..( 3000): 2750-1469P.txt file - cDNA_ID_1838404; gDNA_ID_1620678; Annot_ID_164307

SEQ ID NO: 21043 - DNA, 3000 bp, Unknown; identical to SEQ ID NO: 3990
  misc_feature (1)..( 3000): 2750-1469P.txt file - cDNA_ID_1838404; gDNA_ID_2926213; Annot_ID_142077

SEQ ID NO: 21044 - DNA, 3000 bp, Unknown; identical to SEQ ID NO: 3990
  misc_feature (1)..( 3000): 2750-1469P.txt file - cDNA_ID_1838404; gDNA_ID_2926213; Annot_ID_202759

SEQ ID NO: 21045 - DNA, 3000 bp, Unknown; identical to SEQ ID NO: 3259
  misc_feature (1)..( 3000): 2750-1469P.txt file - cDNA_ID_1838524; gDNA_ID_1620635; Annot_ID_47355

SEQ ID NO: 21046 - DNA, 3000 bp, Unknown; identical to SEQ ID NO: 3259
  misc_feature (1)..( 3000): 2750-1469P.txt file - cDNA_ID_1838524; gDNA_ID_2926178; Annot_ID_140450

SEQ ID NO: 21047 - DNA, 3003 bp, Unknown
  misc_feature (1)..( 3003): 2750-1469P.txt file - cDNA_ID_1838553; gDNA_ID_1620724; Annot_ID_49260
ggacctaactaatatatataagtgacatacacaaatccactaacgatagggtttttttttggtaaaacactaacgataggttatcgatagaaaatccataaaagttaatatggtaccagtgatatagaagtgacatgatctagatccgctcatttttaattgattttgagttgaaagtttatgaacctcaaaaccaaacaagtttcattctaggttaacttattagaattagtttttttttgttcgttccatgtaagtgaactaagaacaattagtttctctaatcttagataattatagctaatttttagaaacaaacttgatttcttgattgatacgaaacatagaaaatatcttctttcataattgatagtctaaagtaagatcattggttgtaaatcataatatatttgtttcctagtttgttataccgtataacttcattttatcattcaaaactatgcagattggattcagatatgggtctttagtagaagactactacacagggtataggctccattgtgaaggatggagatcagttttttgcagacccaaaagagcagcattttgcggagattccccaaaaagtctaattgatgtagtgagccaacaaaagagatgggccattgggcttcttgaagttgccatctcaaggtatagccccattacctatggtgtcaaatcaatgggtctagtaacgggagtaggctattgtcaatacgcatgttgggccttttggtcacttcctcttatcgtctatggattcttgccccaacttgctctcctttatcaatctagcgtctttcccaagtcatcagatccatggttttggctttacatcgttttgttcctcggtgcatatgggcaagatctactcgactttgtattagaaggaggaacttatggcggatggtggaacgatcaaagaatgtggtcgataagaggattctcttcacacctatttggcttcatagagttcactcttaaaaccctaaacctctccacgcatggattcaacgtcacaagcaaagccaacgatgacgaagaacaaagcaagaggtatgagaaagagatttttgagttcggcccctcttcgtccatgttcttgcccttgactacggttgccatcgttaacctccttgcttttgtctgggggctttatggtcttttcgcttggggagaaggactcgtccttgagctgatgctggcgagtttcgcggtggtgaactgcttgccgatctatgaggctatggtgttgaggatagacgatggaaaattaccaaaaagggtttgtttcgtagctggaatcctcacatttgtgctgattgtgtcaggttacgtcttcctcaagtaactggacccattatggttggttctgtcgtttcagttaaactaatattacatctgtattgtggtaattaggagagaataatgtgatgaatccatttctcacctcattttagaacatacatttcggtatattgcgtctgtattgtagtaattaggagagaataatgtgttgaatccatttctcacctcattttagaacatacatttcggtttattgtataagcttaaattagtaattgaaaacgacatacactatctattgatattttcactgattaatacgactgtattttttatatttcttaatggatgttttgagcacaatttagtaaatatgggccgtagagatatgctacttcgtcaaaatgttaaaacgtctttgagatattttgagatataatagacgataagacaacatttatcttgcttacttcgatctattgtatttatttgtatttataattgaagtttcaccgtacaaatactttatatttatcttaggtttataacaaattaattattccctaaagttttaaaataaaatatttccctagcgagctagtgggatattaattatcatactcaaagtagtcgattatagaaactaaatgattaaaattttacgtagtctggctctgtttttatctcaaatttctttgcaaataaaaacacaataaatcatatttacttgggagaaacttctatcacatattaatatttatcaagaaaacttcaatcatatttttcgtaaagtgttacttacctttatacaaatattccgtgtattcctcggtttacgattctttatgtctgattgtgtggaaaagtacaatcgatatttttgcaagaagttaagaagttggcacttggcagatgcgtgacgtgaatgaatcgtcaaggcagtgactctccaagccccagtcttcatccatttgacattttcgcatctttttcaagctagagaattttaacttaagttctccattgaaaatttcaaactatataaataaaactccacatatctcactaaaatctaacacgtgacaaaaatttaattacttaagtgtagtatatgttagtaattttctcaactcgcgagcaaacttcagttaacttgattttgataaaataaataacacatcaattatctgaattctttttaaaagaaacaaatatttcatagaattagtttttttttcattttagaattctaattgaatattacagaataaaaacttttacttactaccacacaataatagactttaaagttagttattgtaagtagaatgtattattttgaagttaaaatcgtgtatttatcgtgatgtaaaaatttaccgttctttcttataaactagtcaggctattctggtgttgaactacttcacttcacacgtgtcttttggagaagtagtttcattaataaacacttatctttaattttggcttcaacttttcaaaggcacataatgatcacactgtactgtatcatcttatctcataaatgagaaactcgaccataagaactgtctatagtgtgtatattcagaaaagttatcaatagttcaatactaagaaaccggcctatatatatatatttgtggtcactaatttctccaaaaaccagttgccttccgtaaaaagatg

SEQ ID NO: 21048 - DNA, 3003 bp, Unknown; identical to SEQ ID NO: 21047
  misc_feature (1)..( 3003): 2750-1469P.txt file - cDNA_ID_1838553; gDNA_ID_2926184; Annot_ID_140711

SEQ ID NO: 21049 - DNA, 3000 bp, Unknown; identical to SEQ ID NO: 6205
  misc_feature (1)..( 3000): 2750-1469P.txt file - cDNA_ID_1838557; gDNA_ID_1620864; Annot_ID_51314

SEQ ID NO: 21050 - DNA, 3000 bp, Unknown; identical to SEQ ID NO: 4463
  misc_feature (1)..( 3000): 2750-1469P.txt file - cDNA_ID_1838565; gDNA_ID_1620707; Annot_ID_48918

SEQ ID NO: 21051 - DNA, 3000 bp, Unknown; identical to SEQ ID NO: 4463
  misc_feature (1)..( 3000): 2750-1469P.txt file - cDNA_ID_1838565; gDNA_ID_2926173; Annot_ID_140201

SEQ ID NO: 21052 - DNA, 3003 bp, Unknown
  misc_feature (1)..( 3003): 2750-1469P.txt file - cDNA_ID_1838672; gDNA_ID_2926147; Annot_ID_139153
tgtgtaatgtacagtacaaaattgtggctaagatcctaactagacgtttgcaaccttggttgtcagagttgatctctttgcaccaatctgcttttgtaccaggccgagcaatagccgataatgtgttgattacacatgagattcttcactttcttcgtgtttcgggtgctaaaaagtattgttctatggccataaagaccgacatgagtaaggcgtatgatcgcattaaatggaattttctccaagaggtccttatgaggctgggttttcatgataaatggataaggtgggtgatgcaatgtgtttgcactgtctcatattcattcctcattaatggatcgcctcagggaagtgtagtgccatctcgaggactgcggcaaggtgatcccctctccccgtatttgttcattctatgtacggaagttctttcgggattatgtcggaaagctcaagaaaaaggagtaatggtgggcattcgcgttgctcgaggaagtcctcaagttaatcaccttctatttgcggatgatacaatgtttttttgtaaaacaaatcccacgtgctgtggtgctcttagcaacatcctaaagaagtatgaattagcttcgggtcagagcataaacctagcaaagtcagctataaccttctcttctaaaacccctcaagatatcaaacgcagagtgaagctttcgctgcgtatagacaatgaagggggaatagggaaatacctcgggttaccagaacactttgggaggcggaagcgagatatcttctcgtcaattgtggatagaattaggcaacgctctcatagttggagtatacgctttctgtcaagtgctggaaaacaaatcctgctcaaggctgttctctcgtcaatgccatcttatgctatgatgtgctttaagctgcctgcctctttgtgtaaacagatccaatcagttctcacccgtttctggtgggattcgaaaccagataaaaggaagatggcgtgggtctcttgggacaaacttactttgcctataaatgaaggaggactaggtttcagagaaattgaggagttcaacgatgctctctaggcgaaacttagttggcggatacttaaagaaccacattcccttctctctcgtgtcttgttggggaagtattgtaatacatcctctttcatggactgctctgcttctccttcctttgcctctcatgggtggagaggaatccttgcagggagggacttactacgaaaaggccttgggtggtctatcggacagggtgatagcatcaatgtttggactgaagcgtggctatcaccgtcctctccgcaaactcccataggacctcccacagagacgaataaagacctttctgtccatgatcttatctgtcatgatgtgaagagttggaatgttgaagctattaggaaacacctacctcagtatgaggatcagattcgaaaaattaccatcaatgccttgcccttgcaggatagtttggtttggttacctgtgaaatcaggggagtataccaccaagacgggttatgctcttgcaaagttaaactcattcccagcgtctcagttggatttcaactggcaaaagaatatctggaaaatccatacttcccctaaagtgaagcacttcctctggaaagcaatgaaaggagccctacccgtgggagaagcgctttcacggagaaacattgaggcagaggtgacctgcaaaagatgtggtcagactgaatcttcgctacatctgatgctcctctgtccatacgctaagaaggtctgggaacttgctcctgttttgttcaatccttctgaggctacccactcttctgtagcactcctcttggtggatgctaagcgaatggttgctctcccaccaacaggattgggttctgctcccctgtatccgtggttgctttggcatctatggaaagcacgtaaccggttgatctttgataatcatagctgttcggaagaaggtcttgttctaaaggccattttggatgctcgtgcttggatggaagcccagttgctgatacatcacccttccccgatttcagattacccttctcccactccaaatctgaaagttacaagttgttttgttgatgcagcttggactacttcaggttattgtggtatgggttggtttttgcaggatccatacaaagtgaagattaaggagaaccaatcttcgagtagctttgtcggctctgcgcttatggctgagactctcgctgtgcatttggctttggtggatgcgttatctaccggtgtgcgacagctgaacgtcttctcggactgtaaagagttaatctctcttctcaactcaggaaaaagtatcgttgaactgcgaggactgcttcatgacattagagaattgagtgtttcctttactcacctttgttttttctttatccctcgtttaagtaatgttgtggctgattctttagctaaatcagccttgtctgttattctctcttcctccgttagtggtgggtaaaactcgtttgcattttttataatgaagtttgataaaaaaaaaaaaaaacatattccaaaaaaatttaaaaaatctatacccaaaccgatccgaattcgattagatctaaatcaaaaccgaaccgatattttagatttactttttgatcctaaacttttctacccaaaagattcgtaccggatcgggtttaatcctaactcttccaacttacccgaatacccactcctaaattctgattctgttttttttttttttttaacacggcaaatcaaaattctgattctgttattgtagtaaaatcagattcatctctttggaaaaaaacgataagggatctctctctaattggcgctcctttactaattgccctttaattccatccatcttcggattcttttcaaatcaacaaaaaaagtacaaatcggatccctacaatatcctctccactcttcacaaatccttctccgagatctacaaacgctgtttcattcttccgattacaatg

SEQ ID NO: 21053 - DNA, 3003 bp, Unknown; identical to SEQ ID NO: 21052
  misc_feature (1)..( 3003): 2750-1469P.txt file - cDNA_ID_1838672; gDNA_ID_1620633; Annot_ID_47295

SEQ ID NO: 21054 - DNA, 3003 bp, Unknown
  misc_feature (1)..( 3003): 2750-1469P.txt file - cDNA_ID_1838680; gDNA_ID_1620742; Annot_ID_49640
gcttttaaaagcaaaagcaatgttgttgaatacgaataaaatgatgtttgttgtctttgagaaactttaaatttgtctgtgttttgtgccaaaacttctgattaattggtttttggtctttgtgcgttactattatcaattttattcttattatttgccatagcttatgattaaattgatcatagaagaaacatagaggctttaggttcttgtgctgaaccaagtttggcgtattcagtattttacattcttgtataaaattgaatgcatatgtcataattctggtaatacttgttaaattttgttgttcctgattaacattaccatacctattttgcaatgttttcatgacaaatattgccatactaaaattgctggaggaaacctcacctttcaatcgatttgactaaagtattgattgtaccaaactattcatgcctcaccttaaatttggaaacttaattgtgaaacatgtcaaatatggaatatatattgaataagattacaacaactcagtaaaacaacaaggtccttaatttgaaacagttaagcagccatgaaattatcgcaaatagctctgatttgcatagttatagcttccctcttcgctatgcatgagtgtacgtacagagcttttctaatatagtatacacacacgtatatgtcaaatgtctttttttaatcatcaaagttttgtgtgtctcaaatcaactttgtaggtgagagattggaggctacagaggaagagaaatcgagcaagatctatgtcccaccatgttacgaaaccatttgctcgttctcacttaaaaaggattgttggtgctgcttcgaacctttagttcacaaaaatctttgttggggagtacatgattttccgaacgccaaagagctttgcttcaacgaatattcaaagaagatttaaatcctttttattagagaataataatgtattctctgtttcgtgtagaaagttttttttcctcttgagtgcacaacaagttatgtgtttgaatctgcaaaaatttactggtcacatgttcatgctcttatcaacgagaaacacgacgtctaattccacttgcctccctcattcactctcttctatataaacaaattccactttcttccctctcactcactctgtcatctataaacaaattccacttccctccctctcactcactcactctgttataaatgaaacctaaaaaaaaacttgagagatcagatcaacaaaaccaagagaaaacatggctcagaacgatacagtgaagctgataggttgttcggatgaccctttttccattaggccacgagtggctctacacttgaaatctatcaagtacgagtacttagaagaacctgatgatgatcttggggaaaagagccaactccttctcaaatctaaccctatccacaagaaaacccctgtcctcattcatggtgaccttgcaatctgtgagtccctcaacatcgttcaatacctcgacgaggcttggccttctgatccatccatccttccttctaatgcctatgatcgtgcgtctgctcggttctgggctcagtacatcgacgacaaggtaaaacagtttagagactcacttctacatgctctgttttgcttcttgtcaaagtttgatactttagtctctgttattaataaatctgtttagattagtcaaatcaagagttatgtgtctgaaacagtgcttcgaggcggcgaatgcgctgaccggagcaaacaacgacgaagagagaatagcggcgacgggaaagctgacggagtgtttggcgatactagaagagacgtttcagaagagcagcaaagggttagggtttttcggaggagaaaccatcggctaccttgacattgcatgtgcggctcttttgggtccgatctctgtgatcgagatgttttccgccgacaagtttgtccgggaagagacaacacctgggttgatccaatgggccgtgaggtttagggcccatgaagctgttaggccttacatgccaaccgtcgaagaggtcactgaattagtaaagcaaaggattgaggagggttttaagcgaaacttcaaaagcaatgtttcgacttcggaatatgaatagttgatgtttgaatattttaatgctttctgtattactattttgtgccaaaacatatgcacttggatttttctttcttctatttgatatctttgtgtttttattgattttgaagcctcatttctcttagttttctttatttcacattcatgttttagcatatagtttcatattattatttggttaattgtttatatatactgaaaaaaataaaataatcttaattggtttatccaaaaggcgagaaaagccaaaaagggacacgtcatactactcactcgtaacaagacacgagttttttttaataacaaaatgaattgagtgattgatgacgacgacaagcaaaatgcaaaatcgctgtctccttcatgcttcgatcaatcaaaccatcatcaaacccataagaaagagaccaacagtgttcctgtaggaagcggcaaacttgcagctctgttctcttgaaatggagaaaacagtgagatgtgttcggtggggttatgaggttaatacctcttctgatgcttgcatcgacgcaattaactcctattttcaacaggttcttcttcaattatccctcttttagtcactgaaacatcatgaaattgattggaacattggttacaacagggcttaagattttcgatgcaaaattgaggtttttctctatggaatctagatggggtttcattaagaaaagtatcaatttttttattcttcaatcaaatttatggctagggtttgatcattttatgaatttgatacgtttttgagtcactatgtagcttaattacgatcttgtgggtagtttctgctctgtttctggagtattattcttaaagtttccatctttgtaatttcatatcagtgaatattgttgatcatgttctgtggttgatg

SEQ ID NO: 21055 - DNA, 3000 bp, Unknown; identical to SEQ ID NO: 8520
  misc_feature (1)..( 3000): 2750-1469P.txt file - cDNA_ID_1838731; gDNA_ID_1971814; Annot_ID_58192

SEQ ID NO: 21056 - DNA, 3000 bp, Unknown; identical to SEQ ID NO: 8520
  misc_feature (1)..( 3000): 2750-1469P.txt file - cDNA_ID_1838731; gDNA_ID_1971814; Annot_ID_175898

SEQ ID NO: 21057 - DNA, 3000 bp, Unknown; identical to SEQ ID NO: 8520
  misc_feature (1)..( 3000): 2750-1469P.txt file - cDNA_ID_1838731; gDNA_ID_2926180; Annot_ID_140525

SEQ ID NO: 21058 - DNA, 3000 bp, Unknown; identical to SEQ ID NO: 8520
  misc_feature (1)..( 3000): 2750-1469P.txt file - cDNA_ID_1838731; gDNA_ID_2926180; Annot_ID_200189

SEQ ID NO: 21059 - DNA, 3003 bp, Unknown
  misc_feature (1)..( 3003): 2750-1469P.txt file - cDNA_ID_1838761; gDNA_ID_1621194; Annot_ID_57530
aatctatacacgtttggtatcttgatggatggattgtataagaaagggagaacgagtgatgcacagaagatgttcgacgatatgaccggtagaggaatttcgcctaacagagttacctataccattctcatttcaggtttgtgtcagaggggaagtgctgacgatgcacgaaagctattctacgagatgcaaacgagcggtaactatcctgattccgtcgcacacaatgctttgcttgatgggttttgtaaattgggtcggatggttgaagcatttgagctgttgcggctttttgagaaagatggttttgtgcttggtcttcgaggttatagcagtttaatcgatggattgttcagagctaggagatacactcaggcatttgagctgtatgcaaatatgctgaagaagaatattaaacctgacatcattttgtacacgatattgattcaagggttatctaaagccggtaagattgaggatgcattgaagctgttaagcagcatgccaagtaagggcattagcccagatacctactgttacaatgctgttataaaggctctatgtgggaggggacttttggaagagggtcggtccctccaactcgaaatgtcagaaacggaatccttccctgatgcgtgcacacacacaattcttatctgtagtatgtgcaggaatgggctggttagggaagctgaagaaatttttacggagattgagaagagtggttgttctccttcggttgctacgttcaatgctttaattgatggactgtgcaagtccggtgagctcaaggaagccaggttattgttgcataaaatggaggtcgggagacctgcttccttgtttcttaggctttcgcacagtggaaaccggagttttgacaccatggttgaatccggttcgattctcaaggcatacagggatcttgcacattttgctgataccgggagttcgccagacattgtttcttacaatgttcttataaatgggttctgcagagcaggagacattgacggtgctctcaagcttctcaatgtgcttcaactaaagggattatcccctgatagcgtcacttacaacactctcatcaatggacttcatagagtcggcagagaagaagaagcttttaaactcttttacgctaaagatgattttagacacagtcccgcggtttacagatcgctcatgacatggtcatgtcggaaaagaaaagtcttggtggcttttaatctatggatgaaataccttaagaagatatcttgtctggatgatgaaacagctaatgagattgaacaatgtttcaaggaaggggaaaccgagagagctttaagacgacttattgaattagataccagaaaagacgagttaactttagggccttacacgatatggcttatcgggttatgccaatcagggagatttcacgaggccttgatggtgttttcggttttaagggagaagaagatccttgtaacacctccgagctgtgtcaaactgattcatggactctgcaaaagagaacaacttgatgctgcaatagaggtgttcttatacactctagataacaacttcaagctgatgcctagagtttgcaactacctcctaagctccctcctggaatcaacagaaaagatggagattgtttcgcaacttacaaacagaatggaacgtgcagggtacaatgttgactcgatgcttcgattcgagattttgaaatatcatagacatagaaagcaggtgctgatagatctttaggtaatgaaatgattattaaaggtttatctacatccggattcataggcattagttttgtggagaagagaaatatgagttttgattcgaatctctttaccttaacactacattagaatagaaaaatctctggaaccggaagctctttgaggaaaaggaaaaggaaaaatatgaggtttatacgtaaatgctttgtatgctttattgttcatgaagtttttccttatctttattgtacactgatttgttttgtattatgatgttaaatttctttgaaataaagactaaacatgtctaaatctttctggtttccttccaagacctgttccaacatttttgaccctcccataaattatgtacacagcttgtttgtaagataagggagcttcctgaatccttttggttagacaaagagacatgaatcaatcataaatacctcttgattcttcgttgtggacttggcttatcagatattgttcgaatcacaagatttggccaaagtttcctgaagttgacatcaacaaaaagcatctgctgatttcaggctggaaagggccttttaaaaaaaatccccgggccatatgaccatatctgtctgacgtggcatcaccaagggctttcctaattcagtatctcagtgccaaaacgacaaaagatcacagtgaggccgactaatcatgggcctgaccgttgatccacgtgtctttgtattccacgtccaaatctcaacccttcctttacatatgccatgtcatcatctttttcaccatttttttgtgagttttatgtgtgagttttttttttgctgtcattaatttagaaacaataatctcgttgtatcagtatctctatttaatatgcaaaaatcagtcattagttttattttaataccgttgaaaaaatgcaataattcataggtgtgccgcagcagattttaacccatcaattttataggaacagagtgtgtcgtctctctacaacagtcgtaggcacattaatactataattgccttaaaaactccgttgagtagacaaaaagagtgcaattccaaagcatttcttattcttatagattttaaaaataggaaaaaggtgtaaatctgcgaacattttggattcttcacgtttgtttatattttgggttggctctacacctactctcagaagtcataagccaagcaaagggggttttagggtttttgaccgcgagccagatctctttcttttgtttctcccacttccgaatcaatg

SEQ ID NO: 21060 - DNA, 3003 bp, Unknown; identical to SEQ ID NO: 21059
  misc_feature (1)..( 3003): 2750-1469P.txt file - cDNA_ID_1838761; gDNA_ID_1621194; Annot_ID_174665

SEQ ID NO: 21061 - DNA, 3000 bp, Unknown; identical to SEQ ID NO: 4576
  misc_feature (1)..( 3000): 2750-1469P.txt file - cDNA_ID_1838776; gDNA_ID_1620715; Annot_ID_49104

SEQ ID NO: 21062 - DNA, 3000 bp, Unknown; identical to SEQ ID NO: 4576
  misc_feature (1)..( 3000): 2750-1469P.txt file - cDNA_ID_1838776; gDNA_ID_1620715; Annot_ID_165620

SEQ ID NO: 21063 - DNA, 3003 bp, Unknown
  misc_feature (1)..( 3003): 2750-1469P.txt file - cDNA_ID_1838830; gDNA_ID_1621162; Annot_ID_57139
ttctcctggaacacaagctgataatgttgaaagacatgagagagtaagtaggctattgtagttaaaaaaatgtcttagtaggatgctaattgtttgtggctatttcttttgttagtttatctcctaaaattactgttattcaaccactatatcatctacaggaacatgaaaagcctataaggtttgaagaaccaacatcagataacacactcaccaagggggatgtggaaagggtttcagaggacaatccacggtgcagtcagccactgcgatctgtggccacagtgctggattccccagctcagtcaaccggtcctaaaatgttttccacattagaatttagtttccaaaacctcaggacaaggaggttagagaggctgtcgagattgcagtccacaggttatgtatctaaatgtatgaatacgccacagcctaaaaagtaagatttctttccttcttcttttgtgtagtgtgtttctatttgcatttagagaaatgggattctttaaaatgacaactacgtctacaggtgctttgccgctgcaacattagagttatctcaaccggatgatgaagagcgaaaagcaagggctttagctgcagctacttctgagctggaaaggctttttcgaaaagaggatttcaggagaatgcaggttgctatctttttgactaagcgagcaccgaaagattgatagattaaaaaaatttcattctactctatcctggctcggtcgagaaatatatttatctgttttttctgtgtgataggtactcgggcaattcaatcttgggttcatcattgcaaaattggagcgagatctgttcattgtggatcaggtgagtcttcatatatgcatgcttccagagcccttttttcctccttcgatttgtttagttattggttgagttgtggaaaatggaagtttctatcatttcagagttcttccctagtctgatttttgaagaaatggtatagactagtgattgaattttatggccagcatgcagctgatgagaaattcaacttcgaacatttagcaaggtcaactgtcctgaaccagcaacccttactccagtgagtttctttgtgagatcaatctagattcttgatttcattacactgctttcactttttcacatcaaattccccggcggcattcttttatgtcccatgttactttagctatacttgaaccagtagtaatacctcttttccactactctatatgttacccatatttatctatttttttcctaaactcaggcctttgaacttggaactctctccagaagaagaagtaactgtgttaatgcacatggatattatcaggtgaaggatcaccattacttcttttgtaacattttcttattcttgctatcggtttggagattcaataatgtaacaactttccagggaaaatggctttcttctagaggagaatccaagtgctcctcccggaaaacactttagactacgagccattccttatagcaagaatatcacctttggagtcgaaggtagtttttctgtacctctgctgcatcaaatgtcttttgcattacatgttaatatttactttattgttttgggcagatcttaaagacctgatctcaactctaggagataaccatggggaatgttcggttgctagtagctacaaaaccagcaaaacagattcgatttgtccatcacgagtccgtgcaatgctagcatcccgagcatgcagatcatctgtgatgatcggagatccactcagaaaaaacgaaatgcagaaggtaaccaatgcttaccctaagataaacaacaatgtcccttgatagctaacgatggaatccatctctattaaattcaacttgaattgtaaaacacattcttctgcatatgttaacgcttttgtcatttgggttttggtcagatagtagaacacttggcagatctcgaatctccttggaattgcccacacggacgaccaacaatgcgtcatcttgtggacttgacaactttactcacattacctgatgacgacaatgtcaatgatgatgatgatgatgatgcaaccatctcattggcatgaacactcaaaagtcttaacgtatttagatgtgagaatccttaagattaacattgaggaacactcggttataactacaatcgtaaatgtaaattgtcttagtctatatgatctttttggtcacaacaggtaatttcattttcctttgattacttctcgtgaaaaaacaaattaacagttgtggttttccattgatttcaaaaattatctcaaattttggctaaaaaaagaaaaagaaaagagagatgcttcagaatcagaagagaacagtccacttaaaagtcttaaaccctaaaatgaaatccttccatctaaaacgcagtaaacgtcaccgtttgattcttcgtgacccacctaactacgatacactagcttgtagaggataaatgctccgagccctataaacacaaactatgtggagctactaaaggagaagtctttctctctcgatcaagccaagtaaaaaaaaaatcctaatctttgcgtcaccgttcgtgtttcctcttctctctagggttctccttcaacagttttccagtaaacatgaggtaacaaataagaaatcctttttctcttctctctagggatctttacctaaactcttcccttcgataaatcgtgcttctcagattcatttcgtgcttttgttgctttgttcacttcaatttttcatttttactcatgggtttctctgggaatcttggtttcttttttcaatcggttgatttagtgctacgctttcattggattcctgatgactgctgaaaaaaattttagggttttaaattggggttagggtttattgtgttgggtaccggaatttctctgtacattatagccagcaattgtttctgaatatatctgcatcaatctcttcttgtttagacctgaatcttagagcagttggatttagggtttagggtttatg

SEQ ID NO: 21064 - DNA, 3000 bp, Unknown
  misc_feature (1)..( 3000): 2750-1469P.txt file - cDNA_ID_1838830; gDNA_ID_2926183; Annot_ID_140661
tcctggaacacaagctgataatgttgaaagacatgagagagtaagtaggctattgtagttaaaaaaatgtcttagtaggatgctaattgtttgtggctatttcttttgttagtttatctcctaaaattactgttattcaaccactatatcatctacaggaacatgaaaagcctataaggtttgaagaaccaacatcagataacacactcaccaagggggatgtggaaagggtttcagaggacaatccacggtgcagtcagccactgcgatctgtggccacagtgctggattccccagctcagtcaaccggtcctaaaatgttttccacattagaatttagtttccaaaacctcaggacaaggaggttagagaggctgtcgagattgcagtccacaggttatgtatctaaatgtatgaatacgccacagcctaaaaagtaagatttctttccttcttcttttgtgtagtgtgtttctatttgcatttagagaaatgggattctttaaaatgacaactacgtctacaggtgctttgccgctgcaacattagagttatctcaaccggatgatgaagagcgaaaagcaagggctttagctgcagctacttctgagctggaaaggctttttcgaaaagaggatttcaggagaatgcaggttgctatctttttgactaagcgagcaccgaaagattgatagattaaaaaaatttcattctactctatcctggctcggtcgagaaatatatttatctgttttttctgtgtgataggtactcgggcaattcaatcttgggttcatcattgcaaaattggagcgagatctgttcattgtggatcaggtgagtcttcatatatgcatgcttccagagcccttttttcctccttcgatttgtttagttattggttgagttgtggaaaatggaagtttctatcatttcagagttcttccctagtctgatttttgaagaaatggtatagactagtgattgaattttatggccagcatgcagctgatgagaaattcaacttcgaacatttagcaaggtcaactgtcctgaaccagcaacccttactccagtgagtttctttgtgagatcaatctagattcttgatttcattacactgctttcactttttcacatcaaattccccggcggcattcttttatgtcccatgttactttagctatacttgaaccagtagtaatacctcttttccactactctatatgttacccatatttatctatttttttcctaaactcaggcctttgaacttggaactctctccagaagaagaagtaactgtgttaatgcacatggatattatcaggtgaaggatcaccattacttcttttgtaacattttcttattcttgctatcggtttggagattcaataatgtaacaactttccagggaaaatggctttcttctagaggagaatccaagtgctcctcccggaaaacactttagactacgagccattccttatagcaagaatatcacctttggagtcgaaggtagtttttctgtacctctgctgcatcaaatgtcttttgcattacatgttaatatttactttattgttttgggcagatcttaaagacctgatctcaactctaggagataaccatggggaatgttcggttgctagtagctacaaaaccagcaaaacagattcgatttgtccatcacgagtccgtgcaatgctagcatcccgagcatgcagatcatctgtgatgatcggagatccactcagaaaaaacgaaatgcagaaggtaaccaatgcttaccctaagataaacaacaatgtcccttgatagctaacgatggaatccatctctattaaattcaacttgaattgtaaaacacattcttctgcatatgttaacgcttttgtcatttgggttttggtcagatagtagaacacttggcagatctcgaatctccttggaattgcccacacggacgaccaacaatgcgtcatcttgtggacttgacaactttactcacattacctgatgacgacaatgtcaatgatgatgatgatgatgatgcaaccatctcattggcatgaacactcaaaagtcttaacgtatttagatgtgagaatccttaagattaacattgaggaacactcggttataactacaatcgtaaatgtaaattgtcttagtctatatgatctttttggtcacaacaggtaatttcattttcctttgattacttctcgtgaaaaaacaaattaacagttgtggttttccattgatttcaaaaattatctcaaattttggctaaaaaaagaaaaagaaaagagagatgcttcagaatcagaagagaacagtccacttaaaagtcttaaaccctaaaatgaaatccttccatctaaaacgcagtaaacgtcaccgtttgattcttcgtgacccacctaactacgatacactagcttgtagaggataaatgctccgagccctataaacacaaactatgtggagctactaaaggagaagtctttctctctcgatcaagccaagtaaaaaaaaaatcctaatctttgcgtcaccgttcgtgtttcctcttctctctagggttctccttcaacagttttccagtaaacatgaggtaacaaataagaaatcctttttctcttctctctagggatctttacctaaactcttcccttcgataaatcgtgcttctcagattcatttcgtgcttttgttgctttgttcacttcaatttttcatttttactcatgggtttctctgggaatcttggtttcttttttcaatcggttgatttagtgctacgctttcattggattcctgatgactgctgaaaaaaattttagggttttaaattggggttagggtttattgtgttgggtaccggaatttctctgtacattatagccagcaattgtttctgaatatatctgcatcaatctcttcttgtttagacctgaatcttagagcagttggatttagggtttagggtttatg

SEQ ID NO: 21065 - DNA, 3000 bp, Unknown; identical to SEQ ID NO: 21064
  misc_feature (1)..( 3000): 2750-1469P.txt file - cDNA_ID_1838830; gDNA_ID_2926183; Annot_ID_200419

SEQ ID NO: 21066 - DNA, 3000 bp, Unknown; identical to SEQ ID NO: 6252
  misc_feature (1)..( 3000): 2750-1469P.txt file - cDNA_ID_1839026; gDNA_ID_1621086; Annot_ID_55378

SEQ ID NO: 21067 - DNA, 3000 bp, Unknown; identical to SEQ ID NO: 6252
  misc_feature (1)..( 3000): 2750-1469P.txt file - cDNA_ID_1839026; gDNA_ID_1621086; Annot_ID_170525

SEQ ID NO: 21068 - DNA, 3000 bp, Unknown; identical to SEQ ID NO: 6313
  misc_feature (1)..( 3000): 2750-1469P.txt file - cDNA_ID_1839029; gDNA_ID_1621088; Annot_ID_55430

SEQ ID NO: 21069 - DNA, 3003 bp, Unknown
  misc_feature (1)..( 3003): 2750-1469P.txt file - cDNA_ID_1839029; gDNA_ID_2926212; Annot_ID_142053
ttagttactttgtacctgaaggttgatgtagtcatgtaacacaaattttgcatacattaaagtgtaaaactaattcaaagaaattgactaatttcatccacaaatttctttctcgattaggctttttggatattgaaaagataaaaccaaataatcttgaggtgtagaaagattgactcgattttcagatcggtttggttttggtttaggcaaattctttaaccgttcaactggaatccattacatcagatcaccaacagcaacaaaacacaaaatttgaaaagccgtcaagttcttacatgatccatgcctactccgatagaaaaatggaaaagaaaaaaaagatcttccatttgtttagccttagagtacgtacatgcagcaaaagcatagtttctcttctgaaacttcttctctcactcaagcttgaatcttacgacgctgtctcagtcttccaccaatactatttgggtttggttcagcagacatctttcgcttgcttcttgtttctcggttctctttgtttgcagagttagccatcctctcagtttcactgcactgagcctcaagatcgatgatcacaggagttgctggatccacctctttcacatctaatggcttgagatcaccatcagtcactgaagtttggttgttcccagacgacaagaagcataatgactttctagctgaatccggattcttgtttgagccatcatcatcatcgagattttcgtcaatttgattgtcctgaatcccatcagttatgagaaggagatgatctccttctgaagcttgactatctgcaggagcatcagtttcatcatcctcacttgtttctgactgttggttggtttgaatcagataatgtgcaacagacttatacccgagtttatgtatctgagaacaaaagaaattcaaagggaaagccattaacttttgaatctatccaaggactcaaaatcagaattttcaccatggatcatactaatcgaaatagctaccttcctgtaagctgcaccagttgggagccaccctttttttgtacgacagaaactgcagttgcagatatcgcgacagactggacaaatccagtccggattttccagagcttcaagaacatgttctccatatctgttcaatcaccaaaacataacctaaaacattcagttccaatcctcattttgctgagcaaagcaagctactcaattcccagttgattctcacaaaaggaattactcaaaaacacagaaacaaagaaggttggaggctaatgtacctcatgtataaacaatctccacagaattgacctcgaacagaatggttacactggctgcattgggtatgataacctagcgtcttctgcctgtaaaatccacagtaaccattaaacacattagcctcaatcctaaccgaatcaaactacatcttcagagataaagccaagtgtacaaacctgcactggtggcaacactttcctctaacagggtcataaatccgtttcccatttttgtcacaaccatcaacaaaaagctcccaagttcgttctgtgttacctaacagtttctcatgctcctcagtgtaaatctctggccttacgccttctcctacccacaaaacaatctcttctttagacactttacccttcttcagttcaggttcctctgcgtaggaaactggtgtagcgttcttcaatctaaagaccacaacagagaaggcaataaaaatcattactttctattaaaaatcctagcttcctgttaaacccttgattttgaacagaatccaaagaacgaaacgagaaccacagagattgaatacgaagagattacctcgaggatctccgagaaactggcggctcctgcttcaatctgattataaaacagcgaaatgatttctctaaaaaccctagatttctctaaaacccctaattttggaagattgaagcaatgtgaacaaaatcgagagaagtcagtgactgaaaacgaagagattaccttgaggatcgtctagaggagacggaaagctgaataggagatgtttctcgacccggattggcattagagttaccgtaacgccttttggcgggtcggatctcggatttgagtttgagagagagatccatgattccgagattcttcatcctctgaagattctccttgatcctgtcttctctgcatttctcgtagatcgagacgtttgagtttcctcctccgactgttggattagggtttgtgacgggaatcgaacatttcgctctcgttctcaccacaggcattgtgagagattgatgaactgattttggattcaaagttccaatctttccctctttctctctttggatctctggataagaagaagaaatgaaagatttttttttaactttttaagtgagtgaagcggaacagcaacggtctggtttttttactctttttaaaattcaaaacatttttcacctttttaggtaaatgtgcttaatttgccaactaatgaaaacgttgattggtttgtcaaatggaaatcatatttattatctatcatacatctgtaaatttatttttcttaaagggcctttaggctttaataacggcccataaaaaatcccaaattgtactacgaagaagaataagccgccattctttatctttccattccttcctggagattacgcattaatatatttagatcttaggtcttattagcttctttattcgcacttttttttttcctctactcgaagcttaacgatcgtaacaatcatggcgacggcttcaggtaccatgattccttcaatttcttcttctaatactttaacctaattctcgatttctctgttaattcccgttgatgattaagaatctcgcttctgatatcttcttctttctttaaatctatatattagtaaattagggtttttactagttttgctattggctagattcattttggctaaattctggcaaaattgattttatttttaatgtttgaatgttgttctgatatatg

SEQ ID NO: 21070 - DNA, 3000 bp, Unknown; identical to SEQ ID NO: 7420
  misc_feature (1)..( 3000): 2750-1469P.txt file - cDNA_ID_1839033; gDNA_ID_1621144; Annot_ID_56717

SEQ ID NO: 21071 - DNA, 3003 bp, Unknown
  misc_feature (1)..( 3003): 2750-1469P.txt file - cDNA_ID_1839096; gDNA_ID_1621103; Annot_ID_55923
tgaaatctcttttgcaaaggcatagaaccttgttggcctgcctcacctcctcccgaacccgtaattcccattttattccctaaccatcattacaccaaattaaaagtcattaccaccgtcaaaagccgaaaacgttgtttaacaggaagaggcgtgtattaccaatggtggagccaagtgactgtgtagagtcttgaacagattctgtagacttttgcgtcacttcttccgtcgtaccagcgatccaagaagtaacagctcctctcagcttctccgcaatccctccttcgcctttctccgcatatgcttcaccctgtttcgtagctgcttccgagctcggatccttaaaccctcctaaccttttctccacctcctccgattgtgtcactatccctctcttcggtggcgcagtttcgccaccgcctcctccaagatgaagcttctcagtgaccacttccgacaaagccttgtcttcctctcccggactcagtttctccgtaaggaattctttcgccgagacgcccctgtcttgtccttgctctgtcccggtcccggtgaatggtaacttcgtcattacactagctcctgtctctttaaccttctcgtaaactggagtcaccatacttgcgaccgtacttccgtatccaccagcggagctaggattttctgctccttccacacgattctcgtggccgccttccccggagtaacctaacttcgaagcgacggcgtttttcgccgccacagctttgtctgctacgaccgaagtcgctaatgagatcttatcggtgtagctgctctgattaggctggtgcatctcctctcctctcctctgacctctggaatcaaaaccctgagggttttgtataccttgagttctcgtcggcaaatcttttcccagatcaaattcatcactccgctccggagattctttccccaatctagatccatagtctcccgccggtatgtgcttgcccatttcaggtcttgacttagtatcaaaaccatgacttttctcccggagatctcttcccagtcccatgtgatcatcttcacctgtttcgttcctcctcccaaaagctgcgacactcggttgttctccagctcctagaataaagaaaggacacaagtcaaaagatataaattcctgaatcagaattccgagaagaaaaaaaacttacctttaccggtgggatcagtaactttggactgataactcgacattccaccatgagatccctgagcagtcggttttgtatcaaggccatggcttttcttctgcagatcagttcccaaccctaaccttccaatagctgagacagtcgatgctgctccaatttctccagtagctagataaagaaacagacaggtgaaaagagttgaaacttcttagcaaaaaacgtagagctgaaactttaaatcaggattaagagactagagaaaagatcttacattttccgatggggtcagtaactttggactgataatttgacaacccaccatgagatcccggagcagctggatcttggtccaatcctttgggtctgtcgatattaactttactttggtttcgagacttgtgttcatcaggaacaaatgttcttgtcacatcttctgttgcagatagtaaagacacgggagtgttatgcggcgtcagtgtaggagcccctcttctctcttctttctccggtacaccggagtgttttataggacgagacattgcttcgtggccaactcctctcactggctcagagggttttgtatgtgaagaggaaacaactggaaaagctttcgatcctggagggactatctcctccttcaccggaatatgagcttttcctcgtgctgctgggaccaatccaaaacattaaatactctgttttggtcaatagagagatcaaagtgaagcgaaggactgacaaacctggtgcaccgccgtggagttggttgtcgttgtagtcatcttcatcgtcttcttggtctagatcgtgatcgtcagggatgtgttctccacgatcgtgctcatgaccatgtccatgtttagtaagaacattcttgatcttctttgctttttccttcactttcttcagaacttttgatggtcctttttcatgatgcccttcttcctctgcattcaaaacagaggaacacgtaaaaaacattcattaggctctctcacttccagattttagaatatcaatagaaaaaaaactttacattgagattagaatctggtttcgcaatacctggatggtgaatccttattggctcctgtgcttggtgatgaccatgagtacgttgcaactgcgcttgtgaatccattttatttgctagatttgattttgttcttttcctttctatgcatccaaattgtttctgagaaaatatgaggagcttcttcaaagttttatacagagtcagagagtatgggaaagaggaggaagacgcatagccgaactacctctggatggctgtgtcctctgtactttatcttacgaaataccacgtgtcatgccacgtatcaggctcttgattgtgtgcgtggcgctctcagcctaatctttatccgagaagaaccgtcgatgttaccttctttcacaagttagcccactagcccattccaacaacatgccgtttcgatcattggaaaaacagcataacacagtcactgaaatccgaaaacgacaagaaatgatatcatatgaatagtttccattgcgcaatgggttggtccaacagaaatgtacataatgggccttaaaaaagatccagtatgctctatcgcggtttaatggtttggttggtggtagaagaaacagacacgaagcgcggaagcggaactagtagatgcagctactacaatatccacgtggcgaaacattagtcgtttatcgagaactgccccacgaaattacacgtctgaatagataaatcgaaaatggatcgtgaggcccacgtgtctgcgaagaagggcccacagtggattattgaaaagaagaaatg

SEQ ID NO: 21072 - DNA, 3003 bp, Unknown
  misc_feature (1)..( 3003): 2750-1469P.txt file - cDNA_ID_1839096; gDNA_ID_1621103; Annot_ID_171488
agccgaaaacgttgtttaacaggaagaggcgtgtattaccaatggtggagccaagtgactgtgtagagtcttgaacagattctgtagacttttgcgtcacttcttccgtcgtaccagcgatccaagaagtaacagctcctctcagcttctccgcaatccctccttcgcctttctccgcatatgcttcaccctgtttcgtagctgcttccgagctcggatccttaaaccctcctaaccttttctccacctcctccgattgtgtcactatccctctcttcggtggcgcagtttcgccaccgcctcctccaagatgaagcttctcagtgaccacttccgacaaagccttgtcttcctctcccggactcagtttctccgtaaggaattctttcgccgagacgcccctgtcttgtccttgctctgtcccggtcccggtgaatggtaacttcgtcattacactagctcctgtctctttaaccttctcgtaaactggagtcaccatacttgcgaccgtacttccgtatccaccagcggagctaggattttctgctccttccacacgattctcgtggccgccttccccggagtaacctaacttcgaagcgacggcgtttttcgccgccacagctttgtctgctacgaccgaagtcgctaatgagatcttatcggtgtagctgctctgattaggctggtgcatctcctctcctctcctctgacctctggaatcaaaaccctgagggttttgtataccttgagttctcgtcggcaaatcttttcccagatcaaattcatcactccgctccggagattctttccccaatctagatccatagtctcccgccggtatgtgcttgcccatttcaggtcttgacttagtatcaaaaccatgacttttctcccggagatctcttcccagtcccatgtgatcatcttcacctgtttcgttcctcctcccaaaagctgcgacactcggttgttctccagctcctagaataaagaaaggacacaagtcaaaagatataaattcctgaatcagaattccgagaagaaaaaaaacttacctttaccggtgggatcagtaactttggactgataactcgacattccaccatgagatccctgagcagtcggttttgtatcaaggccatggcttttcttctgcagatcagttcccaaccctaaccttccaatagctgagacagtcgatgctgctccaatttctccagtagctagataaagaaacagacaggtgaaaagagttgaaacttcttagcaaaaaacgtagagctgaaactttaaatcaggattaagagactagagaaaagatcttacattttccgatggggtcagtaactttggactgataatttgacaacccaccatgagatcccggagcagctggatcttggtccaatcctttgggtctgtcgatattaactttactttggtttcgagacttgtgttcatcaggaacaaatgttcttgtcacatcttctgttgcagatagtaaagacacgggagtgttatgcggcgtcagtgtaggagcccctcttctctcttctttctccggtacaccggagtgttttataggacgagacattgcttcgtggccaactcctctcactggctcagagggttttgtatgtgaagaggaaacaactggaaaagctttcgatcctggagggactatctcctccttcaccggaatatgagcttttcctcgtgctgctgggaccaatccaaaacattaaatactctgttttggtcaatagagagatcaaagtgaagcgaaggactgacaaacctggtgcaccgccgtggagttggttgtcgttgtagtcatcttcatcgtcttcttggtctagatcgtgatcgtcagggatgtgttctccacgatcgtgctcatgaccatgtccatgtttagtaagaacattcttgatcttctttgctttttccttcactttcttcagaacttttgatggtcctttttcatgatgcccttcttcctctgcattcaaaacagaggaacacgtaaaaaacattcattaggctctctcacttccagattttagaatatcaatagaaaaaaaactttacattgagattagaatctggtttcgcaatacctggatggtgaatccttattggctcctgtgcttggtgatgaccatgagtacgttgcaactgcgcttgtgaatccattttatttgctagatttgattttgttcttttcctttctatgcatccaaattgtttctgagaaaatatgaggagcttcttcaaagttttatacagagtcagagagtatgggaaagaggaggaagacgcatagccgaactacctctggatggctgtgtcctctgtactttatcttacgaaataccacgtgtcatgccacgtatcaggctcttgattgtgtgcgtggcgctctcagcctaatctttatccgagaagaaccgtcgatgttaccttctttcacaagttagcccactagcccattccaacaacatgccgtttcgatcattggaaaaacagcataacacagtcactgaaatccgaaaacgacaagaaatgatatcatatgaatagtttccattgcgcaatgggttggtccaacagaaatgtacataatgggccttaaaaaagatccagtatgctctatcgcggtttaatggtttggttggtggtagaagaaacagacacgaagcgcggaagcggaactagtagatgcagctactacaatatccacgtggcgaaacattagtcgtttatcgagaactgccccacgaaattacacgtctgaatagataaatcgaaaatggatcgtgaggcccacgtgtctgcgaagaagggcccacagtggattattgaaaagaagaaatggaaaatctgaggattgattcgtctcagaggccgaggttgaagattaatcggacaaaggagattagaagagtagaaaaaacgacaagaagaaagaaacacagttgcaggagagaaagagatatg

SEQ ID NO: 21073 - DNA, 3000 bp, Unknown
  misc_feature (1)..( 3000): 2750-1469P.txt file - cDNA_ID_1839096; gDNA_ID_2926187; Annot_ID_200735
cgaaaacgttgtttaacaggaagaggcgtgtattaccaatggtggagccaagtgactgtgtagagtcttgaacagattctgtagacttttgcgtcacttcttccgtcgtaccagcgatccaagaagtaacagctcctctcagcttctccgcaatccctccttcgcctttctccgcatatgcttcaccctgtttcgtagctgcttccgagctcggatccttaaaccctcctaaccttttctccacctcctccgattgtgtcactatccctctcttcggtggcgcagtttcgccaccgcctcctccaagatgaagcttctcagtgaccacttccgacaaagccttgtcttcctctcccggactcagtttctccgtaaggaattctttcgccgagacgcccctgtcttgtccttgctctgtcccggtcccggtgaatggtaacttcgtcattacactagctcctgtctctttaaccttctcgtaaactggagtcaccatacttgcgaccgtacttccgtatccaccagcggagctaggattttctgctccttccacacgattctcgtggccgccttccccggagtaacctaacttcgaagcgacggcgtttttcgccgccacagctttgtctgctacgaccgaagtcgctaatgagatcttatcggtgtagctgctctgattaggctggtgcatctcctctcctctcctctgacctctggaatcaaaaccctgagggttttgtataccttgagttctcgtcggcaaatcttttcccagatcaaattcatcactccgctccggagattctttccccaatctagatccatagtctcccgccggtatgtgcttgcccatttcaggtcttgacttagtatcaaaaccatgacttttctcccggagatctcttcccagtcccatgtgatcatcttcacctgtttcgttcctcctcccaaaagctgcgacactcggttgttctccagctcctagaataaagaaaggacacaagtcaaaagatataaattcctgaatcagaattccgagaagaaaaaaaacttacctttaccggtgggatcagtaactttggactgataactcgacattccaccatgagatccctgagcagtcggttttgtatcaaggccatggcttttcttctgcagatcagttcccaaccctaaccttccaatagctgagacagtcgatgctgctccaatttctccagtagctagataaagaaacagacaggtgaaaagagttgaaacttcttagcaaaaaacgtagagctgaaactttaaatcaggattaagagactagagaaaagatcttacattttccgatggggtcagtaactttggactgataatttgacaacccaccatgagatcccggagcagctggatcttggtccaatcctttgggtctgtcgatattaactttactttggtttcgagacttgtgttcatcaggaacaaatgttcttgtcacatcttctgttgcagatagtaaagacacgggagtgttatgcggcgtcagtgtaggagcccctcttctctcttctttctccggtacaccggagtgttttataggacgagacattgcttcgtggccaactcctctcactggctcagagggttttgtatgtgaagaggaaacaactggaaaagctttcgatcctggagggactatctcctccttcaccggaatatgagcttttcctcgtgctgctgggaccaatccaaaacattaaatactctgttttggtcaatagagagatcaaagtgaagcgaaggactgacaaacctggtgcaccgccgtggagttggttgtcgttgtagtcatcttcatcgtcttcttggtctagatcgtgatcgtcagggatgtgttctccacgatcgtgctcatgaccatgtccatgtttagtaagaacattcttgatcttctttgctttttccttcactttcttcagaacttttgatggtcctttttcatgatgcccttcttcctctgcattcaaaacagaggaacacgtaaaaaacattcattaggctctctcacttccagattttagaatatcaatagaaaaaaaactttacattgagattagaatctggtttcgcaatacctggatggtgaatccttattggctcctgtgcttggtgatgaccatgagtacgttgcaactgcgcttgtgaatccattttatttgctagatttgattttgttcttttcctttctatgcatccaaattgtttctgagaaaatatgaggagcttcttcaaagttttatacagagtcagagagtatgggaaagaggaggaagacgcatagccgaactacctctggatggctgtgtcctctgtactttatcttacgaaataccacgtgtcatgccacgtatcaggctcttgattgtgtgcgtggcgctctcagcctaatctttatccgagaagaaccgtcgatgttaccttctttcacaagttagcccactagcccattccaacaacatgccgtttcgatcattggaaaaacagcataacacagtcactgaaatccgaaaacgacaagaaatgatatcatatgaatagtttccattgcgcaatgggttggtccaacagaaatgtacataatgggccttaaaaaagatccagtatgctctatcgcggtttaatggtttggttggtggtagaagaaacagacacgaagcgcggaagcggaactagtagatgcagctactacaatatccacgtggcgaaacattagtcgtttatcgagaactgccccacgaaattacacgtctgaatagataaatcgaaaatggatcgtgaggcccacgtgtctgcgaagaagggcccacagtggattattgaaaagaagaaatggaaaatctgaggattgattcgtctcagaggccgaggttgaagattaatcggacaaaggagattagaagagtagaaaaaacgacaagaagaaagaaacacagttgcaggagagaaagagatatg

SEQ ID NO: 21074 - DNA, 3000 bp, Unknown; identical to SEQ ID NO: 6213
  misc_feature (1)..( 3000): 2750-1469P.txt file - cDNA_ID_1839100; gDNA_ID_1620864; Annot_ID_51311

SEQ ID NO: 21075 - DNA, 3000 bp, Unknown; identical to SEQ ID NO: 6213
  misc_feature (1)..( 3000): 2750-1469P.txt file - cDNA_ID_1839100; gDNA_ID_1620864; Annot_ID_170424

SEQ ID NO: 21076 - DNA, 3003 bp, Unknown
  misc_feature (1)..( 3003): 2750-1469P.txt file - cDNA_ID_1839107; gDNA_ID_1621109; Annot_ID_56068
gtgtttggtatcttgttctgcatctaaagaaactctctttacagcaatctgtgcattagaagagagctttcctttgtagactgtcccgttagcctctgtaccgaataactcgctctctttgaaccctttggttgctttgtagagagctttgtaagaaaacctctgaggactgtaatcttcctcccattcttctcgtacttcttcatacttgctgttcacatacattgatcttaatgctgctcccattcttagaaatatacctgcaaacatgtcagattttttgcagattctcaaggcagcttttagtcctctattgtcatcgttgtttctgtttggtgatttgtgtgttgtgggaaattagtagcagaccactttcttttcaggagaaggtcaactgttgtaccaggaccgtccattcttgttatttaatggtatttcatctctgataatggtattttattatactagtggcatttaaagtctccaatgaagattttcattatgagttatatgtaatttatattgcaacattgaacaggttcatctctttgatcacctggatgaattaaatactcaaatttttatgaagatgcaatattttcttcttattacagaagtcaactacaagaaggaaggaaacaaaaaccaaaaaatgagtaaaagaacaaaagaagatgtattagaatttcttatgtatgtatacaacagacttcagacaaaatgaatcttggttttggtatgataacataactaatagggggaaaaagaggattgaaatagaaagcctctttcttacatagaggctttgtaaacaatgaaaaacactctctgttctttagtttggttgaagtatctttccatgattttctgcttcaacaactgcagcagaatcaaatgcatcagaatacaattgcaggtgtgtcaaattgttaatagttgaggaataaaagaggaactcactttcatttgtgttggctacaagaggagctttgttgtctgctgaatttgaagcaggtgccatgtttgtggctgcaccaaaactagaagtctgagaagaacctttacgaggactgatagctttagatatcactcgagaaagttctctatcgtcttcgctaggctcaaacttctgcgatatgtattccttcattgatacgcctttgtcccatacctggttacaaacacaagatgattgactgatgtatttacctaaatgcacaaacagatagagaactttgtcgtaccttggtattgaagccagtgggctggttagttccggcagtgttgatttctgcaacatcatttacctcttcttctcgctctgttggttctggaaaagccatatcttgaatcttcttagttatagcttgagttgcgtcagagactttagcataaccaggtgctagcttctctgtcacagtttctgttactgtcttgcttggactaataggttcctgctggctcgtgcactctttccttgtcttctcagacgattctgttactattgttgttgtgtcagaatcagcaggcttctcttgcttgacatcagataaaacattcttctcagagatcacaggatgttctgttttggaaccattacaatctttttgttcttgttcagcgtcctgtttggctgggagaacagacaagacatttgtctcagtgatcacaggattctctcggggatgctgccttgctgtctcctttaactcttcaggtgccttctttgattcatacactgaaaataacacaagaagatcgatcagttttaagcaaattcctaaaagggtggttgttacttatgaagctttgttcaatttcatttacttggggctccaagatattcaggatcttcttcttcttcttctcctccttcttctctgactttacggtcttttgacttgtcacgtggtgacaatgacgcataaccaacttctctaacttcatgatcttcggatctgcaaaacggtgacatggttgcatcaccttcttcatcatgtctcttcttggtgctgagactgtgctgcagttttttcgccttatccttcattttagagaacaaagatttcttatggtgagaatgttctccatcattttcttttcttggtgaaccagaaggtgaccgctttgaagcttcaccagctgaaaaaaagtatgacaaacagatttcaaaccaagagtttgcgtccaaaatcatcaaatcactgagagtaaacaaaatggatattatcatttcttggagagacttacattggtgacgctggctaagtgttgagaagctaggatttccagaatgatcaacatgtgtttttaagctttcgagctcagcgacggggtctagttgacgcgacatttcagaaacacaaagttcttgtagatgttctgtttaggaactctgatcctctgagaacaacataagatagatataagacaagaaaaactgtgcatgtcgtcttgtttctccgaggttcttggacaaaccataagaaaaaaaaatgcttaaaatagtcatggtctcttattggagaagcatgaagggaagacaaagtcttggcctgagaaattgacgtttgaagctgaattataggactcacatttgtagagttttctagagaaaaactggaaccataaataacaaatacactgtttaaagaacttaagcaaaacttgtctctgaactttaatgaccaaaatattaagactatgtgagaaaaatgtaagaacacatttgtctggataaaatgcataagttacagaattatcacagactaaacatttttcaagaacctagtcagaagtttactcatttgtctcactgaaactgcgtgctgtttctaactaaagtaaacgtcacgcagttctatgttaaataaacaaaacgtaatgtagtctaaaaggaaagtctctctacctgcttaaaacccaaaagtacattttttcgccgaagccaaaaatcttcacttgcttcttcttctctctgaaaccttatcttctccgcccatg

SEQ ID NO: 21077 - DNA, 3000 bp, Unknown; identical to SEQ ID NO: 7041
  misc_feature (1)..( 3000): 2750-1469P.txt file - cDNA_ID_1839118; gDNA_ID_1621124; Annot_ID_56340

SEQ ID NO: 21078 - DNA, 3000 bp, Unknown; identical to SEQ ID NO: 7393
  misc_feature (1)..( 3000): 2750-1469P.txt file - cDNA_ID_1839138; gDNA_ID_1621143; Annot_ID_56685

SEQ ID NO: 21079 - DNA, 3000 bp, Unknown; identical to SEQ ID NO: 7393
  misc_feature (1)..( 3000): 2750-1469P.txt file - cDNA_ID_1839138; gDNA_ID_1621143; Annot_ID_172920

SEQ ID NO: 21080 - DNA, 136 bp, Unknown; identical to SEQ ID NO: 441
  misc_feature (1)..( 136): 2750-1469P.txt file - cDNA_ID_1839149; gDNA_ID_1591003; Annot_ID_150398
  misc_feature (132)..(132): n is a, c, g, or t

SEQ ID NO: 21081 - DNA, 3003 bp, Unknown
  misc_feature (1)..( 3003): 2750-1469P.txt file - cDNA_ID_1839186; gDNA_ID_1620631; Annot_ID_47261
tttattatccatatatatatatatatttgttttattttaaaatcataatattatttttagatagtttattttcttttttaatttatccaatcatatactttatgcatattaaccggatttttaataaacttgccaccttctttcttctttaaataaatttcattttctcttgctctccaatcccatacgtctccatgatcttccataccgaaaagcttgaatgctgtaaaattctgataatgtctgtaattaggcccttgtttcaaagtacacataaaacgcgttgtacgccaaatgttaacactaaaataagttacaaaatgccctccgattggtattatttttggacctaatacatcatctttggaataacacctcatccagaggagtttttggaatttaagttcgttcccgatcctaattccggctcccgatacatgatcaaacatgcaaagactaaaaacaaatataaaaactaaaagatttttcatttattttttacttttttgtaatgtttggatttttgggtttgttaacttggtttttgtgtttctcgtactttatatacacacacatttgtattggtattggtacacaatttgtttcagtattagtttccaagtttcaacatagaatgacataatcaatcatgtatatcgtgattgatatccttaatatatatggcataagattttatatagttacatgtgaagatatctataataatcatacttggtaatgaagatatccttaatattagtatattataaaaatctatagaaattgaattttgaaagaaaagatgaaatcaagaacccaattttggataatactggaaagattatacggggagatcaaatgataatcaattaaccaattgtgcataatcaattgataatactggaagttcaaacgtattcaattatacatcacctattacaattttacaacataatcaaatgataatatctttttttatctggaaacaaaaaatctttccaaaatttatttatcaaatttcattcctttttaatcagttaattataccgatttttttttttaaacgtgaatatattaattagtattaacatagttttacataataaaagcaaaagtgggaagggaaaatccgttttataccataaaaacaaaagtgcgtaggaaaaatccacaaaggtaataattttttcttcaaaatatccttattaaataaataaaaacaatttaatcgaaaatctattattgtgttttacgaattaatgaaagataacaaaaaaaaaaaaaactatttccgaagattatgaatcataatgataaatcgtctgatgattatgatttattatgatcaaaaatctatttttggacctaatacataatcttttcacattgttgttcactttaagaattgtaaatataaaacacatcaatatgttactgtaatattttggctgttataattgcttaaaatatagttattaagtacaagtgtacaactaaaatcatagtaataatttatatttctattactataaatgtaaaaatattacaaacacactaatatagtattataaatacatacacatctgtatatatatttttctgaatgcaaatttattaataaaataaagtacatatgtacaaatgttaagtggaaataggcaaagctagagaaacagagcaaccaacgaaacatcattagagaagccgtccctatgagaattaacgctattggatatacatcatagtttctcaattctcataacattatttttctacaatttacattatttactgttagaagtttgtgtgtatacgtatgtgtgtgagttttttttaaattataaattcgttggttccaccgcgttggttttgttagatcccttcagattgattaggttaatttagccctattaggtttagtttggtgttctttttgactttaggtttttgataggtagcttggaagggtttagttagagattttgactacgaattctttagcaagagatgaaaagtctcaactaccaataactaatcttttcatttaacatattctcatagaccccatgtgcatgtatatacgtaataagctaagatatttttaaccgttacagaatttgactaacgatactgaacgattagggtaagtatttttttgacatgtataaattaatacttattaacggcatcattatatgttattatgttaagttccgaaatagaggcaaggttcaattaggtgggtgggagtgactcagtaaaccattgtggctctagttgtatataactttttcttcactatataatttcactaaaattttgttgatttatgacatggctatacaattttgttgatttatctaagagttgtatagccatgtgatatatatacatttataaacaaggttacattatttagttttgaaatttatttatgtgatatacactaacaaacattttctttatttgatgacattctcacataatttaatagatgaggataacaaaatcttcaacgcaattgctcaaatgggggaagtctcatcctacaatgctggtttcaaagtcaaagaagttagcggttgcatttccaattttttttgttgctcaatcaattgaaactttacccatagcatttccttgtaaggcattgttgtatttaagtttttctttttataaaagtatataagtttaaaaaaaaaaatcaaatcccttagaaatacaaaaattattgataaagttttttttttcgtttctaaatgattcaaaactattccagtcttcttataagttagaagtattatattacttagactcaaattccgcaatgatcgaataacattctctaaaatatataaaccgtatcctataaaaaacaaacaaaattaatgctattacaattcgaactatttatgttgttcccttatataaagaaactcttcctttcataccaaaaaaaaaaaaaaaatccattttcatttctcctcttaaaaaaccgccatg

SEQ ID NO: 21082 - DNA, 3003 bp, Unknown; identical to SEQ ID NO: 21081
  misc_feature (1)..( 3003): 2750-1469P.txt file - cDNA_ID_1839186; gDNA_ID_2926182; Annot_ID_140617

SEQ ID NO: 21083 - DNA, 3003 bp, Unknown; identical to SEQ ID NO: 19038
  misc_feature (1)..( 3003): 2750-1469P.txt file - cDNA_ID_1839193; gDNA_ID_1620645; Annot_ID_47569

SEQ ID NO: 21084 - DNA, 3003 bp, Unknown
  misc_feature (1)..( 3003): 2750-1469P.txt file - cDNA_ID_1839211; gDNA_ID_1620650; Annot_ID_47714
gactcttaaccgaaggaaacgaaaggtcgcgcatggggaaaacgcgatgtccagctttcttttgcatttttcgaggctccaatatctaggcgttgcatggccgttgtggcataggtgatcattacaacgctattcccataggcgtaatgagcttgtctcgggaattgcttatgcgtcttctataagtactgtcctcctttgatcgtttcacccttcaatcgctttagcagaggtacgagttctttctctcttttgtcttgttttgattcgttatttctttggtttcgatgtcgttgggttcgaattcttctcggctcgtccccggtcggactcatactggcgccctgggcgattcgtcgactcgatcggccaagtgtgaagacgacggctcgtcgttcgtctagaggtcgatctcgtcagaatttaggtacgcacttcatcaaatgagacttcacttctattacgatgctgtggcttatccgccgttgtcttttcctttgcttatagcgactcgttggaagatgggaaggataaacctagacgcgatccccaactactcgaggaaatacaaggagaagagagccgtttcggagactccgcagccgtctctttccgagggacaacagattgcagaagctacaaggagaagcctcttggatcaggtcggtcgtcgtgtgtttgagccgggatgttcgaatcctactggaatggcttctgagaagacgcgagaagaggttgaggttgtcgtcccttccgagatgcgaggcgatggtcaggttgcaaggagggagctcgtacttggtcttcagaattcgtctggcacgtttggtgcaaggagggttgctcctgaagtgggtcgtgcggatgcttctaaacgaccgcgggtaagcgaccatagatggggctttcgttacgacgatatggctgctccctttacttctaattctgtcgcttgtgctgagcttcttcgtgaaattggtcgtggctcgggtattccttcgatgcccttagacttgaaggaggagaaagttttcgccggagcggccaggaagtcgatcgaggtatgctcaccttctgggtttgattccaattttttctttgaattgcattcgcttgacacgctctttgtccaggcgatcgccgaatgggatcgtttgacttatttgtacgagcgttgtgttcggagcctttccgtagacgctactaacgcgaaagatgcccatgaggctttggccgttgaaaaggaaaaagtagctcaggcgctggccgacctggcaaggtctcaagacgacgccaaggagatgaagaggaaatatgacgagttagctggtcgcgctctttcggagatgaagaggcttcgagaacgtcgacttgaatatgctgaatttgtccggagatcggcccttgataagatggcggagctcgttcagaagcgattggatcgtattaaagctcatattgacgatacgaaggcggcagaaccaaagtttcttgaattcaaccaagtatctgggaatatcaagactctcgaggcgttggtcgaaggtggcgaagtggagatgaagtcggatgacatgatgttaagattggtagcggatgcagaggaattggaggccgaggtgaaagcttttggtatcaccgatcttatggacggcgacttcgatgttcgtactttatttgccgagctgagtcctgataatcgtaattccgttccaccgccgactgaaggggaagatctcgcggatggacgaggtgagtgcgaaggccaagctggtgaaagaatcgttggtcaaactgaagttcgagacgagatcgcggatgctagagactgatattccaggaggctaagccaaagggaagaagcggagctcagatgcctaaagagatcccaatatggcaaaacaaaaaatattctaaaaactgaataatcaacgaattttatattatgtgaccaaaaaatgaaaacagaaactatgtaacaatcatcaaatacagtgttttcagcatttatttttttctaaattttccagcaacatacaaacataacgttactactagacataaaaatactccctctgttccaagttatttgatggtttggatttttttatttgttccataagattgatgttttgtaaaaattaaatatgattattaatcttgtttgttgccaatagtgaaaggagagaggtaatagtaatattattaaactattaaaatagtaattaaaattaaatagaaaagttactttttcttaatttatgtgcgaaacttaaaacatcaaacttacagagagagtaatatataacatgatatgagatgaaactgtacggtgtcgttgcataattacataaactagttataaactcacacactgccttcatttcaggtcgagacagaacttattgtgtgatttaaatcagacaaaccttcgaactttgactttttcatcgcctcctgtcccttcgccgcaaaatactagtctaaacgctcaactcctctctcctgtcttataaacttttttttttagaaaatgagatgatcaatcgaattttgttgtgtgtgacctcaaactgacaacttccagtaattgtaatattaccaattttttttatcaaaaagatgaacttcactttagagcaatagcaatccctcgagtctcccctatataaagattccaactccttaacgattcatctaatgaaaaaacacacacaccaaaaatatcagatatctcaaacaatgtcttcagtttttggatctgtccatatcttggccatgatagccatacaactcctccttacacacagtgtttcatctctgaaccttaccaatgcgtatctgcaccacaaatgcagcaacactcaaggaaaatataagcaggggagcgcgttcgagaaaaatctcaactaagtcctcagtaccatcacctcgattggaaattttcgtgacggtttccgctacaccgaagaaggtgaggatcccaataacgtctttgtcatg

SEQ ID NO: 21085 - DNA, 3003 bp, Unknown; identical to SEQ ID NO: 21084
  misc_feature (1)..( 3003): 2750-1469P.txt file - cDNA_ID_1839211; gDNA_ID_2926176; Annot_ID_140347

SEQ ID NO: 21086 - DNA, 3003 bp, Unknown
  misc_feature (1)..( 3003): 2750-1469P.txt file - cDNA_ID_1839219; gDNA_ID_1620643; Annot_ID_47541
ctaaaacaaaccttattcctagatgatgaagaaacgctatgtcctgcacatatatcaaatcacttcaccttctactcaaatacgagaactgaaaactcaagcacattgcaaagaaaagatcatataacaaagcaaaataagaatagtaacaactttagttgaggcaagcaaacaatcgaacaccttgcgtgcttttttctcataaatcaaagtatataatacggtgaagaaagacggtaccttcaaaatggcatcacaagaagagccggcgatgatctcgccggagataataacgacgaatgtgcagccacggtgagcccaaagataaggccatgcttcacggaaccaacgcacaaactgtttgtcgtcaactggatgctcagcctccacatcgccggctgcagtcaccgcgtagtcaaacatattgcatttcgccgccgttatagaactaaccggcttaaaccatgaacagttaaaccggaattgagtagggtttagcttattttttggtttgaatgacgaaaaattcgactttgattggcgaaagtggtaaggaacatagtagctagaagtagaagaagaacccactaaagctcctcgctccatcttccttagacttcgatgagagaaagaattcaaataaatactaaattgttattgtaactaaaccggcaggtgacggctgattacggtcggagaaggcggcagtagtaccgtagtgggacccacggtaagtaggtattttatttattgtttatttttccatattttcttcaatagtctttttctattattatttattgtttatttttccatattttcttcaatagtctttttctattattatttattgtttatttttccatattttcttctttagtctttctctattactatttgacggaactctttgaatgtctggtcgttacaagcttaagttgtgtccccacatggaagttattcggttgggtccatcgaaggaaaattgattgaaccggtctggtcattctctcccaaactatagaaccaatttcggtctgcatcggagtttcgaagtcgcggacttatcagagtgggctttttaaggaatgtttttagaatatttaccagcccaatcccattttaagtatgtccagatcttaatttggcgagcctttttatatatggtgaacaactgattctaatgtgtatgtttcacttttattagagaaaaaatgtgaaaagatttaatgtgtatgtttcacttttattagagaaaaaatgtgaaaagattcttaaaagtatttatttatgctaattggcaaaactaaaacatcaatttatgtacatcattttagttcttcctctaagatttgattgatttgtattaatggctctgaatactgatactagtttcgttggcaagtaagataagtgataactttgataaagagtgtcaaattacaagtgccacaatttggagtacgtaaccaaattgacataaaacttgaataggtgaaaaaacgagccagaaaaaaaacgaatatcttctgcttatccgaataaaacgaaagtaatattcttacaagatccttccttatgaagtagtgccagtagatatttttatcattgtgattgcgacctgtttgttgcgattcatttatgccaattcacgttactatttatgttgtgataaaatcttttatttttcttcttctttccaaatacttaagtatgcatgattattgatccgtacaagcataaacgaagagctataaagtctccaacggtaaacgtacgtgaaccaaaataacaattcaatattatggttcgaattattctgtgtattttatgtaagaaaataaccaaaaccgactcgaaacaaaacaaaaaaatcttctgaaatgtgaatctttatttcggaaaattcttaacgatagatagtttttgctttaaaattaaatccaaacataaactagaactgaaattcaattcgttgtcaatattttctatacaaaaaaaaaaaagaaatccgaccaaataaacaaaaccataaatagacatctccatttttagttgaaagatgattaaatgcaataaatgtgccacaatcataaatttttccttttcacctaattgaaaattttaatcattaataagaagaatccatggagcacaattattttattttttattttttgctctcatatggtatgttaaattaattttcccttaatttaaattccccatatcaaataagtttttttttttttgagaaagacttgatttcataggagaaatatttgttaatattttcgacaaaacattttctctgtttgatgtatttccatcctcgtacaataaatactctagctattaaattcttagcccaaacgaaaataaagaaaaataaaagggtcctactaataaacaaaacaaaactagtggtcccaatttgaaatatataaaaatatataaaattcataaagctttgtggcttcagagcttccacttccatcgtcgtcttctattttttcttctttcttcgatttcataccaaaacaagaactctctgttttcgacaaaaacgaaaccttgagatctattttgattgacttttaagaaagagagagatctttcttagaagattttgtctcgtcggcattgaagatccaggtaacaaaatctcaccttttctctcctaatttcacgaaatcgaagaaaaattctcataattctcttaattacttatctctcaatttcttaaatcttacagggtttgtctttcgaaattcaggtaattttctcaaatccatttatggattgaagctttaggtaatgaatgagctgaatctgcatataaaaatcgatactttcattatccagaacaaaacaagatttagcataaacgttcaaaattgaaactttgattcctaacttcttggaatgattcagattgagctagatttagatctgtatgattgatattatgggtttggtttgtttatgagtagagagaaaatg

SEQ ID NO: 21087 - DNA, 20 bp, Unknown
  misc_feature (1)..( 20): 2750-1469P.txt file - cDNA_ID_1839219; gDNA_ID_1620720; Annot_ID_165755
aagcttcatctgaaacaatg

SEQ ID NO: 21088 - DNA, 3003 bp, Unknown
  misc_feature (1)..( 3003): 2750-1469P.txt file - cDNA_ID_1839219; gDNA_ID_1620643; Annot_ID_163117
aatcacttcaccttctactcaaatacgagaactgaaaactcaagcacattgcaaagaaaagatcatataacaaagcaaaataagaatagtaacaactttagttgaggcaagcaaacaatcgaacaccttgcgtgcttttttctcataaatcaaagtatataatacggtgaagaaagacggtaccttcaaaatggcatcacaagaagagccggcgatgatctcgccggagataataacgacgaatgtgcagccacggtgagcccaaagataaggccatgcttcacggaaccaacgcacaaactgtttgtcgtcaactggatgctcagcctccacatcgccggctgcagtcaccgcgtagtcaaacatattgcatttcgccgccgttatagaactaaccggcttaaaccatgaacagttaaaccggaattgagtagggtttagcttattttttggtttgaatgacgaaaaattcgactttgattggcgaaagtggtaaggaacatagtagctagaagtagaagaagaacccactaaagctcctcgctccatcttccttagacttcgatgagagaaagaattcaaataaatactaaattgttattgtaactaaaccggcaggtgacggctgattacggtcggagaaggcggcagtagtaccgtagtgggacccacggtaagtaggtattttatttattgtttatttttccatattttcttcaatagtctttttctattattatttattgtttatttttccatattttcttcaatagtctttttctattattatttattgtttatttttccatattttcttctttagtctttctctattactatttgacggaactctttgaatgtctggtcgttacaagcttaagttgtgtccccacatggaagttattcggttgggtccatcgaaggaaaattgattgaaccggtctggtcattctctcccaaactatagaaccaatttcggtctgcatcggagtttcgaagtcgcggacttatcagagtgggctttttaaggaatgtttttagaatatttaccagcccaatcccattttaagtatgtccagatcttaatttggcgagcctttttatatatggtgaacaactgattctaatgtgtatgtttcacttttattagagaaaaaatgtgaaaagatttaatgtgtatgtttcacttttattagagaaaaaatgtgaaaagattcttaaaagtatttatttatgctaattggcaaaactaaaacatcaatttatgtacatcattttagttcttcctctaagatttgattgatttgtattaatggctctgaatactgatactagtttcgttggcaagtaagataagtgataactttgataaagagtgtcaaattacaagtgccacaatttggagtacgtaaccaaattgacataaaacttgaataggtgaaaaaacgagccagaaaaaaaacgaatatcttctgcttatccgaataaaacgaaagtaatattcttacaagatccttccttatgaagtagtgccagtagatatttttatcattgtgattgcgacctgtttgttgcgattcatttatgccaattcacgttactatttatgttgtgataaaatcttttatttttcttcttctttccaaatacttaagtatgcatgattattgatccgtacaagcataaacgaagagctataaagtctccaacggtaaacgtacgtgaaccaaaataacaattcaatattatggttcgaattattctgtgtattttatgtaagaaaataaccaaaaccgactcgaaacaaaacaaaaaaatcttctgaaatgtgaatctttatttcggaaaattcttaacgatagatagtttttgctttaaaattaaatccaaacataaactagaactgaaattcaattcgttgtcaatattttctatacaaaaaaaaaaaagaaatccgaccaaataaacaaaaccataaatagacatctccatttttagttgaaagatgattaaatgcaataaatgtgccacaatcataaatttttccttttcacctaattgaaaattttaatcattaataagaagaatccatggagcacaattattttattttttattttttgctctcatatggtatgttaaattaattttcccttaatttaaattccccatatcaaataagtttttttttttttgagaaagacttgatttcataggagaaatatttgttaatattttcgacaaaacattttctctgtttgatgtatttccatcctcgtacaataaatactctagctattaaattcttagcccaaacgaaaataaagaaaaataaaagggtcctactaataaacaaaacaaaactagtggtcccaatttgaaatatataaaaatatataaaattcataaagctttgtggcttcagagcttccacttccatcgtcgtcttctattttttcttctttcttcgatttcataccaaaacaagaactctctgttttcgacaaaaacgaaaccttgagatctattttgattgacttttaagaaagagagagatctttcttagaagattttgtctcgtcggcattgaagatccaggtaacaaaatctcaccttttctctcctaatttcacgaaatcgaagaaaaattctcataattctcttaattacttatctctcaatttcttaaatcttacagggtttgtctttcgaaattcaggtaattttctcaaatccatttatggattgaagctttaggtaatgaatgagctgaatctgcatataaaaatcgatactttcattatccagaacaaaacaagatttagcataaacgttcaaaattgaaactttgattcctaacttcttggaatgattcagattgagctagatttagatctgtatgattgatattatgggtttggtttgtttatgagtagagagaaaatgggtgatgaggcagagatcaaggaacatttaaagccacaagcttcatctgaaacaatg

SEQ ID NO: 21089 - DNA, 3003 bp, Unknown; identical to SEQ ID NO: 21086
  misc_feature (1)..( 3003): 2750-1469P.txt file - cDNA_ID_1839219; gDNA_ID_2926213; Annot_ID_142108

SEQ ID NO: 21090 - DNA, 3003 bp, Unknown; identical to SEQ ID NO: 21086
  misc_feature (1)..( 3003): 2750-1469P.txt file - cDNA_ID_1839219; gDNA_ID_2926213; Annot_ID_202794

SEQ ID NO: 21091 - DNA, 3003 bp, Unknown; identical to SEQ ID NO: 21086
  misc_feature (1)..( 3003): 2750-1469P.txt file - cDNA_ID_1839219; gDNA_ID_2926214; Annot_ID_202820

SEQ ID NO: 21092 - DNA, 3003 bp, Unknown
  misc_feature (1)..( 3003): 2750-1469P.txt file - cDNA_ID_1839226; gDNA_ID_1620652; Annot_ID_47760
tttaccattcataatgagactttgaatgtttggacgtaagtgttgaatcatgtttcttgatgtatccttgtttaaagttcaagaaaccttgagtgtgtttgtgtgtgtgtgttctttgggatttgcaggcatttgattgggtttttcctgtttttggcactcactatatacactgcaacgaaagtaccgagtgtcgtggatcttcattcgcttcaacaccgtttacccgatttgttgaggaaaacagatctccacaaacttcattctgagctcatgtctcgccttccttctagtccatctagttggcatgtgatggaccttctttataactgtttgcctgaaagattttctcatggcaactacactgacatgtgtgttctggtaagaaaagactcaatctttctctctattcctgcagattactgtttcaaaatgtggccaagttcatgtctttgtaattgcattgcagcattctgtgagggaagatcttgcaaacttgatagctcctttgatcttcaggccaattactcgatggccgttttatgcatttctaggtggtgctatattctgtctattagcaagcagcacgtgccacctcctctcatgtcactccgagcgagtctcctacataatgcttaggcttgattacgccggcatcgcagctctaatagcgacttccttctaccctccggtttattactccttcatgtgtgatcctttcttctgcaacctctacttaggattcataaccatcttaggaatcgccactgtgcttgtttctctcctcccggttttccaaagcctggagtttcgggtggtgagggcgtctctgttctttggaatgggattctctggcttagctccgattcttcacaagctgatcatcttttgggaccaacctgaagcccttcacatgacaggttatgagattttgatgggtttgctttatgggttaggagctgtggtttatgcaactaggatcccagagagatggatgccgggtaaattcgatatagcaggacatagccatcagttgtttcatgttctggttgttgctggtgcgttaacgcactatagagctgggctatgagagatattgaaggatgttgaagatgaagattgaagattagatggaatctttgatgttttaaatcttgtttgtagtagcttcatataaaagttggattatgtaaagtcttatctgtaatcaaacgtttaattgtttcttttattcaacaaaggattcatattgttaatctgcatattactggttaaagaagctgaaggattcatatttttagatgattccagtcttgattgcagcattcaaagtatcataatctagtgtcaacctcatataagcctccttgtgaacctgacacaagcctaactggttccatcgcagaggatactttggttctgatcttcttcttgaagatttcccctgactagttggtatacatttcgaatgatccataagtgttgataaactacaagtacacaagtaactactcaagggaaattcacttgcaggttagtcaagtgaacgttttttcaaagtatcagagaatcataaagaagacaaaggctctagtttgagtctggaaattgttaatgatgatggtactaagttctggtggagtttgcatgtaagacaaagcattgcagactgaggttacagcaggaagtgcatctgggttcaatggttgatgtgtaagttgctgtaaggacgtgtctcaaggatatcacaacggtttgttgagatgagacagagttaaagataactagtagtggttaagaatacagtgttaattattgttttcaatatatgagaggaggagcttccctactatttttatttttttagccaatgagagagctccacttcataccccacttttaccaatcgctagatttcacagccactctcacccatgtcgcgttgagcgcgtgtccacaaaaatcattctttttttgatccacgcacctcattctcaaaaacccaccgcgtgtcttatttttttttgttttcttctctaaaccaaagtaaaccgaaccgagatcaatttgaatttcaaaaccaatgtaaacccatcgctgtgaaaacaaaaagctcggccactgtaacaacaaaaatggagacgacacaacttggaaaagaaatcaactcgaaatagccaagagaatgttcgaaaaccctctcaaatccgatgcttcctttgattccaacctccaaaagcccatctgctcaaatcttcatttcgaggacgaggactcgaggagtattacaaggtacctctatagaatcaatggcttccatggtttttgaaactttacttctaataaacaccattgtaatgtcttgttgtgaaattgtgtaaggaacaaaggatagtgaaagctgaagagtgggcagagtttttttttgactaagtggcctctgtttttgattcttcagtggtcaattttgtgatgggatttgattgaaattggagaatgatttcatgaaatctcttcgggctgaggttgattcatgactctttcatttttctagtgtctcattgatgatagacataagaagcactcagatgttggtttttgttttccatacttaaggccatagagagtggtgaattggaggcaatcaagcctttgccttggtaccctaagaatcttcacttttctagtgtctcattgatgatagacataagaagcaccattgctgaatcatatctgtttggcacagttctagttgaccatccataagtggattattcatgctgctgcttaagccattttttccatatctgctgacaactatagaggctttagtcacatgcttttaggtttgtagctaggaaccatctggaatcaagtacttgctagaaataatgttgttgatcctctgctgcagcgagagagatgcagcgcgtagcagctttaaacgtgttaggaaggtctgtgaatagtctaaaatctacatcaaatgagtgaagggaaatg

SEQ ID NO: 21093 - DNA, 3003 bp, Unknown; identical to SEQ ID NO: 21092
  misc_feature (1)..( 3003): 2750-1469P.txt file - cDNA_ID_1839226; gDNA_ID_2926215; Annot_ID_142173

SEQ ID NO: 21094 - DNA, 3000 bp, Unknown; identical to SEQ ID NO: 8624
  misc_feature (1)..( 3000): 2750-1469P.txt file - cDNA_ID_1839234; gDNA_ID_1971821; Annot_ID_58334

SEQ ID NO: 21095 - DNA, 3000 bp, Unknown; identical to SEQ ID NO: 8624
  misc_feature (1)..( 3000): 2750-1469P.txt file - cDNA_ID_1839234; gDNA_ID_2926195; Annot_ID_141213

SEQ ID NO: 21096 - DNA, 945 bp, Unknown; identical to SEQ ID NO: 4149
  misc_feature (1)..( 945): 2750-1469P.txt file - cDNA_ID_1839258; gDNA_ID_1620686; Annot_ID_48466

SEQ ID NO: 21097 - DNA, 3000 bp, Unknown
  misc_feature (1)..( 3000): 2750-1469P.txt file - cDNA_ID_1839258; gDNA_ID_2926202; Annot_ID_141561
gaataacagagaaagagagaaaaagagagagagagagagagagagagagagagagaggatgtctggtgtggttgctcttggtcatgcgagctcgtggggcgcagcgctggtaaggatctcgccgtatactttctccgcaatcggaatcgccatctcgatcggtgtctcagtcctcggtgccgcctggtaaatcgaatcttattcttcttcgtccccgcagattaaagcattgacctttttcatcatctttttttggtttgtcttattcaggggaatttacattacgggaagtagtttgatcggtgcggctatagaagctcctcgtattacttcgaagaatctcatcaggttcgttaaaagtttcaagcttttttaattctagttttgttcctttggttgatcaattagtggctttaaggaactgtgtagattccatgtcttgttctgaatagcaatgagaattcatcgctgagtagcttgattcatttggatatttcaatgccacatctctgcaagagtagattgtcacattatgatacaagttgttgacctgggattcaggaggtagaaatttagaattctcaaggactcatctggttggtagggctagtaactttggatcgtgaaggctctggctttgcggattcaagcactggatgtaatgataatgaagtgtcttttgtctttccacgtatttcagcagaaacatatatctaccatcgagatagctaaatgttaaattaggggatatagatttaaagtttgtgtttacgttatttgtggtgccttcctattccgctccttcattcttgggccggagtcacttaagtaaacactcaacacagtcattgctattatatcccatgggtctacggggtagatttaaggaatgcttaacagggagtagctgtgtatgcaatttgatttgttgttacagagctacaggcttggagttagatgctctgcaacatcagtgtcaacagtgtcattaccacacaccatttcttaaccatattgagtagagcatttggctgtaaaggcactagtacttaggaatgcttaagtaggaaacagttgtgtttgcattctacattttctactttgttaacacttaacagagctttaggctcaagattagatgcaaaaagtatacaatgacgaagcatttcttgttcttttaaactgtcccagtgtcatcttttgcgaagctgttgctatatatggagttattgttgcaatcatactgcaaacaaagttggagagtgtcccatcttcaaagatgtatgatgctgagtctcttagagctggatatgcaatctttgcatctggaattatagttggattcgccaaccttgtatgcgggtctgtatctacccttttctccttccttacagttttggtttttggattccattgtcagatatgcaaccgaggtccacatttctcttgcaggttatgtgtaggaatcattggaagcagttgtgcattgtccgatgctcagaactccacactttttgtaaagattcttgtgatcgagatattcgggagtgctctcgggttgtttggagttattgtgggaattattatgtctgcacaagcgacatggccaacgaaatagatatatatatatccggtctgtatatgttgtggtctacttgcaaatctggaaaaacatggcttcttgattatcttcattgttatatcgttccaatgtctagacgaaaatcttgtgtgaaaactgagaaccacttttggatccccaattttttgtatttgtttaaaacttttgaataagtccttttggagaacatcttcatgtttgtattctcttataatcaaagacaaagagtttgtatatgatttgttaaaactgaactagtcattttatcaagtctgtttcctctatatactgtagttatgttttatcttttttttttctttctcaagttatgatttatctcaagcaattatgttgttgatacaaatggtcttgcctctttggccacaccctgtgtagtgctgtacccaacaaaaccaatgaaagaattcgatctatacaaattgcataccaagcagaaccgttttgtcctaaaccaatcatcacactagacgacgtcgtttcacgtgtgatatttaggtggctgtcccgttcctggaacccggagctttttttgttgtgatatatcccgtaaaaccctaaacatagtcacttcatcgtctcctccactgtatcattcaatctctgtcttccttctttttagcgacctcgtctccaaagctcacaaattttctacctttccggtgagtgttactctgttctcgtttcctcgcttgtctctttctgggtttttagtttccgaaagattttcctttcaaaatccgtttttgaatgcgaattccctctgctgtatctattatatttagtaatttgatgtattgtttggttggtatgagctgataaagttcaacacgtttgttgttcacttttgggaaaatttgcgataaaacaaggatttttttacaattttgacatatatatatatatatatatatatatatatatatatatatatttgagacgagaatatttgttcagatatctactgagtaaaattagtggtctctctgtttattgcgttcatgtgacatttggaatttttgagtctaggagtagagagaaagatgcaagcttgttgtggtggtaattcgatggcttctcttcagcaacctggacgggttcaaggatctgtctttcccccaattatgcctccagtgaccaaattttctcagcagttgaagttcaatatttcaaaacctttccgttcttcatttctgaaaagaaacctggtctctgaaatgagagcatcttcagtctcgctacctaatgtcgagataagcagtaagatagtttaagtttcatttccttgattatgttgatgatgtgaaagatatttttacttgtttcatgcgtggttttgatttctttttactttttgaatg

SEQ ID NO: 21098 - DNA, 3003 bp, Unknown
  misc_feature (1)..( 3003): 2750-1469P.txt file - cDNA_ID_1839266; gDNA_ID_1971819; Annot_ID_58285
aaaggtttattttatttgtcagatgagcaatcgatggtaacacaatttttgagtcaattcgttttttttttcctgctggaatgcatagtatttgcgtatttgatgatctttaagataagcacactctaaaaaacaaactctagtcctctcagaatagatatgaaccgaatgtataatccaatcacttcgttggtatataaagatacttaggagcacattgcttatgggacgaggcagcaaaggaatttgtctagtgagggacaagtatctaaaaaaaggtatacaacgacacatcgtttagtttagcttagtaagcaaatcttcagatttatttattcacgattttatgctacatatctataaatctgacacgtacgcattaaagacaaacatcttatgctactatatatgattaatcatagacatgtgctataattaacccttgtgttctaaatatgtgtctctttataaaaaaaaaatatatatatatatatacttgtatatatcacatatgtgaaattgtctataataagatttatttttttttggtaaaattttaagtaataagtttatatttgcgattttttcttaccgcttttaactattccagtattgtttatcacttttttatacatccttcaaaaatattatatcgtttgtgtcaccgatcgtatatatgtcatgataatagtttttcttgttcattatgtgatgcataaaattcacgtcacacaatttgacaggatatgatgaaacagttttagtgaaaacaatcacaaacattgatatgaaaaaactacgtccaaataataacaagaacgcagccaacttgcctattcaagaaactatagtgctctataaataatacattttgaaattattaaagaacccaatatatatattcctcgatgattgatctagcttttgaagtttcctttagttctaactaatgaggatataaagaaggagcactatcaagtttgaattacaaaggactcaaattaggaaccaagccgcacttcccgtccaagaacgtcacaacaaaattaagcttgacactcttaaacaattattgcatctctatttttactttattctcattttgattcgtcaaatatagcaatgacagattcaaaaaatcagtccatttctacagctaaaatactttcaagataattagaatcatgtaagtataaccacaagcatggataaaacagaaccaaagttaaaccaattcatcaaaatgactaaacaaactggccccttttcatttaaaccggaacaattcttgttattcatttaagaattaactggtagtttttgtaaaaaaatgcaatttattagatgaataatgtcattcgttttaatagaatgttcattgcaatgctgtcataaatgaaataaatatgcccattcattttttctgcgtttggaaagtggaagaatttttcaagaggatcggtcattcatgcatgtaatgatgcaacggaataagaataaccaaacattcgatcgaaagtacttaaatacctaaatgtgcttgtcttaaaatatatctaagatataggattcaagatatctgaatatcatatataaaaaatgaacatacagatacagtgaatatttgaatttatgaaatatgggattgctcgattggaaaagtaccatagtccattagtccgagtaaaggttttaaaagcttatccgaatctaaagaaatgtacgaattttggcttagaatctcttaattacaacaaaaaaaagttattaggtattaaatttttcacctgatattggtgatttgctatatacatctgatttagatagaaaacaaaagttatactttgagataaatccaaaaccctatattctggggctctataaatgttattaattaccgtctctttgtagcgcttactccacacaaaattgtaatatttaaaagatttaaaaacaccaaaaagagataagttagtgtgaattgtggaagtaacagctagaattccaacgtgaaggacgatagtgaatgaaacacccaaaaccaattaaacttagtcatgatgagagggatgcatgaaactaatcggcgatggttaaaggtcagcctcatctcatgtctgtgtcttatctcatatatgataatcacccacaatatctgtatatggtcctcgtcagatttcactcattttgtatcctcgagaaattatgcagtactactagttacttattggcagattttttattgctccatttccatagtatatataatatcatttaatttgtaagatatattagtgtttttgacaaaaaaaaaaaaaaaaaaaaaaaaaaaaaaaaagaagaagaagatatattagtgttgtctatcaacatttatctgtcggattcaccaggtattaggaaagaagcccgactatttgtttcgaaattttattgtatgtcacatgaatacgtttcaacgtgatgcatatgttattaatgtatacatagatacatacatcatgttgatatcctttcaagaatatctagatcataaattcataatagatatgttcatagctagaattagaagaatactttactagaaaatgaaatgaaaatgattagctatctgataaaatgattaaaaaaaaaaagtctactgaaggaggatgataaagtttaagtgttgagattttattcaagttatgtagtatacaaaaaaggggatagttttagacttttagtagtacgaatagctaatcttctaaattaattgctatctattacactacactatcaataactaaaaatgaataaatctagtgcagtttattcaataaaaatgtcacgaattttacataagttgtaaacatccatctattaaaacataatcacacaacatctattttgttggaataccataaacttttacttgacggctacataaacatgatacatgattaacataggccttttaaaaaagcaaatatatatgactagaagaagaaagcaaaagaaatg

SEQ ID NO: 21099 - DNA, 3003 bp, Unknown; identical to SEQ ID NO: 21098
  misc_feature (1)..( 3003): 2750-1469P.txt file - cDNA_ID_1839266; gDNA_ID_2926199; Annot_ID_141444

SEQ ID NO: 21100 - DNA, 3003 bp, Unknown
  misc_feature (1)..( 3003): 2750-1469P.txt file - cDNA_ID_1839312; gDNA_ID_1620712; Annot_ID_49041
cccgagatgggccaacagtgtgggaaatagggatacctgaccggtctgcagctgagttctttgttccagacccaaatcccaaatacatcaacaaactatatattggtcatcctgataggtatgtccatgatcaaagatatcacaacattaaggtttcagattgttaaaacagtagagagctaaagtatggttgtacgtaagcaggtttaggcaatacgggctatgggaaagatacacagaactatatcctaaggaagatttggtgttcaccattggcgtcagtgattacaaaaaagattggttctttgcacacgttaccaggtaacaaatatttcacattttctaagaagagtaaaacaaagaagcctcacatttattttaaatgatgataggaaaatgggagatgatacatatcagaaaacaacatggcaaatcaagttcaagctagagaatgtacagaaaagttgcacatacaaaatccggatcgcgctagcaactgcaaatgtagcagaattacaggtgaggatgaatgatgatgacacagaaaagactactcctatattcacaacgggtgtaatcgggcacgataacgcgattgcaagacatgggatacatggaatctataggctttataatgtggatgtaccaagtgagaagcttgtggaaggagacaacactttgttcttgacacaaaccatgaccaccactggagcctttaatggtctcatgtatgactatatccgcctcgaaggacctcctttagattcatactctcactaggacttttagtcacattattgtatacgcaattttgtattgcgggttactttactaataaaaaaaaagacattatatgggccttgtgttgggccttctttctaatctcagatttgactttattacaaacgaaagggtaagaatgtaatttttcgccgactcgatctatcgctgcctatatatacagttacctgcaaaatctagggtataaaagcccctaattttttctccgcccaagagacaaaaatccttcgcaatcgagcaacggaagctcctgcatccaccgtccaaatctcttctaacgtcgccggagatcggtaaaccggttcttcatcccgtattcatctcttattgaggtcttagattcatctagcaccttttttttggcgtcgaaactttcagattccctatttgtaattagttgcgaattttgattcgacgatttgttgctcgaatttgaatcaacagatcgttggggaagtagagaatggcgacgtttgagctgtacaggagatcgacgatcgggatgtgtctgacggagactttggacgagatggttcagagcggtacgctgagccctgagctagctatccaagtccttgttcaatttgacaaggtttcaatttaacttttatttgactgatcttggcgtcttgattcgtttttgtggttttttttttctttcctctttttgatatctgtatgcttgttgtagtccatgactgaagctctggagagccaagtgaagaccaaggtgtccatcaaggtgattttcagttcttttaatctcttagtcagcgtaattgggtagaagaaaatatccagttcgtgaattgggtggaagacgattaagagtttctaaactatcttgctctattcggttatcgttaagagtttctgtgagtaatgggttgaagctggatatcaaataatttagtgttaaaaagttcaacttgatagtaagatgtggattcagttatctgcctgataaggttattagatttgctagcacaggaaatactaacactgtcatggattcaatcaagttcatagtttctttggatgtcatatatgaataataggttgcagattcccattcctagagttaagtgtcaaccttagattaagctgtatggatttcagttatctggctaggagcttatatctgttttacctcaagaaatacttgcaattttatgaatactctcgagtgttgtagactcgtagtttatttgtctggacgttgtatgttcttttggaagctgactgatcaattgtttttggtgttcatcactaatctggatagtcaaaaattgagcttattctttgctccgaagacacttttttttaaaaaaatcatatctggatctcaaaataagagaaaactttggcagatgaaacaatcagattcttactatcgtttcttatttattatttcagggacacctgcacacttacaggttctgtgacaatgtctggaccttcatattacaggacgcaatgttcaagagtgacgatcgtcaagagaatgtgagccgggtgaagatagtggcatgtgattccaagctgctcacacagtgagatgcaaattgtctgcagggaatttactttcctttgtactagattttgagttttttcactttgtaaactcagcacttgctatatatgttgagcacttgctatatgttgagctccatctgcagccatcaatttagcctatatgtaaattctcggcccaaggacataaggatacattctgttgctatgagaaagttcttgagcttcatcttgagttttttttttttttttttttttgtcaagagtgttacttttatatatataagccagtacaaaccgagtcagtacaaaagtggaggaaacaaccatgaacaaaagcatggactaaagcctaacctatcaactattacagatatgattaacaagaacaaacttgacaaacactagagaaggttaaacttgtatcataaacgaaactagtctaaaacagaatccaaaaggtgacctaatctgttcttatgaccttttatctgtaaaattccgaaccacttgatattgatttggacaaaactttgtctcatggaactgattggtctcaaagccattggttaatcttagactctttctttctcttggctcacttcactctcctttttttaggtgagagtgagttattatatgtatgtgtcatttttgccttttcagatg

SEQ ID NO: 21101 - DNA, 3003 bp, Unknown; identical to SEQ ID NO: 21100
  misc_feature (1)..( 3003): 2750-1469P.txt file - cDNA_ID_1839312; gDNA_ID_2926185; Annot_ID_140755

SEQ ID NO: 21102 - DNA, 3003 bp, Unknown; identical to SEQ ID NO: 18409
  misc_feature (1)..( 3003): 2750-1469P.txt file - cDNA_ID_1839316; gDNA_ID_1620713; Annot_ID_49060

SEQ ID NO: 21103 - DNA, 3003 bp, Unknown; identical to SEQ ID NO: 18409
  misc_feature (1)..( 3003): 2750-1469P.txt file - cDNA_ID_1839316; gDNA_ID_2926152; Annot_ID_139348

SEQ ID NO: 21104 - DNA, 3003 bp, Unknown
  misc_feature (1)..( 3003): 2750-1469P.txt file - cDNA_ID_1839320; gDNA_ID_1620713; Annot_ID_49055
tgatcgggacgaggattattttgccacagctggtgtgtcgaaaaaaattaagatatatgagttcaattcccttttcaacgaatctgttgacattcattatccagccatagaaatgccaaatagatcaaagcttagcggcgtttgctggaacaactacattaggaactacctagcttcctctgattatgatggtattgtcaaggtatttgaacctttgaagttttacgtagattgtttatcacttgattacccctttatttccttcggtctaatgaatacaaacgtatttatgatgaatccagttatgggatgtgacaacaggacaggccatttcacatttcatagagcatgagaagagggcttggtctgttgacttctctgaagcttgtccgacaaaattagccagtggaagcgatgattgttctgtgaagctatggaacatcaatgaggcatgctcttctatactggattttgtcgttttaatagctactcctactgagatatctggcatatatacatatgaatatatcaatagcactttggattattctgtcaatgttgtcatgctcgtattttcagccttgtagctaatagacaatcttcttgtttgactgtgcagaggaactgcttaggaacaatcaggaacattgcaaacgtttgttgtgtgcaattttctccacagtcctctcacttgctagcctttggatcatcagacttcagaacctactgctatgatctaaggaatttaagaactccttggtgcatactgtcaggacacaacaaagcagttagctatgcgaagttcttggataatgaaactcttgtaacagcatcaactgataacacgttaaagctttgggatcttaagaaaaccactcacggtggcctctcaacaaatgcttgcagcttaacttttggcggccatacaaatgagaaggtagctaatgctgaaacgtaattttgagttaatctatataatgatgtttctctttttccttcgtggttgatttgtcttttcctgcctttttcagaactttgttggtttgtctacttctgatggatatatagcttgtggctctgagacaaatgaggtatgcccctacaaacctgggaactctttgatattcctataactttgtgtatggaatctccttttctataatcctttaacaagcattgccacagattgatagtttgattctcaacttaactagaagctccagagtttatttcatgtgatggaaaaaatcacagttccatgtgaattccgtctatttatacgcgatggaggaacttatccattgatactaacaattagtaaaataactggcgtagggtcaaaaaagaactaatctggtagtattgttgtttaagtgatctctctgattgagaaatatgctgtttcttgttttgttcaggtttatgcctatcaccggtctcttcccatgccaattacctcgtacaagtttggttctattgatccaatatcaggtaaggagatagaggaggacaacaacctgttcgtttcaagcgtttgctggagaaaaagatcgaatatggttgtttcagctagctcaaatgggtcaatcaaagttctacagttggtctgaaataaatacatacatacagaagaagctgaggtaattctacacctagagccctcttggtttatggtaaaacaaaaaccccatcaatccaagaatcaggcaaaacaacggagataacgaacaagctttcaacacacagatatgagatagttttatctatctgttgctaaagttttcctcaaatggggtgaaggaatgagagtgagtagaactatagttgttcaatagttgcggtttgatcagcgcggtaagggtttataccgctgatgggtatacatagtaaggtaaaagaccttctcttttgtggtgttctaaggtgtttatttttttattttttattttggctcttacaataagattcctctttgtgatatgtaaatttgctccgatagttctaaggtaaaagagcatactctgatgtatatatagttgaaatgagctttttagttctacggatgaatctcctccaccaagaaaagaaaaatcttcgtttttctttttaaaaactttaaatgcatcgttttttgttgaatgttcacaaaagtaatctttgaaatgctttatcattgtacatagcttaggactgaatcagcgtaataacgttatcaaggtttcttgctcaatcaagctgctccaacttgtttatggtcttcttcacttggtactgaaaacttttttactttctgagacaaacaacaacagaagatgaatcaaggccttgctcaatctaagatcaagctgtcttacatctatgagaaagacttaagaatcacaaagaagaattcatagtgaactagtgaagcatgccatatggaaaaacaattgttcaaaaactccaattgaggaaatgttggaaaaagaaaagaacaaaccttagatagaacacattctcagagagattgcagtagaattagacatttctcttgatcgaatttcgattccgaaacacaattgagaagattcacagcttcttgtcgtcaaattggtaggggaagctttttctccattatcataaaccctaaactaaaagtttctgcaaaaacaactattttatcgaactcttaatgggccatcaatgggcccatacttataaacttaaacccttttccaatttcagtcgtattttacaaaaaccatcaccgtcgttatcacagtaaccaaacaactttcatcgccgggtaagctccattcccaagctatttcgatctcgtttcacgtcgatctatttctagtcaagttaatctcttcttttagggtttaattagttaagacttgcgtttgattatctcaagttcagaatttgtttcttgatgatctaaaggaaggaattttatacttatcaaattgaggatttttgtttttggatgcagagaactgattaacatataagaaaatg

SEQ ID NO: 21105 - DNA, 3003 bp, Unknown; identical to SEQ ID NO: 21104
  misc_feature (1)..( 3003): 2750-1469P.txt file - cDNA_ID_1839320; gDNA_ID_2926152; Annot_ID_139343

SEQ ID NO: 21106 - DNA, 3003 bp, Unknown
  misc_feature (1)..( 3003): 2750-1469P.txt file - cDNA_ID_1839324; gDNA_ID_1620724; Annot_ID_49258
tctgaacatatcatattttttttttttaaatgaacatattcattgcttctagatttttgctgtcaaatatgagtaactttctgtgacgtatgtttttatacagaggtgaaaacagggaatacgccatcaagaagcagggaatcagtaacctactattttaatagaagattcattaccttgttaatcacgaaattaccttcttgctcatgaatcaccaagtcaatgtcaatgtttttagagaaaaaaacacacatacataatcatcaagtcaatgttcttgcaatagttatacctttagtttcccccaaaaaaatattagccaattaaatcaaacaagaaagaagatattacttaaaaatctctacaaaacacatgactacatgagcgagtgaattcgataagggcttgaagaagtggtatgccgattgactattgggttaaaaatagatgaacaattgagattcttagaattagtaccactaaattgactaaaaatcagtaaatgattgaactcatttgagaccaaacatgtgggagatatatatgggaatgaatgctttctaagtggacacgaaaattctatattacagttgagattcgtttgaacaagctctggggaatatacgggggacaagataccaatttattactaaaataaatacgattaaaatagtctaaattgagaaagagaagatccggagatggtggtggtgggttttaaggcatcttgcttatttatatccttaaagggaacagaaattgtcaaaaatacgtcatacgtgacgttttctgtcataattagtaatatactaaacataattaattagaactaaacgataaagtaattagttaattggtatataaatatatggactatggagtataggctttttcatctttatattttgcttattatttattaaaaagtttggcattattcattgccaaatgactacagcaaatatacgattttgatgcagaaatttaaatttattgatcatctaaagatcgcacttagtttactatacgaaaatccatgcactacactactagtgatggtacaaatgtttaggaaataaaattattatgttaaattttgtattgaaataaatatttgggagttataatcttatcatataaaaaaactaaaataaataactaacccaacatatatgtatatctacattataaggatttgaatttatatggtaaacataactatactaacaaaaattattatattacatatcttggttaaattagtaaaatagatttatttagtgtttttcgtttgtcgcttgtcatactttttgagttccttcaatttgagtatcataagatttttaggaaacttaatcttgatgttataagtgatattaatcgcttatttataacatctacttatttatccatcatcgatcattttttaacggttcaaaagatttcacgtatattaatgttcaaaattctaaaaaaaaaacatttaatcaaaacatttttttctaagtatttaagtaatttttccggataatatttgtttggcaacgatcaacatatatcatgactcaaataaattttgatgtttctaattagtaaaatgtggagttggaaaaaagttcttgcaaaaggtgaaaagaacaaaaatcagagatggaaacacttcccacatgcttatgttagtcccaccatttagtggtagaaatgtaatttatccaaagaaggaggtcaaagctgcttcgtctctaatccaagtctagccagtattgttgcctgcataagagcaaacggtaaaagtgacggactcttaacgatgacgggtgttactgtttaatgtctcttgatcgacttttgttaccgtaacgacaacggcacgcgccctcacgctccgtaccagccttaaaagccaacacatttatgatttatccagtaactaatactaattccttcatccactaacgcaattgcatttaattgtttagtacgtatagaaaaaaagtaaaaagctatttataattataacttacaaagtctctttcaattagtacagtgtaaaacaaccaattattttctatattatacagtataaaggtgtttatcatagacccattatttatttgtttttgactaaaatatcaaagtgtattaaaacataaaccaaataaatttgaaattaaagttttttttttttttgtaaaattaaaactgatttttggtttaaatagagaagcaaagctacgcttttttttttgctagctctttttttatttaatcaaacaaaaattgaggaaaacaattattgttgtgctaagcatttctatcatatatttttttataaacaatacatttaatttcaaaataactttctactttcttcaaatcaagctatttcctagaaatttggtactgtctggataacaacatgtcttagaaagtatagtaaggaatttacaattggttatacaattaatgtatagcgtattattatatacgaaaaggtgtccaattttagacatacatataaaatcaatttattaaaaataaaagtattgaaaaaagagagagtgaaacggagataaaagcaaacggaggtgttaacttaaagacgggagagaagcgagtgagagattctttcttgtaacggcgttgtttgacgattatagtgacgaagagagacaaaaaaaaagagtttagtcttctttgtttgggagacgaagacgatagaagctggttttacgggagagaaattagagaggttacagttacagagcaggaaggattgcgttgcgttacgattcagatctctctcgatcgttacttacatgcattagagaacaagaaaacgtggagacggaatccaagggaccttcttcttcaatttaattcctcactttattacgcacccttcttttattttcgactgtttcagcttccggttcttcatcggagagagatagagagactgtgtgttttggtgtgactgatagaagatttaatcagctgatg

SEQ ID NO: 21107 - DNA, 3003 bp, Unknown; identical to SEQ ID NO: 21106
  misc_feature (1)..( 3003): 2750-1469P.txt file - cDNA_ID_1839324; gDNA_ID_1620724; Annot_ID_165905

SEQ ID NO: 21108 - DNA, 3003 bp, Unknown; identical to SEQ ID NO: 21106
  misc_feature (1)..( 3003): 2750-1469P.txt file - cDNA_ID_1839324; gDNA_ID_2926184; Annot_ID_140709

SEQ ID NO: 21109 - DNA, 3003 bp, Unknown; identical to SEQ ID NO: 21106
  misc_feature (1)..( 3003): 2750-1469P.txt file - cDNA_ID_1839324; gDNA_ID_2926184; Annot_ID_200491

SEQ ID NO: 21110 - DNA, 3003 bp, Unknown
  misc_feature (1)..( 3003): 2750-1469P.txt file - cDNA_ID_1839328; gDNA_ID_1621141; Annot_ID_56632
tgtttgtttatgggtaagtagaggcctagaacaccatgtttggttcatttgtcttctttgttgtaaattcccgataactcctgttactagtaaatataaaacaaattatcagttcttgtaatgaaaaaaaaaattttattttgtttagtaaaacatagttgtgctacagatttttctgaatattaataacatatttacagtaacaatttttttcaattgtcattagttttgacgaatacataacattcttactaaaaaaattatataaattaaattttaaatgtcatataattttactttaaacaaactataacgtaaatattatgaaagcagaaaaatgtagctagacatattatcaaatagtttatctctaactaaaaaataaattatatagaggtactttcaaaatattctataaatttaccctttttaaaacaaaatattaatatttcttatacaaaacagatctagcttaatacattttctatagggcacaaaaaagaaactattgttaatgaaaatgaagcaaagaaaacatgtcgagaaaatgtatagcaaatataaattttcgtaatataataagaccattaatataagaaattaaccaaaaataggtgaagaaatttaaactatacgttttgggtatcggttttcttggtctagcacaaaatgttttactcaatttttatgttttatataaagttttcatcaaagagctttactcaatagtcaatataatgtagttagatagtgaaatttttaactttgaaacaaattttatataacataattgaacaaacaaaattattatatgatatttgtatttatttgttttaaaaagactatatgttacgtataaaataattacaaaccttgcacaaaaatgacgaagagagttagaacggtaaacgagaatataatgtttttattcatcttagctgatataaatgattatatatatatatatatatatatatatattttaatctgaaaattgattgtgtttaaaaagaaaaaaagaaaaaaagaaaaaaagaaaaaaagaacgaagaaagcatacatatatataagaagttaggtatatcccacattataacttatctatattaagccatctatctccttaaattccgattgagctttttactcatttgatatgttaaaagctttttaccagctagtcctatacaaaatatttttccaaattaagtaaaagtgataaattagtaaaattcatatataatttagagaatagatatactaaaatggaaaaggttataaaaatagcattttggttttcataaaaaggaaaaattaatttagaatgtaactattgaaatagacttttgtttttcagtttttttgtgcaaatacttgatttcattcattcaatcaaaacaaaccaaatcaaagtacaatgataggaatgattccaagatcccaatgtttataacatgaaaagatagagtgttccctaatgcaacataacaatagattaggtagtccgacttgtgattcataagcgcttggagacaaatgttagaaaggaaattggcacaagcaaatccatggtgagtcgatagtgacggttgattgatttcgtgatgttgaaaaaaattccaagactttgattcttgcttgcatgagacgttttacacagtttatcataaaggtaaggaagatcggtagcttacacagtttagaagccaaaagctgaggatgaaaacttgtaaatagagttctcttcgtataagagaaggagatggttagtttctccataaagaaaccaattgaattcatggtttctcattgagcgagggataaggattcggaagactctcatagtcggatagccttagctttgtagctctaagaaataggtcgggatctctcatggaagatgcaataattttttgtgggagcttgatctgatccgtaaagatgttggtgattgtgagatacttgagatcattttaaaatattgtcgacctaaagtgaacgtacatagaggatccattatcaaagtcgcaccaccgatcaaggatcatcaagtttatgctttcataaaacgtggccagagttgagtttagcgataaggttcctagatgataagcgcaagaccaattcatcaaaatcgattcacatctcatgtcatgtcctcggccacataggtaagagaatcgatgcatctatgtaatggacttgacaaaagaaaaaaaacaaaatttggcaaatcattctaaagaaccaaaattacttcgtaactagtgaaagtccttttaagaattcataacttagaaatttgtaagttatatgcgagcaacggaaacattcggatatttttctagtaaaattaaataattagagttttttttaaagaattaacggctagaggagaaattaaattactatgggtatttttttcagcaaaaaaatagttggatttttttttgttgagaaatttcccttttaacaagttccaaaataaaaactgattatagtagaaaaaaagattggaaattgataatactacttgaattttttatatgccttaaatagtatataattgttttcaaactttagaaacattaaatattaattagattttagacattatatagagtttaaatattatgaaaattataaacttttataaattttaatattattctattttaaaactcttataaagttaatatttataaatttgaatattttaaaatgaatatactaattcatagtagaaaattgatactttggaaattggccgttgttaattggaaaacatcacagaccataaattgggatcttgcgtgaatccatcaaagacctttctctgactcttattctttctcctccaatctagggttactccgaattcttcttcgtgtccctctccgattctctgcacgttgtcgctgttgtttcctctgaaatcgtctcgaattgaaggatcttggatcttttttttgctgccattgatcggttcatctttcaaatatg

SEQ ID NO: 21111 - DNA, 3003 bp, Unknown
  misc_feature (1)..( 3003): 2750-1469P.txt file - cDNA_ID_1839338; gDNA_ID_1620730; Annot_ID_49384
tagaatcacaacatcctcagtcaaatgaatgaaaaaatcgtgaggtggagttccttatcagttaaacatattgaaatcagaaacgaagagaaagttcgtaaatatattaatagaaaaatgaaacttaaatccagtttttactgtttacgagtaatatatgcaaaatatacagatagcataaaaaattacgtaccgcacagaatttggatacacgcatgatccataacctacacaataataaacaaaaatagagcgagttaaaacacaaacaatcttatacacaaagcttattgttagtaaaaagtaaaaataaaccgagaaaatgtatgcaacatgaataatgcaaaattctcaaaacgaaaaaaaaaaaaactgcctaactagaaacatcgtcaactattatgacagttttaccgagttaaccaatccggttaagccatgtttctgtaaaatacatactaggatcggttttggcgatagtggatgtgccagcgaagttacatgagccaggagccatggctgcacgttggaagtagctattgaaagcgtaagatgcgtgtgcctgaacggtgttagggagaaaacagagaccattgggttggattggagcacagtcagctccagcggcacatgcgtagtctagagccgcctgaagcgcttggctcgtaacatcgaaccgagcaacgcaccacatcgcagcggaggaacggaagagaagaaggaggaggaaggagagagtttggagacagagagccattgggaagtggtaagagagaaaggaaaggaaggagtgagagtgaagagtttgagtgtggagccttacctctctcactctcttttgcttttgctttgttttctcttttcttttcatttacattaattctttttgcgtttctttgttcttttttttgcttatgttgaatatgagctttccgtgttgattttaaaataaagcttaaataaaagatataaggactagttattatccgaaaatatttatgaaacaaatcaaagtaactagagtgaaaagcatgcaattatgtggaattacattttcataactagaaggattttttagcctctatatcgcgggtctatgataaatagtgcaattttacagctagatgaattgtttcctctatactgcatcgatatacaacattatcataagtgttccgcgaaaacattgttgtcaaaaagcacaaaaaataaataaattgagtacataactgggaaagggtcacacaacacaagcactcatcagtaacacatttaagatctgagatattacacttacacaataacatgtacgtctgttccgatgcatcaaactaaaatgtgcatctccgatacttattatgggatcctatcaagcttttactaccacggtctccaccatattctagaccggatttataccaattattaacttctaagccaccacaccaccactttaatcatatatatgcatatctacatcacaagaacattgtacacaaaagtattgagtaacttacatccactctggaaaaatattgattaccgctctaagtgaaaaattagtgttcaatttatatttaacctatgatgtcctattattagtactaagctggtgatgtattaatggatataaatggattattttctttatttgaatgtcgttgttgataggacaaatatctggcaatattgtatcaaattagaactgtaaaatagtatgatcaaagaaatacatagatatattaattcattgctctgctacaaagaaaatagcaatctaaatttagagtaaacatttaacgttctaaattagcaatgcattgcaagataaatagatatacgagtaataatattggagcagctcaaacgctcgtctctcgtagggtatctcaagaatgattgaaaacagcatgagagaaaaccagataagtttcacattcaagagactttgctagcccatttgagagactcatgcaccatttgtttctttttagtggtagcttttgttttagtactaaaatattagaattatatcattaagaaactcgagtatctcatcattgaggttgttcttagctaaggagaatgcattcctacaagtgacaaccacttatggcctaaggcctattctgcgattaattttataaacaattcttcacaatatctaagataatagggagcaaatagtgatgaagatagagaactagtttttgaagcaatgtgtgctatataatacaatacattaactattgaaaatatgagatatgggatatttcacaaaagctaaattacaactcattacattaatcaaaatctgtaggtacaacgtatcacatcatttgtgcgaactctagcatgttagttttagaaaataaataaagagaataaaatattttgtcatttttctcttttaaaatgggtcaaatttatgtttatggaagatataatctcattgttaaaaagagtaagaaatcctttaatataaaatggtcaaaaaaaatttcaatcttcaactaaaatctttatcttttaattaaataatggatatatatatatatatatatatatatgatttaccatattccccaaaagctaaatttcaattaagaagaaagaaaagactaaattatagctcatcacattaaatgaatttgtaatgtataatgtatcacaagattttgccagccctaaaatgttataaaatttcaggggtttctttgttctattcgaaaaaacatagtcattagctcctctgtcttgttatactactctcaccaaacgtaagttttgcttgtttcatttttctaagtttttgttgatatcaaactagatttgaaggattttataatatatgtgacgatctatggcatgtcgatataatctatgtgacatagaaaatactcatttggagggttttcttatgttcatgcaaatttttttatgtaaattgcatgctaattatttggataatttcgtttcaaaattaggtttttcttggaaatg

SEQ ID NO: 21112 - DNA, 3003 bp, Unknown; identical to SEQ ID NO: 21111
  misc_feature (1)..( 3003): 2750-1469P.txt file - cDNA_ID_1839338; gDNA_ID_2926158; Annot_ID_139586

SEQ ID NO: 21113 - DNA, 3000 bp, Unknown
  misc_feature (1)..( 3000): 2750-1469P.txt file - cDNA_ID_1839350; gDNA_ID_1620742; Annot_ID_49645
gtccatgtgaaagcccttctcttatctttccacaacttgtattaatattgtagtttagctttgccacttagtcaaacaacattactaacatcaacatccaccatttggtccttgatccaaatgtttccccttttgcccttatacgcccatttttgagttcttgcatctcatcttacatgataaattccgtttgaggacagaggattatggttattttaattttgtgtgtttgaaaatgtatgattacaacaaaaccatggtttccttcatttctttcaaaaccgacaccaagagaactttgttatgcatgtatgatgcatccaccaaatacgcaatgtgataagtatagctcaattttcttaagaagtataataatgtttgatttatttctaagtaaataagctagaaacggtcgacatctcataagaatccaagaagaaggaaaaaagacattctagcattgatggaggcaattgatttgaagttaattacatgtcgtaatagaaacaaaagtgtttaatatatacccatgccaccttaattagctgggccttcattgttgaactatttacatgatcttgattgatgtttaattaatattacaccagcaaacttcttgtcgcaagacccggtttgataccaccgagtatgatcttgtattcagttttggtcattcgagtaacaattattaaactataaacgaaaagaacaagacgagggcgggaaaatgccagaaagaatgaaaccatcaaagaatggtcgggacgaacaaaagtcacatggagggtatttcccaacatgctacaaacgtcgccgtcttgacaataactgtattgttcatgataatgatattttgctttcaaacataatctcagtctaatcttttttttttcatcgagttttcatgactcctaaaattaatcccccataatgaagaaagttctcttaatttggatggattttaagtttagagataaaaggatgtatccaaattagctagggctaatattttcagtttgtttttctcttcatttatttgttgcagattgaatcactattcgtttggaacaacagacggtacatgggatgagattcatataaacgtagagcataagtaaccataccttgttaatgctttaagctatttacgttcgaaatatcatttgcttgttgcataatattcgcctcatgcatgttagttttggattatcaacaaatgattttttttttcttgttcctataaaaaggcttcaacaaaattgatcctgttcaaaagatatttttgatttaagtatgcaaatatgtaacatatattaccaaataattagtcaatgaaacaggatcaatgtttgtaggagaattgtttgttgttttatgtcctctacaactcatacaccaaacaacacattattgcaatactttttatatttattttcttcattacgaattacaaaattagtaaaaaaaaagttcttatataaaacatgaagcttttttcgaatgtcaaatgcatgtagaggtaaaaaaaaagatacgaattaaatttttagcagggggagaggaattaatcaagtcacgtgctcgtctgcccaatttgcctgctctctccatttcctcttcacgtgctttcacattatttcccttaatgtctctctctacctctttctcttcatatttacttctgtgccactctttatttaccatggtttttttctttctctaaaacttgattatacaaaaatcatataatcacgtaatcggatcatatattcatcaattaacaaatgtactatctccatccactgtttaattaatacgaaattaaatatggtggttgtcatttcttacatcatgtaaacttaagtcaaatcattttggccccagaaactaatatattcaagattaaatctgattagcatcattgatactctgaacaagtcaaatgtcaaagagattattaaaacagcatcattaccaaaaacacaacatattatttcatttcttttgtcttaatcactttattaatatatataactgtaaatttggaactgttctaaggttcgccagttgggatatattccattgcctgtcagtttttttattttgtttcaatttcctttttttgtcgtatcatttggtaatggtgatgatgatacaacattttatttgaactttcaaaatcatatattataactttcttctgtgagatttaacacgacatccaaaaaaaaggaccgaatctttctgacctacactaagaaaactcaccaatgactatgactatttcttcaaatccaatttagatttttgctatcattatcgaaatagctaaaaatatttgggttattaaaaaataactttcatctaaccaaattaaatttccaatgggacgaataatgaacgcaaaaaatgtagtaaaaaacacacatttaattcagcaacttaaataaaatctgcaaaaaaaagtaaattaaatgaaatatacagatttcgaattatttcgattgtaaaagaaatagagtaaataaatgaaagagaatatttgaacaaactagttagagtttatctacttttattgttgaagaaaatattgcaataatgttctctttaagaccaaaaatatgaatactttcaacattattttccctttaattttttcccaaagtagacactaacgaacaatcatcaaagtatttttcacatatattactataatgttagaacattacattttttatttcgtcaagtagtgtatttatttattgcaatatctaaaagacattaacaaaagcaagattatgaaaatagtaacattatttaatttatttacacaaagtccctcttctttgtaagcatttaaaaacccaaatagcccaaaccgtctctacgcataatcggagaaatctctctgccgccatattcaaagcagtttccacacatttaatgtgaacacgttttctcactaccaacaaaaaaaaactcaaatcggaaaaaaaaatg

SEQ ID NO: 21114 - DNA, 3003 bp, Unknown
  misc_feature (1)..( 3003): 2750-1469P.txt file - cDNA_ID_1839354; gDNA_ID_1620745; Annot_ID_49710
tgaagttctcacttggggaactctatacattatttactcttaaaggcatcaacccttgatagttttggctttccctgggaatgaacctaccataatccactctcgaagacacagcacttttattaccttgatctagctgacataacttagaccacttaaatgacatgaaccccacaacaatcagagaaactcagacgattttaagcggctttccaagaagacaatggtggagtctcagagtttttgaacgtggtcaggatgctaatggatctttctcctttcacaaaacctggttgtgcaagggattcgagctcagacatctcttcgggagtaagtttcactgataaagctccaatgttctggttgaggttttcaatcttagtggttcctgggatggggcaaacatcatctccctggtgatgaacccatgcaagggctagttgtgcaggagtgcatcctttcttctcagacattgcagaaaccttctcaaagagaatcttgttgtggtctaagttttcctgttggaatcttggtagagtctgcgataagaaacagaattgaacagataaacagtgagttgattaccaacagttcatcaatcaaacaagtcatataaagcctgtgtacttgcctttctgacgtcattattgtctaggttctcaacaagcttgggtcctgaagcaaagaaacctcgtcccagaggactgtaagcaacaattccaatcccaagttccctgaagaaagagagagaagatgttacatatttaatagatagtgcatcaagaatgaggatgaaatgaaatctggttacctgcaggttggaattatatcttcttccacgtctctcgaccataaggaccattctatttgcagagcggttatcgggtgaacagcatgtgctcttctgatagttgaagctgaagcttcagacaaaccgatatactttattttaccttcttcaactagcttcttcagctctccaatctttgaaattgacagacaaaagagattgtcaagttcagctaaagttgctggctttcaatataggtcatgaagtgtgagctcagagtcaaacctaaaggagtctattcaaacgaaaaattctaagggagatgataagatcatttcaccagacaatggttcttcatgaataagctagtaatttcagaaagagtgacccaagcagaaaacatagttctgaaagctaaactcttcgactctatattagtcccaacatgtctctagccacatgtgtgaagctcactgagaagtgagaggaactatataacttccatttcatttgaaagttgcaaaaccatgaaggaagattgacaagaagagtgcttacagtgatttcgatagggacacgagtatcaattcgatgctgataatagagatcaatgcaggcaacatctactcgcattaaactagcctcacacgcagctcttacataagcaggatctcccttaaactctactttcccctctgcatacctgattccatatttggtcgcaagttccactttttctctcaccccatccttgagagcctgacaaaaatccaaactttcaacaaaaatccaaactttcaacatccaaatcatttatacagctctgaagctcagcgaatcaaggccagtgttcccatatcacaaggccagtgttcccatatctaaatcacgaactcaaatattaaaaaatatcaatatcaaaaggggaattatcaaaatcgaaccttgctgaggagaagctcgttggtctcaggaccgtagatatcggaggtgtcaaggaaagtgacgccggagtgaatggcgtggtggatgagagcgatagcttcggtttccggcttgggagtaccgtagaaagcagagagacccatgcaaccaagaccttgcgccgatacctcaaggccttggcttcctagcttaatccttctcactccgcaagcttccgccatgagtctctgtcagaagtcagaactatctctctctcttgacttgtctaggtgactcttatagagctgtgaatttaaatggagttggattggtgtgatggtgaagataaattcagtgtcaattttggatggctggtgcagttttttttttccctcttaacgaaaacaaaattgaatttgttaaccaaataaagtaatggaatcttcataagtcaaactcatttttgatgtagttaaccaaataatgtcttcactttctttctcaatcaattattaacttcttgtgagaaataaactttcctaataatttgttcacgtataaatgtttttttaggttgaaaatttgaagtacaattttctcttattagtttttgttttcaagatatatctttgaattaatattatataaaaacgcagcatgtagtagtataacattttgatcttgaaaataaaaaaatatcaatttcaaagtcttgaaaataaccttttttttttttggctatgagtcttgtgaagttaacttggtgaactctcgactcacgatgcatatcttaattgagcaacatgattcataattcatcttttcatgtctcttgccaacttccaatagagtgcattgacattatttttttaatacattatacatatatcatgcatgtttgtttctcatccatggagaatcatttttgaaatttttggatttttgaaattgcttaaaaagaaagaaaaaaactcaatttttattgtcatacaatgttttccaaaatatgtgtacatgttcttgcatatgagttaattagtgagggtttcctcaaaaagattgttgtatttttggaaaacaaagtttatttttggatattggttctgcattttacatctaatttgttttttaaatcataattttagaaaatctattactaaattaagaaatctatgaatggtttacttcattccgtaaaacactataaattgtcctaaactcatattcgctctcaagtcaaaactcttctattttcccctgtcttcatatccaacagagatctcttcatg

SEQ ID NO: 21115 - DNA, 3003 bp, Unknown
  misc_feature (1)..( 3003): 2750-1469P.txt file - cDNA_ID_1839377; gDNA_ID_1620761; Annot_ID_50004
gccacatcgtttcgctctcccatctaccatcccgcagaaaagcagctcgattggtattggattcaagattattatcccaagtaaaagaaagtgagtgtaccttttgaagttttcgagtttggatgcgtgtttctcgtaggcaaaattctaacttcagcaccttcttcttcagctcctgatcaattctcctttgattctccacctgatccagaagaacaaaggctttactacataaaaccaaaaataaatcacagaactaagagatgctaaagcatgacgtgttgttacctgatcttctaattccttggtcttaaacctccagtgagccgatataatcttcagttcatctctcagtcttgcaatttcatcatctttagccgtcaaaagtttgttgattctttcagaattctttggagtatcttcatttagcatgttccgcacctcagagttctccttggtcttgaccactgatacagcccgcataatgtcaccttcaactttcaaaagctcatctcttagctgcttctgtgaagattctctaactcgcagctcctttcttagattctctagctgctcaccaagtctagttacttggtcctcatgctctttcaaagaaccggtcctctcatgcaattgtttcgaaagcactctacaatgagaatgtgctgattcagctgacaaagcacttgcctctgcagttgcatgtgttgctgctagctgtgatttgatatcagccaattccttcacaaactgcacaataggagaacagaaaagttgataagttacgtcggtaaaggacgtgagatctcctgagttttggcagatttaagaccaaagtcaggttcaaaagacaatggaggaccagcaaagtttgaagaggcagacataagaattaagaaggctgatgagaaacaatcaatgaagttgatgctctaacagatctatgtgttcaagcagaatcaagcaaaactagagaaactggacaatcaagaaatgtgaaagaaaacaatcctaaccttctcagtagcaacatccgaagcacgaatctgctcaactttctcgtttagttccttggcaagttcatgcatttcatcttccattctcttaactcttgtttctgcctcctgctcatattgaaaacagctcaacaaaagtctcaacatccaaaccaaaagactaaatcacaaaaaaaagtaatagctgataaattcagaactttgctaacctgcctggacatagcttcttttgaacacgaccgctcctgttccgcaagacgagtcctcgcttctttcaactcagtggccaaagacaccacatttctcctgaaactctgcttcttctcactcaaatccttcaacaaaggatcatcctctcttagactaacagaagttggcattttctgaaactggaatatcaccgctctgttctttaatctagacagataacttctccagaaaaccccaaaattcaaaaacgtaaaaggaagcagctattcatgttcttcacgtgaccctgtacataaacgaatgaaacacataaatgtccaatctcagtatagttaaagaatgtgaaatcattcaaatatgtccacaagaattaaatcctctaaatcttgtttgtaacaatcaatttcttataaataacagccattatcgaggtagggaatacgcaaaagagacaaagaaacttgtgtcgtccctttcacatcaataaataaactctgataaagacgaatactttacaagtatacagccaaaaaaacgtgacctttttaaaaattcaaaatctcttacaggatttttttaattttcaaaccctaaaaatccaaactttctcgcgacccaccagtctccatcgaacggttggaaatattaggtttctgggtttggtaggaagaagaatcaatttgcagatttgttcgagttcgtgatttctccagaggaggaaagtgacagtgaaaatgaaacctggaggatggggtccctatccgttaggttcggatgagagatcatttaaggaaagtgactaaaatatttagcttcggagttaccgagcctagggcttcgaattttgtgtcatttaaagtaacgaatccgtagctaacctacgcatctggcgcagttagctaacttgctaggtttgactgtagcgcggcaaaatctattcgttcaaagttcaaactatagaaagccacgtgtgcatagtgtaaacgtagtcggaccacttttgcagccatatcaaaccgttggagatccgatcgaatacaactacgaaagatattaaaaagcttttgcatgagtaatgtcccgatttgtgtcgtgttgataagtaagttatctttttcccttcatcctttcctcatactcatattgaatctataaacagaacaactttttttaattattgatggacttttattttaggaatgaagagagttagatgatgcatgaaatggcatacaaagtgtgtgtggagaaagtgaagagtttgggaattgagttcactactcctatagaagaaaccctcagagacactattgttagccttatggaggattgtcttcttatatgatcctcatcatatataggcatatagcttcattttctggttgtttctattttttaactataattttgtatggaggatgtctaggctttacaatatgtataattaaaaatatttataaattttaaataatatctataaactcagaaaaggagaaatattctgaacaatgaattacggcaacgtgatttgttgaaaaacttaacatgtggatgttttttttttctttttgcttatgcatataacatgtaggccttatttcttgtttacaaatatcttctaaaactgaagggccagttttaaacaaggcccatattctaattgagccgccctaatttaccaaaccatttactaattgaacactcccatgcgtttgaagagttgattcttcatttaagacaattattttcagataaagagaggtcaaaggagattatg

SEQ ID NO: 21116 - DNA, 3003 bp, Unknown; identical to SEQ ID NO: 21115
  misc_feature (1)..( 3003): 2750-1469P.txt file - cDNA_ID_1839377; gDNA_ID_1620761; Annot_ID_167148

SEQ ID NO: 21117 - DNA, 3000 bp, Unknown
  misc_feature (1)..( 3000): 2750-1469P.txt file - cDNA_ID_1839795; gDNA_ID_2926128; Annot_ID_138689
atgctttgaaaattgtattaacgtaaatttggacgcttgagatacatgtaggttagggctagccttacatcagtaggacaggcgttttagttccttcaaccctagataatattaaaagttccaattcttaaaaaaactttaatatgcagcccaatagaatcctatagcgtcagtgaccacttcatttggtgtcaaccaattaaaaactgatcagttatagaaatattaaactagtgataatgcgcattttgaatgtaagacaagcatacatataaaagttttatgagttatttaaattattcaattttggtttaagattttaaatgatgtggacatatataagaaggcaaaaccatatactgtactgtattatataatccattcttcgtaacatttggtctgttcttggctcggaaattgtctctgaccagagcagtgttctacatgattatgcaatgtctcggagccatctgtggtgccatctttaagactagtgaatatcggcgcatctttaagcctagtgaatttcggcccatcttcaagactagtatggaggcctgttaagggtcttctaatacagctcaacatgcctttttgtgtaagcctagtgaatttctaatacactttgtctctggtcaaacactttcatgcgttttttttataaatatgtttaatgagcataaatgtgcggctcaaagcggtgcaactcccaacggtcaaataaacaaattaagctcaactgctcaagtagtgagaacaagatcaacctaacttgcacaacgaagaatttttgttgttgttgtggtcatatatatttttacactaactaattattttgacaaaagtaatcaatttgtgacattctacaaaaaaaaatataaaaataatcgaatataatttttttattggtcaaaatatcgattgcaaaatacaaaaatcaaggcataacaagttaatctataaattatagtcgtgttttaaaattaagtcgtgtgttttgcggttttgtcctcgattttgttccttcctttgtgtcgaattagtcctacattttatagagaggtcttcttgaccctaatccacgtgggattttgactcgagccaccgcctctattgaaatgataagatcgtttctagaatgaggttacggcccgtattggtccggttcttgtcggttttggctaacactgatctttcataaagctttctagaatatcctttattattttccctattttgatgggttaagaaatttaacagagtttattcaatatcatctccaagatttaaattattcccaacagtaatgcaattaaaatctaatatcaactatatattggtttagtaactaaaccaatatatagttgatatctaagctacattaaatctaaaacttttctaacaacttcacttcaactaaataattaaacccaaatctaagacaaagtctctaaaaagattatagacaattcgactgtgtcaacaatatcaccacatgtatagatgcatataatcattttcatataatgaattcgacatgtggccctacactttacgctcttagtggatatttcatagttaatgacatatacatatatatatatatatatcatattcattcacatagatatagattatagatataacccactgaattaatattacggtcttcaatataggtgcatttaaaacataacgttccctctcttgtcttcttatttttgctctctgttctttagaactgccattaacgagagtgagagagagagacacacacacagcgagtgaaaatgtctccggagaagaagagtcaaaacttccctccaataacggaatgcagagacggagagtacgattcgatagccgccgatcttgacgggactctgcttctctcaagaagctccttcccttacttcatgctcgtcgctgttgaagctggaagccttttacgtggactaatcctccttctctcgttaccattcgtcattatctcttacctattcgtatccgaatctcttggtatccagatcctcatcttcatctcattcgctggtctcaaaatccgcgatatcgaacttgtctctcgcgcagttcttccacggtacgagatctaacatagagtgttttcttgttagtagatcactttagtttttttctgatgaactttgtttaggttttacgcggcggatgtgaggaaagacagttttgaggtgtttgataagtgtaagagaaaagtggtagtgacggcgaatccgattgtgatggtggaggcgtttgtgaaggattatcttggaggtgataaagttttgggaacagagattgaagttaaccctaaaaccaatagagccactggatttgtgaagaagcctggtgttcttgttggtgatcttaagaggttagccattttaaaagagtttggtaacgaatcacctgatctcggcctcggtgatcgaacctctgatcatgatttcatgtctctctgcaaggtactgttccaatctttttatccaatcttggtcgattatagggtaaagttaagttgaattattgagtgttgattggtttagtgtaagatgtgttttggaggtaacttgagaatctaagcaaacgtttgatttgcttgttgattaagctagataatctaatttaacttgttgactggtttagtgtcattatgtctacgcgtgaatcttataaaaataatgaaatttttgatttggaagcaattagtaaggttcataaatgtatccaaccaatcacttcacgtgaccctctggattatttttctatccccaaccaccttactagttccaccaacattttgggctgtccatttaatgaacacatacttgaaatatcataaacaatcttctgttgtttaatgcttagttttttgaatcttgattacacaatttagagatatgttacattttcctagtacttttagttataagtttgaaatgaataacgtttttggtattataacagaaaggttacatg

SEQ ID NO: 21118 - DNA, 3003 bp, Unknown
  misc_feature (1)..( 3003): 2750-1469P.txt file - cDNA_ID_1839795; gDNA_ID_1621157; Annot_ID_57047
acaatgctttgaaaattgtattaacgtaaatttggacgcttgagatacatgtaggttagggctagccttacatcagtaggacaggcgttttagttccttcaaccctagataatattaaaagttccaattcttaaaaaaactttaatatgcagcccaatagaatcctatagcgtcagtgaccacttcatttggtgtcaaccaattaaaaactgatcagttatagaaatattaaactagtgataatgcgcattttgaatgtaagacaagcatacatataaaagttttatgagttatttaaattattcaattttggtttaagattttaaatgatgtggacatatataagaaggcaaaaccatatactgtactgtattatataatccattcttcgtaacatttggtctgttcttggctcggaaattgtctctgaccagagcagtgttctacatgattatgcaatgtctcggagccatctgtggtgccatctttaagactagtgaatatcggcgcatctttaagcctagtgaatttcggcccatcttcaagactagtatggaggcctgttaagggtcttctaatacagctcaacatgcctttttgtgtaagcctagtgaatttctaatacactttgtctctggtcaaacactttcatgcgttttttttataaatatgtttaatgagcataaatgtgcggctcaaagcggtgcaactcccaacggtcaaataaacaaattaagctcaactgctcaagtagtgagaacaagatcaacctaacttgcacaacgaagaatttttgttgttgttgtggtcatatatatttttacactaactaattattttgacaaaagtaatcaatttgtgacattctacaaaaaaaaatataaaaataatcgaatataatttttttattggtcaaaatatcgattgcaaaatacaaaaatcaaggcataacaagttaatctataaattatagtcgtgttttaaaattaagtcgtgtgttttgcggttttgtcctcgattttgttccttcctttgtgtcgaattagtcctacattttatagagaggtcttcttgaccctaatccacgtgggattttgactcgagccaccgcctctattgaaatgataagatcgtttctagaatgaggttacggcccgtattggtccggttcttgtcggttttggctaacactgatctttcataaagctttctagaatatcctttattattttccctattttgatgggttaagaaatttaacagagtttattcaatatcatctccaagatttaaattattcccaacagtaatgcaattaaaatctaatatcaactatatattggtttagtaactaaaccaatatatagttgatatctaagctacattaaatctaaaacttttctaacaacttcacttcaactaaataattaaacccaaatctaagacaaagtctctaaaaagattatagacaattcgactgtgtcaacaatatcaccacatgtatagatgcatataatcattttcatataatgaattcgacatgtggccctacactttacgctcttagtggatatttcatagttaatgacatatacatatatatatatatatatcatattcattcacatagatatagattatagatataacccactgaattaatattacggtcttcaatataggtgcatttaaaacataacgttccctctcttgtcttcttatttttgctctctgttctttagaactgccattaacgagagtgagagagagagacacacacacagcgagtgaaaatgtctccggagaagaagagtcaaaacttccctccaataacggaatgcagagacggagagtacgattcgatagccgccgatcttgacgggactctgcttctctcaagaagctccttcccttacttcatgctcgtcgctgttgaagctggaagccttttacgtggactaatcctccttctctcgttaccattcgtcattatctcttacctattcgtatccgaatctcttggtatccagatcctcatcttcatctcattcgctggtctcaaaatccgcgatatcgaacttgtctctcgcgcagttcttccacggtacgagatctaacatagagtgttttcttgttagtagatcactttagtttttttctgatgaactttgtttaggttttacgcggcggatgtgaggaaagacagttttgaggtgtttgataagtgtaagagaaaagtggtagtgacggcgaatccgattgtgatggtggaggcgtttgtgaaggattatcttggaggtgataaagttttgggaacagagattgaagttaaccctaaaaccaatagagccactggatttgtgaagaagcctggtgttcttgttggtgatcttaagaggttagccattttaaaagagtttggtaacgaatcacctgatctcggcctcggtgatcgaacctctgatcatgatttcatgtctctctgcaaggtactgttccaatctttttatccaatcttggtcgattatagggtaaagttaagttgaattattgagtgttgattggtttagtgtaagatgtgttttggaggtaacttgagaatctaagcaaacgtttgatttgcttgttgattaagctagataatctaatttaacttgttgactggtttagtgtcattatgtctacgcgtgaatcttataaaaataatgaaatttttgatttggaagcaattagtaaggttcataaatgtatccaaccaatcacttcacgtgaccctctggattatttttctatccccaaccaccttactagttccaccaacattttgggctgtccatttaatgaacacatacttgaaatatcataaacaatcttctgttgtttaatgcttagttttttgaatcttgattacacaatttagagatatgttacattttcctagtacttttagttataagtttgaaatgaataacgtttttggtattataacagaaaggttacatg

SEQ ID NO: 21119 - DNA, 3003 bp, Unknown
  misc_feature (1)..( 3003): 2750-1469P.txt file - cDNA_ID_1839846; gDNA_ID_1620761; Annot_ID_50012
gatacatcaacgcttcatttacaaaatagacaccaaccagtctcaacaatcttttagtttccatcatttattggttaaaaacaaaaaaatgtactcacgcgtcgaggaagaagccagcatcgctcatgcattttactgtggtggtaggaggaaacaagttattgaaatcatcgcatcgtaaaatggcagaaagacccccagaagaacatccgctgagcaaagccttaacgtaataatattattagttattacattaacaacttaaatttaacctgggaaccaagattcaaatgcaaagcaatattatatgaaatatatatatgtgtacctgttttgcctgacgcattcccttttccatcaaatcttccatgacagctaaaaatatacgctttcctctatactgaagttgtgccgcctaattgcataaacaacatatacatatgaatcccaagttaattactagtgaaatatataatgatcatcttcatggttttaattaactaaccttgttttcgctgtcaccatcaaaggatgcaccatcacaataccggacttttactttgttccaattgtaaaagtctgccaataatgatttgaaatcaaagaagaggagaatattccttaaccatttcaccaacacatcacatttctgttctcaataagggatcttgagaaaaacctggattttcagcggctttattgcttagtaatcctaaaaatgccaactctttctccattaaggtagatgatccataaccactccctttacggctctgacagttttgtatgctgtcacaccatgcacctccctttcaacaaaattaattacccttatttatatggttatggcgataattaagtatctctatagtttatatacaaagagcttgctatatcttaagtaagaacctgcaactgaatgatccagttgtttgctcctgaaccatacccgcgacacaaatgatatccaggcactgacccatccagacacactgccacaaaaatttaattatttctccatgcgtcatgaaaatgacaatcaaaaactttgtaataatgatgaaaaataatgacacggtacaaacgaaatttcgtaaaaaaaacttgaaaactaacgtttgaaacattggagatctaacatgcatatcagaaatctaaatctcaatcgaaatgaatggtaagaaaattgttacccgctcctttagcagcagcggcttggacgagcgtgagtcctaccatcaggacatttgcatttgttccattggactcgttgaaggttttcatttccccatgtgcaagaatgctgaagagaatgagtcctgcgagactactccaaccccaatacaaaagcgttttcatttctcctcttaatgaaatttgaatgaaatgattatggagacgtactagagttgtcagtatatacgcagccaagaaaataaagcatccgtcttggtcttttgtagtatgcatatgtttttcttatatagaaactcaattataattgaagaccagagagtgagagagagagaattgcattaaagaccagtcatagtcataagagagatttattaagatattttctttccttaattagaaaaagtacatacatcatggacatgattcatgatcttgccatttgtaaatcacaagatcgtactgaagaatgtgactgatagaccacaactttggggcctaaacctccattacgctccattgatcattaggttaagaaattaagattttcacgaaactgccaccttgtatctttcgttgtatattttcatgtatatatttaaggatgatttgacactcatgaagttgtcacttcatttcatcaataggttaggtttaaaactagttttagaacaagtcagttttgtgattgggcttttatttaagtggtgcaagattatattaatagggtttattaatttcaaattcacactattactcatataatagtcagaagtatagagttcattatataattccaattttcttttcaccaaaatctgcagaacagaaagtctcaggaatcttcaaacattttgaaaaaatggtcctgaaaagtggaaagaaatttcagattttgcttgcaagagttcaaaaagctactagacaaagatttcatacaaaaaagtgtggaaaggtcttcaataattgtgattaagctttcaattaccgtttaaagacttgtaaataaaatttaatcaatcttttcactaataaatttaaccaattctattttctctacatcatgcactagtaaaaaaaaatttgcctcgaaacaaaaaaaaacacacgatgccgtataggaaggaagcaataaagaattcaaaacgatttgttgttccgtcttcaatgcattacgcgtcgtattagatgaggcttttaacactaaaaagcccaaaccaacggtatcgggtattatcacctaaacccaacccattaaagacaacgcgtagcttcacgcgcttcacgattcgcgtgagaagaactaaccctgaaacgcggacgttgcagattaacggtgaggcatgaacgagcgtgttaatatataatgattcttctctcacgatgatcaaaatacagaagccaacaagtaaaattagtttatgcagataagacaacatttattacctgatacatactttattaggtgataataattgataattgttttttataagccactaataattaaataaaaataatatcagtaccgtgtaaaagcaaaactagtgtaaacataaattttcaattggcaaagctctgatccatccgttttagtaattcgttgacctttgacatttcacttagacagatgtgtgcaagaaagaaaaacagcatgttgcttgctttttccctcaacgagaaaagtcaccctctcttcaattcttcaattctcctccctttataaaccataattcattaattctcttctctctcaacaactacttgtttagagagagtcccaccaccaccactaccacaatcccaatg

SEQ ID NO: 21120 - DNA, 3003 bp, Unknown; identical to SEQ ID NO: 21119
  misc_feature (1)..( 3003): 2750-1469P.txt file - cDNA_ID_1839846; gDNA_ID_1620761; Annot_ID_167161

SEQ ID NO: 21121 - DNA, 3003 bp, Unknown
  misc_feature (1)..( 3003): 2750-1469P.txt file - cDNA_ID_1839862; gDNA_ID_1971820; Annot_ID_58307
aaatagagaatatcaccaagcactcttagttttctctttaaccaatatccgataaatcgaggtttaatacaatgctttctgggatataacagaaacgtacgtttggtcatatccatcaggttgaaacactggatcccatccgaaatcagttggtcctctggctggaactatcttaccctaccacatcaatcacaagggacaaaagaatcaaactttgacaataaacaaacagagaaagaacaaaactaataaaagagtggttacaatgttgaacataccggagttttccccaaaaatgtaagaggttcagcacctggaccacgcgagaaagagaatgcgcacaatgcataagctgatttatcttcataggccatcagtaagttgttcagacctgtacatgagtcagaccaaacattgggtgttaccagtgtaagagataaatgaaacaaatgctgtagtgagagaaacaagtgctattacaaaccttcgtgaccaagcttctctagaaaccactttctgcaaatatagaaagaagattaaaagtgctacaaagaagaactctagagataacaacatagctccaatacagttagtcctaggctaattagatctaatatcgaccagaagtagattccaaaaaaaatatagaggccacttctacaaatcagtccagtaataaattatgaatcagaacatacaataagatgactccatttggctactcactcacaccacttagcaaccgcctagaagaactaagaacaggtattgatccaacccaaccagacaattttccaacacattaccactcaagaaagaggtcaacacaacaaagtggaactggagaaactctatccttcaaatgaagtttgacaagcacagaatcaggagaagaatgaagaaacaaaacttacatgtatggccctgaaaaatccaacataaaacgaaatcaacaaaaacttaaacactgtgtaaccatttgctgtacatggagtaaatgaaaaaaactagaatctaaaagccaatcataccaggaagccctttcaaagcattgaaacagagacatgtatcttccacaagcactggtccatccaccttctcatttacaatcaaaacactctttatatcagtttctactatccttagtcactaacttactattactagtccgtccacattcaaaagaaggaaacaaaaatgcaacagtacataagaagcaagcttacacataaacacaaatatgatgacttttgtaatcaattcaagtaatatatctgcagattagaaaaagctaaaagcttgtgaacctgaagagcagccaaacgagccttctctttggaaatatcctcaggctcaccttggagctcaggcactgcaaggaaatacacaatgagcctagtgaaaatgagaaacaaagtaatgtcaagagagataaatcgaaaagggtacgccgtacgcacaatcgagtttgagagacttgaaaggaatggaatttccgatgatagctttgacttcttcgagcttcttagcatttccagtcacaaacgtcaccggccgtggcaaaaccaccgctgctttcgccgccgccgccgccattgtctgtgtctcagtctcagatagcgaaagcaaagtcattttgttaatttttctttgcaaaaaatgggcttaagtccattttaatttaggcccattgaaacttatactcgttcgtccaaagtaaaattacgagtaaaccgatcattggtttaagtaaacccatttttcattcaattagggtccgcagcgattttgtataatcatgactgctaagcgttagccggacggtaaaagagggtctagcgcctagtaaaaaaattataattatataaaaattaatcgaagactagttttatgattatttaatgttttgaaaatatatttatctattataactaagaaatttatataatacttttttaaaaaattgtaattaaatatataaaaataagattttaggttaaatttataattattatgcaaattacgaacataagttgaacattttagattttatatgcaggaaaatataggcatttttagataaatgtttatatacataaggggaaagaaagtacatgtagtaattaaaaagtacataattagtttgcttgtctcaacttttcacatatccttttctagtaatgagaaaatcacttataacaattttttttctttcacaaaatacataaaactaattagctaatttaatttgttttatattgtcttccatgtagcaaaatgacaatgtcagattgaactacacagtgtcgatgcaagaactctctaatggtgcatgatttaatgaggaaaacaatcagacagtagaacctgtacgacaaccagactctcgtacactaccgcttctggccctaggaccaaaaaatatgcaagattctagttcatgtgttacttttacttgtcctcaatatctacttgagctttcgttctaaactacactatgtttgattgttttctaaaaactatagttttcttaagttttctaaaaagaccattgaaaaataatttcacattagtccatagaaaaatgcgtccatggaatattaaactgctgaccttatacacacttaagagattctctaccgttaagctacgataataatttaataatattcgtaacaaagtatatttatatactaacaaatatcactatttaagtaattaaaaacttatgcaataaattaaaaataacgaaattaaatttaaaaagttggctatttttttttacattattccccttccattttacaacattttgattttgtattgttttttaatttttattttaatcatacaaatgaaaaacaacgccctgaccaaagaagacccagctgtaccgggacaagattgcacatttggttcaactttaacctctccgtctccgagtagagaaataaagaaagagagagagactcatcaaaaacatttccaaaatcaaaatccatg

SEQ ID NO: 21122 - DNA, 3003 bp, Unknown; identical to SEQ ID NO: 21121
  misc_feature (1)..( 3003): 2750-1469P.txt file - cDNA_ID_1839862; gDNA_ID_1971820; Annot_ID_176124

SEQ ID NO: 21123 - DNA, 3003 bp, Unknown; identical to SEQ ID NO: 21121
  misc_feature (1)..( 3003): 2750-1469P.txt file - cDNA_ID_1839862; gDNA_ID_2926158; Annot_ID_139597

SEQ ID NO: 21124 - DNA, 3003 bp, Unknown; identical to SEQ ID NO: 21121
  misc_feature (1)..( 3003): 2750-1469P.txt file - cDNA_ID_1839862; gDNA_ID_2926158; Annot_ID_198553

SEQ ID NO: 21125 - DNA, 3003 bp, Unknown
  misc_feature (1)..( 3003): 2750-1469P.txt file - cDNA_ID_1840058; gDNA_ID_1620738; Annot_ID_49513
ttttttttttttgggggtatcgatattgatcttatgacaagtttttgtggtgtgtactaattaacgtatgagttatttgcttttatataggagttgaaacagaaaccttgaggagaccaaataaagttgatgtggggtccaaaataaaaggagttaggatttgatgaaacaagtgaaaagtaacaagcgaaccaaggaaaaaatctccatccaaaacaatatttcaaaacgtacttttgttacgattgaattaccatttgggaagggaatttctaattaaaaaaaaaaaaaaaaaattaagatggttgtgttttgctagcatcaatctcccttgtattaaacatatcgtatccgaatttggtagattaagatgaataaattggtcttactccaatagtttcgcattgatttccgtttcagtattaaaatccattgggatttattggtggaaacgggaaaatcatgtgtattttatttgaacccaaggctatttctaagcaacttcttatgaaaaatgttgaccttaaactacttagtcatgcaaaaaaaaaaagaaggttggggatgtggagaatattatttgattgaattcaaataaaaaggaagaaagttatgagataaaatgtatcagattattcaaaagaatagaccaatttgcaacattgtaatttggtttaataaaacatttggtatgttgtagtctgcacatgtataaacgtacgtcctccacataattccaaaatttgactggcgttaagaaatatctaatctagtcattgataaactactactgaatattcatttgagtgttgaggaatttgatttcaaaatttccgtcttacgaaaaataaattttttgtttgtataaccacaacaattgttagtagatcatatatgaattgtaatgaaaaattatattagtgactagtgagagttagttatttatatcttgatttttttttgtagttggtgggtttggactctttggtcaagtcaatcacatgctctacgtgattttacttgcagttcacgccggaaactctcacgcgtcgaccacgtgactagacctagttcataatttttatcgtctgaatgtcaaaaactcaaatcctcctttttataaccgttttctttgaaaacaaggtattttcttaatcttgtttcatgtcttaagactaaagatattaaaatctgattttggctctacttatactaatgtcgtattacaataactaaagtctcaaacaatattctttaagcacgcattgctggaaaaattaattacaggggggacataagatctcaataatatagactgaagatatcaacttttggctatttggagtcgttacatctacactttcaaacaaaaccaacgaacccattgttttttgggatcctacgaatcccttgtgtaaacaataattaaagacagtcctaaactaatattctcttatcaagtttggaaacattgtagctttgtgaatatattattttgtctaagaagaactttttgtttgtaaatagtttttttttttggatgtgtttctcatgaaatgcaggtaagaaacatctaatgaattagaaatagattatgaataaaagaaaataatttgtaaaagaaacaccgaacaaggagttcgtattcgtatactaattggcccgccaactaccaacaccgacatatgtgctttcggcagttttgatatcattccaaaatttcaattattatttatcaaatttattttcttggtaaaagtttaattaatttcaattatttgaatgtcttaattcactgattacaaattatatatgtaatatatacataacaatttcgttcgtggagtgttattatactccttaagcgaatctgtatattttaaataaaattttgatttatgcacacgtacatgttcaattgaaacgttttccctaactatagatgccaataaataataagttgatttttaaaatgtacaaaacaaaaggtaccgttttgtaaaattttgcaaccaaaaagtacaatcggccgttgaaaatcgtggaaccaaacactaattaaagagaagtgtgaatataatctagtgtttgcggatttatattataaaatttgtgtatcactaaaatgtcaaagcatgctttgactggtcaataagtcaaattaactaacaaaccatgcgaggcgtaggtttgacttcttaacataaatgctgactcagtttttccattccgcagctgtcgactaattggacacgcttcttccaatccctttccactaatcatccatcaacacgtgacatgcctacagtgcacgacttcacagtgatcatgtcaaagttttgtttttaagagaagaagattcacgacttcacagtgatcatagtccagttacaaatttgaatgggcttatggcctgtggcccatttaagtttgaccttaatatccatcagaaacccataccaatacgggtcataagtgcattgtccatatagtgtaccgcaatgcatgggagtactactacattccaccgacgtgcatatggggggacatggtcggtccattaatcccttgcgcatcttattccttacgcgaatacttttccctcttttagttttgtataatactttccatttttttggtattaaatttatcgtgtgactatctaaaaaggtatttaattatctagtttagctataactgcaaacaaaatatctattttcatgaatgatatatttttgaaataaaatattgttgtcatgtaacgaaaaaatcaaaaatcaagcagaagacacgtataacccacgctttcactctcactcgtggaaaaccctcacacgtacacaaaccattataaaatttaatccatttacatcgaccgacttcataagaacatcgtaatcccatccgtttatatatatattccaagttaaacttcatatcatacacacaaacctaaaacaccgaaacaaaaacaaagagatttaaacaagaagagttattatg

SEQ ID NO: 21126 - DNA, 3003 bp, Unknown; identical to SEQ ID NO: 21125
  misc_feature (1)..( 3003): 2750-1469P.txt file - cDNA_ID_1840058; gDNA_ID_1620738; Annot_ID_166308

SEQ ID NO: 21127 - DNA, 3003 bp, Unknown
  misc_feature (1)..( 3003): 2750-1469P.txt file - cDNA_ID_1840079; gDNA_ID_1971816; Annot_ID_58229
acgatctaaagttaagttaaatgaaatgaagagatatgatacaaaccagtggagatattctcgttggtgagggttgcttggactcggcacatctggatccaccataacctttattaaacccatcaacaaccgtataagagagaagatcgattatgaatatattaaagcaatcaagaaattaaatcatgagtttgattttttttttttaactcttgaaaagtgataacacacattaagacgaagaagttaaccaaaagttaatagaaaaagaagtaaagacgaagaagcttaaattagaaaaaggtaatagtaacattttccattaatataagggtatctaaaaatactggctttactattcagattcaaaagtcgttaaaataagtgtcaattaagatatttatgcttttctaaaggtatgtatcctagaataaaaaaactaaaataaaaataaaagcgaaacaaaatcaagttaaccgtctcttgaaaacgtaatatatataatcgagaaagattcaaaattgatttaaaataataatcaaaccaataacagttatgcatgcaagaagttagaggaaacgcagcaggtatatagatgaggctacgaaagaaaagaatgatcaaatctagttacgcttaaatttggatatatctaaggtttcttcgtcaatatatggagcttacgaaaacgaaagagtgagctacgaggaactaaatcaatgaagataagaggaatgaaggagagaagatcaccaaggtgtagaaatttctgaagtcgtctcctccaatctccactattggtttgttcagaacttgagaaggccttagatccaagccattagtaacctctctatggccataagtgaccttaagagagaccaacctcgtgaaaggatcaagaacatctccaacaacactgccgaccacaagaggatctctacgacttaaagacatatttatcttggatctcaagtatctcaatcaaatgttttgcttcttaccttatgaacccttacttgctattctttatataacgttttgggaattgcaataattagctatttagctttattctctccaatgaaatcattaccagggtcttttcgtgtatagtttcgagaatctacaactcgttcaacgtacgtatatcacttataattcatgttttttttttctttccttttttctaaatttatagtattcttattccaaaacccaccagtataaaacagaaataatcatattccaaattatacatcatccacttgtttcttgctagccactagtatgtaatttattctgacttatcattgtaacttcatgaactatttaaaataatgtcacaagcatataatatgctgcatatttgcgtacgtcacgcattttgcgtcacatgtcactcatttaaatagttaaggacactacattacaccgattatgtatgatgttaatgcattttagaataactccttcaacctaaaccatcatataaaagtatatatgctccagataaattgacgccataattgttcacatatctggttggtgtgtacatacgtactagactcttttttttcttttcttaatgtagtactaaacttaattaataccatcaaaaatatcaatttaacaaaacaaaccagtaaaacttttaaaacaatggagtaaatcaaataaaacaagtaaattaacaaatagacacaaggtaacagaagtataataacgacagaaaagtgaacaattggccaaaaaattcgttttcaaacgtgatttcaaaattgtctccaaatcttaaatgttgataaagtaatttttttaaaattcattatacctttcaaaaacaagtgtattacctaaaagctcaaccgtgtattcttacactccaaacaaatttagttccccaagtttggaagacaaaaatttctaagaaatttctgacaaaacacatgagaaataaaccgataaagacttctaaaaactattgcagaccagtttcatttgctgaccacaaaaagtcatgagaatacaattagctcagtgattcttgatatttctggtacctaacaaaaagaaaagtgtgtgaggttagatggctatgatttttgctctccaatttattgtccatttccccaatttgtaatatgaaatgcgcaaattactcttcttccgatatgaataagcaaacgaaaacatacgtgggacgttatgttcagaacatttgattaaagtttatatgcgattttcatttatttattatgaattttttgtttggcagcatgtacgatttttcatttaacacacaaatattatagaattttcattggttcaaaggggtagacaaaaaataatttaatattattacaccatttgcagaaaattagaaaatatatttttacccataattaattgatctatggacgtatgcttggcataaaaattcatatttaattagcagaagccaatcgctgcgtttgtatatacgcgtttatgaccgagaaaaaaacccttacgcgtcatgtaaaaaaaaaagaagcgtaaattacgaaaaacagagagataaatccgggcattgagattttggagatagagagagagaaaaatcgaaatctattgtctatctcctcaatttggattggattttctgcatatcatcgctctagctttcgcgggttttggattcgattccttacccttctccaatcggtaagaacaagctccaaagtttgttcctttttttcaattttcgccaattctgtaatctcatcattgtccttgtttgtttgtttgattcaacacacaattcttgttttgatttggatgcagaagtttttggctttgaattggatttgggtttcgttccaaaatcagctctttttgttaatcaggtgagtttttaggtatttgaatctccaattgcttccttgcaatgactaagtattgtgaaatgtttagggtttcatctgtgtgggtcttgttttgaagcaatttgtgtgtgtttggatg

SEQ ID NO: 21128 - DNA, 3003 bp, Unknown; identical to SEQ ID NO: 21127
  misc_feature (1)..( 3003): 2750-1469P.txt file - cDNA_ID_1840079; gDNA_ID_2926176; Annot_ID_140316

SEQ ID NO: 21129 - DNA, 3000 bp, Unknown
  misc_feature (1)..( 3000): 2750-1469P.txt file - cDNA_ID_1840186; gDNA_ID_1621169; Annot_ID_57228
ccggcttgtgtttgggtccaataataccaatttgtgatcgttggctggccaagtcgtcgatcttgaaattcttgcttcacttcactgtagtcatgttggcggtatcatcacagttctttccttatagcaaagatgcaccaaagagagttgtactccaacacacattcatctctactggtagcgttttctcacacgatatggaactgttttcgcctttcggagtaatcttcgtctgctgaaatgaagtaaatgtttaatgtgcctgttgcaggtggaaatgaaatcacaggctcaagttatgatttagctgtcattgattcaaattctatggagttcatttttaagcatgctccggaggtggcaaaggaacttcatgttggcccttctttttcattgggaaacgctgaagcgtctcctcaagaagcttggatggtacgttcattagattcgtttctatgtacatgctattggtaagatagcaagtgttttcagttttgaagtaaagaattgtttggtatctgcaggcacttttccctatttcatgtgtattaacaacaaacgggaggttccctgctaaagccaacaatattttagaacgatatagccaattcccactcctacaagcgcataaaccgcaaacaacatttgaaaatggaactcgcagagttcatctggagctctctctggggttagttggactccataaagaacttctattggtcttgttggttattaactattccatttgcaggtcgttggaggagatttgggtcacggttttgaacataaccggaccgttatcagggtggtcctttgccgatggcaaacctccaggtgacacacacagaacctctttttcgttctcttaaagcatttactaaaaaccgtaaaaccaaaatgactaatcgttgttgcagcacctgaactcccaccgggtggtcctccctcgtacatattgagactgagtggcaacagcgatgagaagtggaacttctggttagaggcaagtagtgaagaagaagtgagagtagatgtagctgttcttgatcaacgtcttgatgaagaaactatacatttgaagggtcttttcccaaaatggtccgatgtcattgcctacactagttttctttctacttacttgttctgatcgtagactatttcatattctccttttgatatttctaaaacattagagaataaataaatccgttcttaacatgggaaagtttttttttttttgacatcggaaccgcatactctatttatacctaaatcatactaacatgagcaagtcttaagtacattttctttgttgatatagtaattgtgtacatttacttggttctttgataatttataatcttatactttgattggtgcaactatagtcttatatccttaatttaactttatccttaatttaacttcatgatcaaaagatatagtcttgttttttgttttgttgagaagtttcattagcattattgtctaccgagagtaataccacaaattgatagtttctctgcatttttaagagaataagctaaataacggacctaaatacaagtggtccttacaattgcaatttgcaaatgaaaaaatttaaaagagtaagctaaacaaccgtactgacctaaataacaaacacatgaaaaaccacataaataacaaacacatgaaaaaccaatagaagtgtctgttacaattacaaagtccacgtacatgccacgaggtaatgaataagtctaattgcaacaaaataaataatattgtttcatataaataatttttcaaaatattgtttttatttttttcgttatcttttggactcaaatatgtgacaagagtaagactctataaacgacagctattttatcgtggtgcgccatcaaataatgtgtcctatcatttctaagttgagccacgaaggtcaacgtttccgatgcataccaccaaaactcctccctcgtggtgcaccatcaaataatcgtcaatccactcgttaatatgtgtgatgatacgcttatcagcgatatcagtagatgttgaatcaactcttcaggtttcaatgatatcgatagtatacttagctagtttctcccccatgaaatcgatagagcttcctcccaaggtattcaagatcttattggcttctacatatgaagcaatcattactcatgtagcaaacttgttaatcttctatattttcattacatataatattttacgtacaagtaagtcaaatgacatgacatgacatatgatataactgagtaagtaagaaattacgtataacaattaagtcaaatgacatagtaaccattcgtgattgttgtctcatatttatatatataaaacaaaaaatgaagttttaagcaaatgatctacaactaaaacaacatactccaccaatatatacaaaatacgtacacttttttttgataagtaagtagaattctattgaacctgatgagagttgagcataactctattcttagacccgaaaactactcaccatgtttattttagagatttaatgatggattggacagtttttaggccatattacatagtaacaactaatttcaactaaaagaatgcaagttggttagtttaatacaaaacaaaatagtgaaaattggatctctagctcattttccgattaattaacttattttcaaaaaaattgtggttataagaacgaattaatcaattgcatttcttataaaaaaaagtaatgaagagagattttacttacataaaataaatacatctggcctgatgaaacaaaaatgagtaaggatatcaacctttgtaataagtaattgttaattaccaattcatagtcttgatgggcattattagaaagcccattaaaaatggacaaggcccatttaaacctaggtttcgcagggtttattgcttcactcttatataaaaactctcgtcttcacaaatctcacatctcttctgcagccgattcttctattagccgccatg

SEQ ID NO: 21130 - DNA, 3000 bp, Unknown; identical to SEQ ID NO: 21129
  misc_feature (1)..( 3000): 2750-1469P.txt file - cDNA_ID_1840186; gDNA_ID_1621169; Annot_ID_173924

SEQ ID NO: 21131 - DNA, 271 bp, Unknown; identical to SEQ ID NO: 2999
  misc_feature (1)..( 271): 2750-1469P.txt file - cDNA_ID_1840248; gDNA_ID_1620620; Annot_ID_46989

SEQ ID NO: 21132 - DNA, 3003 bp, Unknown; identical to SEQ ID NO: 15588
  misc_feature (1)..( 3003): 2750-1469P.txt file - cDNA_ID_1840248; gDNA_ID_2926189; Annot_ID_140952

SEQ ID NO: 21133 - DNA, 3000 bp, Unknown; identical to SEQ ID NO: 4329
  misc_feature (1)..( 3000): 2750-1469P.txt file - cDNA_ID_1840331; gDNA_ID_1620700; Annot_ID_48748

SEQ ID NO: 21134 - DNA, 3000 bp, Unknown; identical to SEQ ID NO: 4329
  misc_feature (1)..( 3000): 2750-1469P.txt file - cDNA_ID_1840331; gDNA_ID_1620700; Annot_ID_165037

SEQ ID NO: 21135 - DNA, 3000 bp, Unknown; identical to SEQ ID NO: 4329
  misc_feature (1)..( 3000): 2750-1469P.txt file - cDNA_ID_1840331; gDNA_ID_2926192; Annot_ID_141077

SEQ ID NO: 21136 - DNA, 3000 bp, Unknown; identical to SEQ ID NO: 4329
  misc_feature (1)..( 3000): 2750-1469P.txt file - cDNA_ID_1840331; gDNA_ID_2926192; Annot_ID_201118

SEQ ID NO: 21137 - DNA, 3003 bp, Unknown
  misc_feature (1)..( 3003): 2750-1469P.txt file - cDNA_ID_1840419; gDNA_ID_1620793; Annot_ID_50484
tggagaatatttcaataataaaaccatttctgactagaattaatataaatcaatagaaggacgtaaacatcactcaaaaaatgatgatcgatattagaagaaactgtagtgggtaccaagaaaattaaacatacttgtcgtcggcacaaaatattttggattgtgaaactataatgccttgttttagaaagatgtgagagaatataaaaaaacttatgtgttattcaattatagagagatgaaattcaccatataaaacttacatgtgttatcatcagtaattacaattatacacatcaagaaaatttctatatttttctaactaggaaaattgtacttcaactgttgatttcatcattgatctagaatatctaattacttttactatcgtacatattaaaatcggagatatgatgaatcgaaaagattaaaactatataaatttttatttttgtaaactttcctacatggacatacattatactaaaattatataatatgtaatgtatgatcgtgcatgtttaaaattcagcgtttcacacgtgtagtttgggacaacttcggcgtttttttggttgagtaagatgacatgtggctcgacattcataactattgtgaataaaataaattgatttatgtaatgattggacacatttgatgaagtggtttcttgaaaataagactttggatggatgcagtgtggacaaaccggtataatttgtttgcggtttagtttatctggcagacaaaaaaccgttgcagaccaagtttatttgtatgtaaaaatggtctgcagatggtccgttgcggttttcttctattttttttagatcactacgaactataattaataaataataaataaaaaacggtatgatccgttgacggttttatccgccccaaccgccataaccattcaaatcctaaataaaaacggttttgataatataagaaccagcccaaagatgaagttatatatgtgactatgttaacacacatttatagtatgagttaacctagacctatttgcgtctcacttcttattaaatgctaaaaatttaccaaaaggacgctattcatcacaattaagtttaaatctctaaattaattgatcgtttaagtttttaaccaaactcaaataaataaaaaaatatacgataacttttattgtgacgatcgaatatactaccatcaaattttataccaaatttctgtttcgtagcatgtacgaaaattttcactccaaaaaaaatctaaaaattatatttaccaaaaactgtgatttcagaaaattatgtgattttaaagaaccagtgatttctcaaattatattatatgaaatgattattattattttaaaaaggtgaaagggtgaagcaaaaaaatagtgtgcataaacaaataagctaatttgttttctggtacttaggtcttttaaatccatataaataaattcttaaaagattgttttatttcaaatctttaacctaaaattgtaactttaaattcatgattaaattttttgttttcaataatttctcgtaacttcattacataaaacgagaaggatttataataggtaaaggcgtgaagcaaaaaataattgtataaataaataagttaaatttgtttcatagtgccataaaattacactaacatctgaacgtgaaacgcacgcgcttcttcatatcatagatacgttgcgtcttaaaacacaacacgtagcaactctttttaaaaaggaaaaatacatttattattcccaacaataaaaaaaatcaaacacagtcgaagaaggcaacgacctttcgcagccgtcagatcttaataaatacagtcgccactaaaatttaacgacatagatcgaaccatgacgacctactttctttaattaattttctgtcgtgacctaatcttctatttgttgtttcattagtcacttacttttatatttattctttcttaggtctatgtggaccaaagtgattggaaaagaaaaaaaaatacatttttgtcaaccataactaaattatcttattttctcaaatgcactgtttattatgtagcgtactgatttattaaatacttttgctttctatggttaatttatgatgtcggatttttatctttcccccaataataatatcactatagaagaaagtttacaaattcttagttaaatcaaaaaagattttatcagttgatttgattatacgaggtgacatcaatttttgtcttctttaacaaaaaaaatcaatttttgttttctttaacaaaaaaaatcaatttttgtcttactttttaattagcatttagaaaaatatttaacaaataaaagttctcataagcgatttttaaaaaaatgttttgtttttactatctttcagtttttttttttaaattaattttctaaaaaaacacatatattaaaaaacatattaaaactaattataaacatattatcttttgtgatttatatttttttataattctaaaccaatgatattcaattatttatcttaaaattaaaaatttatcaataataactaataaataatgtatagaaaatttaaaaattattttttttaaaacaatttttttcctctaaaaaattaaataataaggaatagagaaggaatatttttttatctaataaattccatataataattcaattatattgataaataggttgcaaaaaataagaaagaataaatatgagaataaatggtcatctctcgatctctcagctctgtgcaactctgaacacacccacacatatatactcagatacatacatacacaccacaaaaaccaattattttccaattttaagaaaagtttctgtgtctttttttttttttttggtgataattgaaacatatgaaacaatcgtcgtcatagaagcagcagagattcaccttctttctttatctttccctctcagaaacaggaaacaaaattcaaaaagaacaaaaaaaaaaaggtcaaaccaaaacgatg

SEQ ID NO: 21138 - DNA, 3003 bp, Unknown; identical to SEQ ID NO: 21137
  misc_feature (1)..( 3003): 2750-1469P.txt file - cDNA_ID_1840419; gDNA_ID_1620793; Annot_ID_168382

SEQ ID NO: 21139 - DNA, 3003 bp, Unknown
  misc_feature (1)..( 3003): 2750-1469P.txt file - cDNA_ID_1840621; gDNA_ID_1621121; Annot_ID_56296
atctgtgttttaagcatctccatcctgatcagcaccatgagatgtccgatatgcttgaggattcattcgatgaagctatgattacttctgcgattgagaaattggagcaagcgcttaagaaagaaggcatctcttaccatgttgtctctggacggcacaagagtttgtatagtatctactgcaagatgttgaagtaagttctcatttcctctctattcgaaactgcttgttggttttctggtttcactaagataaaggagagaaccgggaatactgacacttcattttatgccaggaaaaagctaaccatggatgaaattcatgatattcatggcttacgtttgattgttgacaatgagaaagattgttacaaggccttgggagtagttcacaagctatggtctgaagttcctggaaagctgaaagattacatttctcatcccaagttcaacgggtgggttctgcaaaccgattgtagcttaagatgatgcaggcttctgctttctctaattatctaactttgggctttgtgaattttaggtaccaatctttgcatactgtagtgatgggtgatggaactattccgctggaagttcaaatacggacaaaggagatgcatttgcaagctgaatttgggtttgcagctcactggagatacaaggaaggtgactgcaaacactcatcgtttgtgcttcaaatggttgaatgggcaagatgggttgtgacctggcattttgaaaccatgagcaaagacggatcgtcgatctgctcttctgagcccttgtgcagtttcccgtctcacgcagaagactgtccgttttcatataagcctagtggtaaccaagaaggaccagtctatgtgattgtaatcgaaaatgagaaggttagttattatatatctccttcaaattctgctcctttgaggatgtttctttgcttggagttataatttgataaacccgaaaatgcagatgactgtgcaagagtttcccgagaattctaccgtgtcggacctgttacgcagagcaggaccagggagctcgagatggtcaatgtacagcatcccggcaaaggaagagctaaggccaagacttaaccagacacctgtaagtgatctgaaatgcaagctgaagatgggagatgtggtggagctgactccagccatacctgacaagtctctgactgaatacagagaggaaattcagcggatgtatgatcgagggcttgcgttttcacggcctcaccgtgcagctactggtaccatggttggctggggaagctaactgattctcttaattacctttgttcatgtatatatactatagttgcatatatagtataatgcttcagaagatttgttgtacttcggtattgttgattcccacacaacagtgtatataagatatgcctatatgttctaaaaaactgactctggtcattaatatttgattctcttacattctaaatcttcaaaccacacatctggatctggtccataaaaactggctctggtcattaatttttgattgtgttacatttctacttgttgatacataaatattatagattttttggtctatctacttatttgggtacttatttgggtcgtctagagagtgggaaagagaccctttgaggagtttggcttggaaggtctgaggtttgttgttgctgctgttgttgttcttgagaggactgtccaggatctgtcatttcttcatcgtcctcggtttcttcaggttctgttgaaaccgacttcttcggtatcacgagctgataatttgggctcagcaatgtgtcctgttcaggtgggagtggaacaccgggtcctgctatcgattttggcagaggtatcttgttcctacttgcagcaagctcaagcagaacctaaatcaaacatcaaaaacagaaacttcaagattcaggaaccaaaaggcatggatgtgacagacaaaaacttgaggttctcagtgatacaatttatgaggcaagagggtcacacacagttcataagtcataagtaagagtgataattccctaatgattcacatataccaaatgaccgatcatatcgcatctcttctcagacaatgaagaagaagaaacatggaatcgtcaacaatgcatacctctcttggaggaggctgtgagaagctgaaattaactttggattgaatagcgagcttcacatcatcacagtcaatgttgggtttgctagcatgctctgagtaaacctgagcatctgtcaacacttcgaccacataccggtaccataactccagaaactgatgtatcacacgaggctcgtagtcttctacacccatcgacttaagcagagatttcacaatcttagcatctctaggtacatcttcttcaccttctcctgccatgtttatccctaaacaactaaaaaaaaagtaaagctacagagtcaaattaagaacctttcttatacagaattgatgttgcaacaacacaagtttcaatcgaatctcacaagcaaacatcgtgtaacagcaacacattacataaatcgaataaataagaattagagcttcacgaatcggagataagaaagacaaaggagattctaacctagcttcatcaataagttccaaaacacaagattatatgccataaagaggcgataaatacctaatgcgagagagaaagtttggtggagagctagtggcagaaacacgacggagagattgatgaacggcggcgaggaatcgggaaatactaatctctgccactctagatctgatatttatggttttggtttgtaaatctgctgtaacgttgagggtgtaaatgtaatttaactaaaacgctatttattactagtattttgtatttcactcgtgcataggcccattaaagacccaaattagaacgacggtcgaatgtataatattaaataccgataatagcctcatttctcttccgtttacttgtccgtgtgaccgtgtctacgacgttgaaatcgaaattaccacaatg

SEQ ID NO: 21140 - DNA, 3003 bp, Unknown; identical to SEQ ID NO: 21139
  misc_feature (1)..( 3003): 2750-1469P.txt file - cDNA_ID_1840621; gDNA_ID_1621121; Annot_ID_172092

SEQ ID NO: 21141 - DNA, 3000 bp, Unknown; identical to SEQ ID NO: 7162
  misc_feature (1)..( 3000): 2750-1469P.txt file - cDNA_ID_1840625; gDNA_ID_1621130; Annot_ID_56444

SEQ ID NO: 21142 - DNA, 3003 bp, Unknown
  misc_feature (1)..( 3003): 2750-1469P.txt file - cDNA_ID_1840643; gDNA_ID_1621111; Annot_ID_56090
cctcttatacacagttcaacttcaactgcatcatccaactttcatcacaaccctacatctttaacaaactatcttttcttcatgtgcaataaatatttagggaaagctcgacaaggaatcttcaaatgcaggttatgtgctattgatgttttatcacctttatgagggaaaggtattatcacatactccacaacttattcttttaagtaaatctatgattggatctaactgaactttctttaaattttagaaccgtaatgaatttgagagtgaattgattgagcgctttggctccctcatcaagatgccactattgaaatcagacaggtatacagttgacatcacatgcgagctaacaaactcgaacttagcacagctacaaattgcaacttcatatttaattggttcataagcaatttaattgtcttctctttgtgcatatacaggactcctttacctgatcctgttaaatcagttcttgaggagggcattgatttgttcaatctccatagtagaagacatgggaggtgggtaccaacactaccattttaaatgacttgaaaagttgaattttatgtcaaaccgaagtattttgagcatcgtatgccaaaacttgttcatcgtgttatatattaaacaacaccttctgttctgacgataaaaaatgaaaggcaatagtaataattttagcaaaaactaacaagacatcggatttatttatcctgtgactagatgtacttggatcatgtaactggagaaatcctacacatgagtgtgctcacaggcgtttttatttcttgttctggctgttctctacttcattcttttagctctagctcctgggttccttctgacctgttttccttctgatttttcttgttgtagactcgagtcaacaaaaggaacatatgcagcggaatggaccaaatgggagaaacaactacgagatactctagttgcaaattctgagtatctcagttctattcaggtaaaaaattcctttgtcattgatggctcatgaaaagcaagaaatctgcgattgaattttaaactgcttcaatgttccttcagtacatggtaaaagagtataagaagaaggatgtacatatgatgtctttgttttctggtttgcaactttcaggttccatttgagtctatggttcatcaagtgcgagaagagctaaaaacaatagcgaagggtgattacaagccaccttcggagaaaagaaaacacgggtctattgttttcgctgccatcaacttgcctgctactcaagttcacagtcttcttgaaaaggtaaccaaccaatttcttatactatcatataaaaaaacaaaaggaatattgagacaagaactcttcaactgccgaaaactaaaggttaagtatgggctttgttattaattaatagatgttattctcatcagttggctgcagcaaacccaacaatgagatcttttctagagggaaagaaaaagagcatacaggaaaaacttgaacggtctcacgtgacgctcgcccacaagagaagccatggcgtagcaactgtagccagctatagtcagcacttgaacagagaggtacccgtagagctcaccgagctcatctacaacgacaagatggctgctctaacagcccatgttggatctgtggacggagagaccgtagtctccaagaacgaatggccacatgttacattgtggacagcggaaggcgttactgcgaaagaggccaacacgttacctcagctttacttagaaggaaaggcgagccgcttggtgatagatcctccggtgtcaatctcaggtcctctggagtttttctgaatacttgattaaacatggaagtttctctcttgagggaggttgctcgtggaatgggacacatatggttgttataataaaccattccattgtcatgagattttgaggttaatatatactttacttgttcattattttatttggtgtttgaataaatgatataaatggctcttgataatctgcattcattgagatatcaaatatttactctagagaagagtgtcatatagattgatggtccacaatcaatgaaatttttgggagacgaacatgtataaccatttgcttgaataaccttaattaaaaggtgtgattaaatgatgtttgtaacatgtagtactaaacattcataaaacacaaccaacccaagaggtattgagtattcacggctaaacaggggcataatggtaatttaaagaatgatattattttatgttaaaccctaacattggtttcggattcaacgctataaataaaaccactctcgttgctgattccatttatcgttcttattgaccctagccgctacacacttttctgcgatatctctgaggtaagcgttaacgtacccttagatcgttctttttctttttcgtctgctgatcgttgctcatattatttcgatgattgttggattcgatgctctttgttgattgatcgttctgaaaattctgatctgttgtttagattttatcgattgttaatatcaacgtttcactgcttctaaacgataatttattcatgaaactattttcccattctgatcgatcttgttttgagattttaatttgttcgattgattgttggttggtggatctatatacgagtgaacttgttgatttgcgtatttaagatgtatgtcgatttgaattgtgattgggtaattctggagtagcataacaaatccagtgttccctttttctaagggtaattctcggattgtttgctttatatctcttgaaattgccgatttgattgaatttagcgcgcttagctcagatgatagagcaccacaatttttgtggtgagaaatcggtttgactccgatagcggctttttactatgattgttttgtgttaaagatgattttcataatggttatatatgtctactgttttttattgattcaatatttgattgttcttttttttgcagatttgttgacagtctctaaccatg

SEQ ID NO: 21143 - DNA, 3000 bp, Unknown
  misc_feature (1)..( 3000): 2750-1469P.txt file - cDNA_ID_1840655; gDNA_ID_1620811; Annot_ID_50597
tcctacttttgcagggcatacatttggagtagttaaagaagattttctcgaagtaaaaaagctaaagaaaattggtgatgaaaataatctaaaaaacagatttataaatgagtttgcgcctactaatccagaagatagtctcggtattgggcatccaagagttctaaacaacaaatttacaaatgattttgcgcctactaatccaggagatagtcccggtatcaggcatccaggagttgtgaatgtttaaagatttaaaatatgacataaagaaagctgaagactaaagaaaactggtgatcaacatcatttcaaaaccggttcaatgaatgatttcacctactaatcctggagatagtgctgatataaggcataagaaaatgatttctaatgtccattacaaaaaacaatataacacaaaaaaattatccaaataaagatatatgaaattttgttctatgaaatttataaaattagtattttggtcgccttcatgtttacgcaaaaataaatactaaaagaacctttaaaatattaaagggatgtaaatatatattgttttcataatctcaaataatattttcgtttgatctggctaaattaaaccagattaattgatagtttataatttttatctaattttgttttaatgaaaaacggtgggaaataaaaattggtgtatatatggcaattctatttgatgatttcctaatgcgataattttgtttagctaacacctttttgatgaaacccctgaattatccacataactgttcttgccttggtgattgttatgatttacccatgttttgaaatacttgtgtaatattgaaaatgtagacaaccctcctattttacaatatcaaacatatttagaaatgagtggagtttaactcttacacattcatgtgttatgtgtacctcgtctaacgttaagtttttttgttattatagtttttcatttttagcgttctttttatacattaagcataattttgaccattaaatttaatttagttgtaaattatttatatttttgacacataaaaatggacgtcgagacaaatataattttgttagaaaatgctagattaaaaataccaatcttaattttgtttgatttggaaatcaaagaaggttcaaatcaccatggctcatatgagtattggtttctataatctgtaacaacaacattgtggtattttcccactttttgtaacaaaatcacattgtccatatacatagtgttgaattatgcagttttttcacattttctatttccgtaaaatctctgcgagtattttataagaaaacttatatgtcatttctaaattgaatttaaatcaatccaattcaatatagtttaatttagtaaactctctgtcaataattttgatagaatgttattaggttgtaaatacgaatgttgaggtcaatataattagactacaaaaaggctagtataataagacttttattattaagatcaataaatactacaaaagtcatcttttaaaatgcggtaaaaaaaaactataacgatcaaattgccaattactaaaagaagtatcaattcctacgatgtgtagcaacaacattgtgggttgtcttcaccttttgtttgataatcacaaaatccatatgcatattgttgacttgtacactcttcgttacatggtctattaccgaaagctatctcacatggcccaatgcaatgtggctcttgctcttgctggattgctgcaaatacacaatccaataatatacatacatataaatagctattaccaattctatattttatgatataaaaatgttcaaacattgctcttcaaatgatcaaagataatttaacgataacaactaacctggtttggccaatgttgtagctagaaaatgaaattgtcaatatccctacaaagaaaataatcacatatgtttttctgatgtccattatatattttcactatgaactctattgagaaaaatagacttttatagttttctatatctttaataaagattctttatgaagatctctatttatagaaaaatagatttttatagttttctatatctgtgatcagttcaaatattctttatgaagatctctatttataagattatttttttttcgaataaaaatatcagttttcacactatatttcagttttttcacaaccataaatgaatattctatatttttaatatgaggttggctaaaatttattaattatcgttcttaattataaatttcactaaaaataaatttaattgtattaaactgaacagatgattaatctaagcatgttttacacaaatataataataaccaattttaatatatttttgatttaaacaattacacaaactgattttgccatagcttttgccgatgaactggcgagatcattgtgtcaataaaaactacgtaaaatcccagtgtaccgtgatcattcaaatccatgaaaatattcgtctaactaaatggaaaatctcagatgagttgatatcgataccaaaggaaattgagcttaatactatggacaatataatacacatgaaattgttactataatcattgcttggttaattcgaagaagaactcaaaaataatttttcattatacaatagtcttgatttacatagaagtctcaactcttaagactttcaatagttaaataactgatacactttgaagtttaggtgtcctgtctgattaaaaatttgccaatgtcatttccttttgaccaggcttggttaagaaacaaactaaaaaaaatcactcgttaacaaaaaaaattgtgtaaagaataataaatatccattttgtgtgatatgagagaaacaaaaccaaagacgagccagagccacctctaacaccatcggcgacttctcctcctactcctccgtcgccgacgtgttcgatttacaacgattcggtggctattggttgtaagatttagaattaaaggttaaaggagacgacgacgagagatg

SEQ ID NO: 21144 - DNA, 3000 bp, Unknown; identical to SEQ ID NO: 21143
  misc_feature (1)..( 3000): 2750-1469P.txt file - cDNA_ID_1840655; gDNA_ID_1620811; Annot_ID_169058

SEQ ID NO: 21145 - DNA, 3000 bp, Unknown; identical to SEQ ID NO: 7003
  misc_feature (1)..( 3000): 2750-1469P.txt file - cDNA_ID_1840670; gDNA_ID_1621121; Annot_ID_56283

SEQ ID NO: 21146 - DNA, 1265 bp, Unknown; identical to SEQ ID NO: 4783
  misc_feature (1)..( 1265): 2750-1469P.txt file - cDNA_ID_1840725; gDNA_ID_1620732; Annot_ID_49422

SEQ ID NO: 21147 - DNA, 3000 bp, Unknown; identical to SEQ ID NO: 3326
  misc_feature (1)..( 3000): 2750-1469P.txt file - cDNA_ID_1840725; gDNA_ID_1620640; Annot_ID_47462

SEQ ID NO: 21148 - DNA, 3000 bp, Unknown
  misc_feature (1)..( 3000): 2750-1469P.txt file - cDNA_ID_1840725; gDNA_ID_2926178; Annot_ID_140418
tcaatctctaacgcggagacataaccctaatattacggatggtttatactattaatcttcattaaaaatcgctaaaataggttataagatttccttaacaatgattataaagagcaggcagctatatttaagtatgtgtgatgttcctaataatttgcgattgataagaagaagatattaagatataatttcatgatgcttacattagatttagtccgtagctatatgtaattaataatattattgatttgaaagtgatgcatacgactattgctctcaatgcaaattaattattcacaaatcttgttattttcaataatttgaaggttttgatcaattattagtttataactatgtcattctctagctagtttatatagtcaaggtatgagatttttgcataactgtctatgtgaataatatgttcggcccatgaaattcaatatttagaaatcgtactatgtatgagtgaaggaaaataaatgaatttcttttcttaagtaagataatttaaatatataataatgatagtttaaaaaaaaaaaaaattaaaataacgtagagaacacgagtcgaaaaactagtggttcgtataagcggccaatggtcctcacatcatggcatcatgccatgcgaaaatataccaccaatctttagttttgttttcgtttaattattgaagccaactaagatataaacttttaggttttactcaatatatccgctatgagttgatcattttgaattggtttagtgttagaaatttttatataggaaaatacatgcaacaatctgaaaatgaaaatatcggttagacttagaatttatatcgttttttgggactgacttttgtttggcttgattagaatcacctaagttataacccaatgtgtatattcagaatctcacacaggaaagctagtaggtacaaaatatttgggaaacagagagcagcagcaatatattacaaaataaattaaacatacacacagtcacaaatttattggtggataatattattttttgtctataaagttatcataatgtttccacaattaatgttttctaatttcggcaaataccaaactccattattgccattcgaattaaatgcgctcccctttctctataatgcatagaaaattgacttttgataaaatttcccctttgaccttgcaatccaagggaaatggttggtctaatattttaactaaagtatttctcttcattttaaaatattttatcatcataagacatatcgaacgtacaaaacaattatttcagttatagagaaacttttatcgaaaacaaaaaaaaatgtatatatagagaaactggttttttttttccgttttttttgaaacaggattgagatttatagagatcaaagttaatcaaattgaaataaatattattgcgatgatcctctgacgacaatactataacaccactaatgttcaacatgaaaactcaaccatttataagttgggaaaataattcccttgaactgtcttagatttttaaagctaagtatatcgctcaaactagccgaaaagagttggaaaacctgaaaaactagtccaaagaaaaatcaggatggaagttgaaattgagaggtgcacacaaaaaaaaataaaaaaaattgaaattgagagggataaacgtgacgtggcatcttcatgctggcaacagctaatgtgaaaccttcccacaaagcttggagagcgacgctttttagtcgttcatcaatcctcaccccattgattgtgttactttcattatcacaaactgtttcctaattaaagtcctcttatttcgaatttatttcagtatagtacttgtgtgttaaacttaacaacgttgaaacaactatttccttcatttgcatttgaatgtacaatgaaactacatatttctacattttagtatgagtttttttagtttagtatatttaatgattatctttgtatacaattcaaatccaatatatataagaaactctcattattaatctcgaataagagtacgtacacattaaatcttatatgctaaaactaggtctcgttttagggatgtttataaccatctttgagattattgatgcatggttattggttagaaaaaatatacgcttgtttttctttcctaggttgattgactcatacatgtgtttcattgaggaaggaacttaacaaaactgcacttttttcaacgtcacagctactttaaaagtgatcaaagtatatcaagaaagcttaatataaagacatttgtttcaaggtttcgtaagtgcacaatatcaagaagacaaaaatgactaattttgttttcaggaagcatatatattacacgaacacaaatctatttttgtaatcaacaccgaccatggttcgatttacttgcttaaatatatgacatttgcacttttgagatgcatgttatttacaccttataaaacttacttgaactttaataatatttgaccatatatcatcttggaaatataaaatgtaaacacgaaacacaaaaggaagttttcgttgtatttgcatctatatttctatatttccaaagactaaaacactatcaatgtgttgtgttcaattttgaacgtttaacatgtaagcataaaaacaaactcagaaaaagaagaaaaaaagaagaaaaaaatcatcaaggcatgtctcgtatagctgccacaaacgtaaaaataaaataaaaagcatccataataatggataaaagcatcgtataaacgcaaaatctattagatttttgtttttatgggacacgtataccaattgataaacagaggacggcaccgaaccattttgacttccctcttcttctctccctataaatactttgtacttccccttacggaccctacgaccttttgtttctctcttctctattaatactatagttttcctcaaactctctgattagctcataaatactaaaccagttgaccatttttttctgataaacaatcaaatg

SEQ ID NO: 21149 - DNA, 3000 bp, Unknown; identical to SEQ ID NO: 4636
  misc_feature (1)..( 3000): 2750-1469P.txt file - cDNA_ID_1840737; gDNA_ID_1620719; Annot_ID_49160

SEQ ID NO: 21150 - DNA, 3000 bp, Unknown; identical to SEQ ID NO: 4636
  misc_feature (1)..( 3000): 2750-1469P.txt file - cDNA_ID_1840737; gDNA_ID_1620719; Annot_ID_165740

SEQ ID NO: 21151 - DNA, 3003 bp, Unknown
  misc_feature (1)..( 3003): 2750-1469P.txt file - cDNA_ID_1840899; gDNA_ID_1620624; Annot_ID_47095
atcataatccatcacagcaacttcatggatttgatgagccttttcttcctccaaaagattcacactttcttcctctacctttctgaaacctacatttatttccacaggattgccttcatgaatatctccatgaatttcccgccgattctcagcactattttttccgccatgaaccgttgcaacctgaaaagcttagctagtcagaaccagaattcttatcgaattttacaaaaagtcagcaactttatgcactctaatgaaacaaaacttaaaaattagttaaaacaagcaaaacccttcgctcagaaatttcagttacctcatcggaagatttccgcttcctgaaagtactttggcaataagcgaaagcaatggcagagaacgcagtgacagcaacaacaataagaatcaaaccagaatcgatagaagctctaacaactaaacgaggcgatcgaattgaagaacgacgagaattgcgtttcccggcgcgagttcgaagatgaggagaaggacggagactatgacaacaaccaagaaaatcacggcggagagtagaagccggaagaatcaccggagagtacgaagttaaggtaaggtatttagaagatctggtagtggagatgaaggtggtggaggtaacctccattggagaggcttagagagaaaacgattagaggataaagcttcagagaaggaagtgaggatatgaaataacgaacgactctcttcttcgcattgtggaccccttgcttacgtggcataaacggccgtcaagtcgtcaacgttgtttatattaaaaaaaacatattttattaattatgctaaaattttattgggcctgggtccgagtagtggataggattcgggtcggatccgggtttttgttttccgggggaaatctagaaatttgatcttgacgaatcgccggcgacggattctcagacgctgctatggaaggtgttatgggtcaggtagagaaacggccgatttctaccatcgtcttcatcgttggtactattttgtctttactatttctcgaattgtgatttttttttcttcttctaatgggtttgtgtattaaaagctatgcaaaaggaagctcagcctctgatcaacagattacgcctcgttgaagaagttaatactccgtgagttctttgacctctttcaattttttattttgattcgaaatcaaatgtgatagcttttttgtaggtttccaaaagaggtgacttggattatgtttaagggaatgtataaagacttgaacatcaatatagtgtgtcctggaaaagattcaactcttggtatgtgtatccatgtggttaagtgattgtaagtgaaatagtgtttcaagatgttttgtgaagttcttgatgttaattcgtttttcaggggttgagagtgttggcacagttcctgcatcactcgtgacttatgcttccattctagcaattcaaccagacttaatcattaatgcgggaaccgctggtggctttaaggtatcaacattacaaatttctctacatagttctcgtttcatgcctcttatgtgtcagaaataatgaacacccttccttgtttttaaatggtcttttcaggccaaaggagcatgtattagcgatgtttatgttgtctctactgttgctttccatgacagaagaatacctgttcctgtaagtgctcctttgtattgttcatgtatcagtatgagttgcaaagtaaacctgatgttcttgagtgttatacttgcattctaattccatatatttttgccctttcctaaacatttttatactttctgcaggtccttgatatatatggtgttggtatgcggaacaccttccccacacccaaccttataaaggagctgaacctaaaggtgtatactttattagttgctctgagttcaccatttgatcctcatgcaagattttggttatttcttgatatggtttgcataagtggtagatttatgatttagttgcaatgttcccaggtgggaagattatccactggcgattctatggatatgtctccacatgacgaagaatccatcacagcaaatgatgctacagttaaagatatggaggtcaacaatccataagtttcctgtgttgatgtacctggctccatactatgtgtttgtctttgtgtctttatcagttactacgacttatttacggattcttggcatttcagggagcagcagtggcctatgtggctgatatctttaaagtgcctacgattctaataaaaggtgtgactgatattgtggatggcaatagaccaacttctgaagaatttttggagaacttagctgcagtcactgccaaacttgatgagtcacttaccaaagtgattgacttcatcagtgggaaatgtctctcagacctctaacaagtcatacgtattaagtttcatctgttcagtatgtgcattgggcgaagaaagcatatgaagattcaagcaaagggcgtaggtagggaataggtttgagcagaaatttcaactcttcaccttttctcatttgttcctctatttctttttgctgtctttctattgatgatccatcatacatgtagaaactcagcaaatttgatacccaacaacagagtcataattctttaatatcaatttcgaatgattgatgttaacagaagaaaaaatttagttagtttctctttcattctttttaagtgtgaagatgtacaaaacaactataactataacacacctttgtgttggcttttaactaagcctaaagactatgtatcaagaaaaaaatctcaaagaactggagttggattttagaaagagccaatgcaataaacatgaagcttctaaatctcacacctactcttcaccaaatatcaactagacagaaataccgcacaatatgcaggtcacaaaactgcaaaagctgcagtgtatatatatgccttcactttgaaccttatttacagacccaagatttgagtcttcaacaaacagatacaaatg

SEQ ID NO: 21152 - DNA, 3003 bp, Unknown; identical to SEQ ID NO: 21151
  misc_feature (1)..( 3003): 2750-1469P.txt file - cDNA_ID_1840899; gDNA_ID_2926208; Annot_ID_141834

SEQ ID NO: 21153 - DNA, 3000 bp, Unknown; identical to SEQ ID NO: 6150
  misc_feature (1)..( 3000): 2750-1469P.txt file - cDNA_ID_1840930; gDNA_ID_1620849; Annot_ID_50980

SEQ ID NO: 21154 - DNA, 3000 bp, Unknown; identical to SEQ ID NO: 6150
  misc_feature (1)..( 3000): 2750-1469P.txt file - cDNA_ID_1840930; gDNA_ID_2214645; Annot_ID_136345

SEQ ID NO: 21155 - DNA, 3000 bp, Unknown; identical to SEQ ID NO: 3979
  misc_feature (1)..( 3000): 2750-1469P.txt file - cDNA_ID_1841049; gDNA_ID_1620677; Annot_ID_48277

SEQ ID NO: 21156 - skipped

SEQ ID NO: 21157 - DNA, 3000 bp, Unknown
  misc_feature (1)..( 3000): 2750-1469P.txt file - cDNA_ID_1841053; gDNA_ID_1620677; Annot_ID_48276
tattttcttctaaatatattaaaaaataaggatctttattttagaaataaaaatatagataagttgaactgaaataaatacaaaaatatagtataaagataaaaatagagttgaaaatactctaatatatgttttaaaatagagtttactctaaaatagaggagaaagataatgtatatctctataaagtaatctaatgtctctcctctattttaaaagaaattatatattagaaatttacattaaagcaaaaaatatctaaaatatagttaattctaaaatagaaaaacatatagagatgaacattagagatgctcttagcgccgcacaactgtgaaacaaaaagtagtttagagatattgttgtcgagtgatccacgaaaacaaaatttcttcttcttttaatatatttgtataatttttaaaaaattagatgtcagtttttttgggttaattggatctccggtctctaagcctctaagactaattcaaatgaaaaatatatacatttggataattagaacattttatagtttgtcacataatataatttgcaaaatgtaaagaaatgttttataaatgtcttgtgaatgatgtatacttcagctctaaagaagatgcctatagctatcaataccgagacggcaaagactcaacactatgaattaccaacagctttcttcgaacatgctcttggaagaaacatcaaatacagctgttgttactattcaaacgattcaagtagcttagaagaggcaggggaagctatgttggctctttcttgtgaaagagctaaagtggaagatggtcaaagtgttcttgatatcggatgtggctggggatctttgactttgtacattgcacgcaagtacagcaaatgcaagttaaccggtatctgcaactccaaaacgcagaaagcatttatcgatgagaaatgccggtaacaaagtttctcattacatcttataagcttcaagttctagctagtgtaagtggaacttaaatttaatctaaaatggtttgttttacatgtcatatttgaaggaaactcgggcttcagaatgtcgaaatcattgctgcggatattagcacttttgagcatgaagggacatacgatcggatattctccatcgaaatgttcgaggtttggattggtttttatttcattatatttttgcctgtcaaagatcagaggtttatatcttagctttggcttgggattgtgattagcatatgaaaaactatggagagctactgaagaagataggaaactggatgaaggaagatagtcttctgtttgttcactatctctgccataagacatatgcttaccactttgaggtgtggatcaattaatgtctaatttgatagcttcttgtttagtcagttacttcaccatgctttcttggtaataattaaatcttgggattgtgttgattcattataggatgtgaatgacgatgactggatcacaagacacttcttcagcggaggaacaatgccatcagcagatcttctcctatatttccaagtaatatacattataacttgtgtatgactcggtagattatcatcaatccaaatatatcaatatgttggtgtttgttcaggaaaatgtttcgattatggatcattggctcgttaacgggacgcattatgcaaagacaaggtaaaaactctgaagaatttgttgtaaaaagcaagtgaagatgataatgatcttgtaatgtttgttacttttatgatacaacattttgcagtgaagagtggctgaaaggaatggataaggagatagttgccgtaaaagagataatggaagtgacttatgggaaagaagaagcagtgaagtggacggtttactggagaaccttcttcatcgcgcttgctgagcttttcgcatacaacaatggagacgagtggatgattgcacacttcctcttcaagaagaaatgatgatttctttattttccttccactttttgaataaagaatacaacaatctcgttctactttgtattctgtgattttatggctttatggtttcctaccaaaagagttgttcaatcttctttaaagtgacaatttatcaatgttatctcgaaaaacatggggatcaagtatcatgaactggattcttttgaatcagcagcttgctttgtcggattcagctaaccatctacttccagataataatattttaatattttattaatgttaatcaaaaactcattccaccaaaaaaactcattttattttattaatgttaattttatatatgatacgattctaaattattttttaaatattttagttaatgtcgaacattgaacatatctattttcgtcaattgaatattatgtatccgtttttaaagttttgaatcataataatttttgattagaataagaactagtgtgtagttgtcatccggaattaaattttaaaaaacttacagagttggttttgattaactacaattggaataacaaaagatataaaagtaattaatctatgttatgatcggttaactaccgattaaaaaacataatataaggccccaaaaaacaaaaaataaaattctagaaggcccatcaaagtcgtaaaccggcccggttccaacttttctttggcatagcaaaatggcgatatctgattttaagcacggacaactgcaaaaagataagataagataaggttttgttaagagttttaaatataagaaaattataattaatagcgatatacgtttttcgaatcgtataaactaaaattaggtcacatggaagtcaaacaaaagaataaggtaatacaggtaaataggtaattaacaatccttagtgggctgaacgttgaattaagaaataaagccacgagtttgatttgtttcttatttactttacgtccgtgtctatttatatgtttaacgttacactcattaagatcgtaccttagggaaaaaaaactcaagagacaaaaaaaaaaggaaggcgcgtcagtgatg

SEQ ID NO: 21158 - DNA, 2381 bp, Unknown
  misc_feature (1)..( 2381): 2750-1469P.txt file - cDNA_ID_1841053; gDNA_ID_2926203; Annot_ID_141619
cctatagctatcaataccgagacggcaaagactcaacactatgaattaccaacagctttcttcgaacatgctcttggaagaaacatcaaatacagctgttgttactattcaaacgattcaagtagcttagaagaggcaggggaagctatgttggctctttcttgtgaaagagctaaagtggaagatggtcaaagtgttcttgatatcggatgtggctggggatctttgactttgtacattgcacgcaagtacagcaaatgcaagttaaccggtatctgcaactccaaaacgcagaaagcatttatcgatgagaaatgccggtaacaaagtttctcattacatcttataagcttcaagttctagctagtgtaagtggaacttaaatttaatctaaaatggtttgttttacatgtcatatttgaaggaaactcgggcttcagaatgtcgaaatcattgctgcggatattagcacttttgagcatgaagggacatacgatcggatattctccatcgaaatgttcgaggtttggattggtttttatttcattatatttttgcctgtcaaagatcagaggtttatatcttagctttggcttgggattgtgattagcatatgaaaaactatggagagctactgaagaagataggaaactggatgaaggaagatagtcttctgtttgttcactatctctgccataagacatatgcttaccactttgaggtgtggatcaattaatgtctaatttgatagcttcttgtttagtcagttacttcaccatgctttcttggtaataattaaatcttgggattgtgttgattcattataggatgtgaatgacgatgactggatcacaagacacttcttcagcggaggaacaatgccatcagcagatcttctcctatatttccaagtaatatacattataacttgtgtatgactcggtagattatcatcaatccaaatatatcaatatgttggtgtttgttcaggaaaatgtttcgattatggatcattggctcgttaacgggacgcattatgcaaagacaaggtaaaaactctgaagaatttgttgtaaaaagcaagtgaagatgataatgatcttgtaatgtttgttacttttatgatacaacattttgcagtgaagagtggctgaaaggaatggataaggagatagttgccgtaaaagagataatggaagtgacttatgggaaagaagaagcagtgaagtggacggtttactggagaaccttcttcatcgcgcttgctgagcttttcgcatacaacaatggagacgagtggatgattgcacacttcctcttcaagaagaaatgatgatttctttattttccttccactttttgaataaagaatacaacaatctcgttctactttgtattctgtgattttatggctttatggtttcctaccaaaagagttgttcaatcttctttaaagtgacaatttatcaatgttatctcgaaaaacatggggatcaagtatcatgaactggattcttttgaatcagcagcttgctttgtcggattcagctaaccatctacttccagataataatattttaatattttattaatgttaatcaaaaactcattccaccaaaaaaactcattttattttattaatgttaattttatatatgatacgattctaaattattttttaaatattttagttaatgtcgaacattgaacatatctattttcgtcaattgaatattatgtatccgtttttaaagttttgaatcataataatttttgattagaataagaactagtgtgtagttgtcatccggaattaaattttaaaaaacttacagagttggttttgattaactacaattggaataacaaaagatataaaagtaattaatctatgttatgatcggttaactaccgattaaaaaacataatataaggccccaaaaaacaaaaaataaaattctagaaggcccatcaaagtcgtaaaccggcccggttccaacttttctttggcatagcaaaatggcgatatctgattttaagcacggacaactgcaaaaagataagataagataaggttttgttaagagttttaaatataagaaaattataattaatagcgatatacgtttttcgaatcgtataaactaaaattaggtcacatggaagtcaaacaaaagaataaggtaatacaggtaaataggtaattaacaatccttagtgggctgaacgttgaattaagaaataaagccacgagtttgatttgtttcttatttactttacgtccgtgtctatttatatgtttaacgttacactcattaagatcgtaccttagggaaaaaaaactcaagagacaaaaaaaaaaggaaggcgcgtcagtgatg

SEQ ID NO: 21159 - DNA, 3003 bp, Unknown
  misc_feature (1)..( 3003): 2750-1469P.txt file - cDNA_ID_1841067; gDNA_ID_1620645; Annot_ID_47584
acaaaatctgatagattgacgtcaaaaaaaaacatgataggtgtctattaataaataaaatgtcgatgaacaagacatcgaacatacaagtattgtgatgtatgtatatatacgtgtgttatatatgtgaaaaatgattaaatgaatgatatattgatatatcataagatcttgtataatgagatggttgtccattgttttgttcatcaaagacaacagatagtgaaggcaacccatgtgcatgtacactgtcatcatggccaccagtgtattaccatttcgaaaaccttataagttgtattcttaattaattacgataaataaagatagcataatgcatagttattggaaaaaaaagatatataaatgcagccgtcaaatttgtttttattttgtcaacgccgtcaaacatatatatacatacaagatcatgtgttttttacaagataaaaaatctcttaatttttatataaaagactcttagcaacctaattaaataagtggatcatcttctgattgattgttaaattaaattaagttatttgatgagtacagaactattaagaaaatcattgaaaaataataattataatatcgtcgtgaaccattgaggttcgttattttgttctctttatatgaagtgaattaagagtgtaaaccatgtttgatggcgatttcctagtttgataaagatattgagggtgggatgtttgtcttgtactataattaattatctgtaatcattttaatttaatataatttttttttgttttttagacagcctaatttctttcaaacagctaagccacgtgaaatactttccttaacttttcagtaagttttaactattttgatcattcggttttaaataaaaaccagtggtgtcaaactatcaaacctgatcaaatagtttcaaacctattttttgactaaaatcaaatccacaatttggttaaaactaaaaatatctcttcatagaaggatggaccattgaagaatactttctcttttctatttttatttgatttagaaaatcatattcattacaaaaggaaaaaaaaaataattttttgtatcctaaagttataacttacaattttccacacttcagtttggtagtattaatttatctatttttatcaaagtttggttttaggaaaaatgtatcttttcatataaaaaatatatagatcttcaaagaaactgaattgggttttcaactattttatcgtttgacactactttgacttatcaaaaagagttcaaaatagaaaaatagaatcgaatcacacgtttcagtgtaagagggatttgatattggtcgacattttaaagagttgttttgtttttttttccaatctgcatggtttttcgttccgttgaaccaaattcaacactttgtataaaccgaatagtaatatactagacgtacgccaataccaaaaataaaattaaaactcaattcacaaattgaatctacaccatatcatgcatatatatcagcaacctagaataatcaatgaaatttaatcgaggataatcaatatccaactcaacgataatcaaaagcctaataatagatcaatgaaatcaaataactaaacatagtaatatacattgatttgtgttaaacagaataatatacattataatagtatgaaaatatgaatataatgagataagaggcgtatatgttacaactacagatcaccatccacaattaacaatccgattggtgcgggccattgtttcgatatttgccaactgtgattgatgtgactgccagctggcatattttcccctcctgattacgtttttaccctttcctcttctgtttcaccgttaattcaattttactatttgtaccgctgtctttcaccttttttaagaaaacccaacccgaaatcataactataccgaaatcacatgtcttcatggtgacgtaacaagacttattttccggttgaatttggtttaacctattgagattgtgctaaccgaaaacagaaacggttatgacgccaacgaggcaagaggggtaaaacgagaaagaggggatggcagaaatcgtaattaacaaggaaaataaagggtggtttcacgataagtctgtctatatgacgcgaaagggtttcttaaattcagagagacaattaatcagtttcgtgtgtttggagaagaagaagaacagatcaaatacgaggagagatctctaaagagatttatcgtttcaagtaagtctctttatcaaactcttaatataaacaaatcaaaacatgaacacgtcgtgtcttcgtttcgattctagatacgattttttagttcatgtgaatgaactctgttttattactactagggttgttcaatatttttccgagaattaccagaggaacaaagttagtgattatattgatgcagagtatgaagtaattatatacataaatcatgttttgttctcaagcatctacgttgaaatatatataagaagtttttttttggtgaaaaaatatgtatgagaagttcatctttcataatagtgaaacaactctctttcataccaaaaaaaaaatttgaaaaaaaattagtgaaactctctttgtccgattaggttaggtttggactcagaatcaaaatacgattagcataacaaattttttggcatggcaattattgtctgcaggtaaaatataccaatagaaacatatttttaggagtagttaagattatgattgaagaaatactattacgataagcataaaattttcttttgctgttcttggtttttgtcgttttatagaacattgaatatgtacttttgttttttttcaccagtagatatgtactatacacacataagtaacatgggtagtttatatagagagagatttgatttttcgtatatttcttttgttgaaaataaatatgtgtaaaatttattgtttattaatttgacagatttgttcacgttgagaagtttaatttagattaaacaacaaaaagatg

SEQ ID NO: 21160 - DNA, 3003 bp, Unknown; identical to SEQ ID NO: 21159
  misc_feature (1)..( 3003): 2750-1469P.txt file - cDNA_ID_1841067; gDNA_ID_1620645; Annot_ID_163203

SEQ ID NO: 21161 - DNA, 3003 bp, Unknown; identical to SEQ ID NO: 21159
  misc_feature (1)..( 3003): 2750-1469P.txt file - cDNA_ID_1841067; gDNA_ID_2926175; Annot_ID_140304

SEQ ID NO: 21162 - DNA, 3003 bp, Unknown; identical to SEQ ID NO: 21159
  misc_feature (1)..( 3003): 2750-1469P.txt file - cDNA_ID_1841067; gDNA_ID_2926175; Annot_ID_199803

SEQ ID NO: 21163 - DNA, 3000 bp, Unknown; identical to SEQ ID NO: 4204
  misc_feature (1)..( 3000): 2750-1469P.txt file - cDNA_ID_1841114; gDNA_ID_1620691; Annot_ID_48581

SEQ ID NO: 21164 - DNA, 3000 bp, Unknown; identical to SEQ ID NO: 4204
  misc_feature (1)..( 3000): 2750-1469P.txt file - cDNA_ID_1841114; gDNA_ID_2926158; Annot_ID_139617

SEQ ID NO: 21165 - DNA, 3003 bp, Unknown
  misc_feature (1)..( 3003): 2750-1469P.txt file - cDNA_ID_1841127; gDNA_ID_1621091; Annot_ID_55504
ttttacagttttatgcacaagtacagggactgtggaaactgaaaagtaagggtattgaaagcagaaagaacttttgtgttgaactatggagcaagtggtgatgaaatggagaggcacgcgatgtttaccaacagcacgtggcaatgtagaaactgcgattgtgccagcgtagtagagtcctcgagagttgcatccgcggggatcgactaataaggtaaaagccaatttatttgtcaagcatacgtttcttaaaggagaggcaccgcaaaaagaaagtaaaaaggagaggaagaacttacgatttatttaaagtcagatgaccgttttttcccccaagttgagacacgcgtacgaaccaccgcagtttctgaagataccattcgatcaatccaaagctagcaaaagttctaatcttgttgtccatatgttaaccagaaaagcaaagcattaagtttgatcgacatcacttgctggaaacatttggaaccggagcttcttgtcgtattcctgtaatccgaggaaccaagcctaacaacattgaaatggaaagaatgaatcaaactggagaaaagggaaagaggggaaagaaaggtaaaatggtctgcagatcttctgatatcagaaacattaactaggatcatatattctcagttacataattatatacttaactgcacaatgcactagaagtctagaacataatcttgtactacagttgtagaatcttctattatcacctagatgaactgcaaagggatcatttgatgatcgtcatacttagcacatgaatctccatcagcaaactggttaaatgtggaaactgcaaagagacaggtactcatctaagtaaatatcaggtagttatggaaatttctctacagagcaaacgcatttaatacaaaacatccagatttgaactcatcagactactgtaattgctacctttctctctttaacgcaatggcttggccttcaattacagcaaatgactaaatgcagcacgcacaagaatatgcttattggaaaatttcgtatacaaactgattggtatgcctcttctaggtgctcgaagaacggaatcctgtgagttactatttggtttcccagctactacgactcttcactaccaaagaggcccaaaagtgggaagaatgtattcagaaactaacaatgtcttaaacccttcttccaaaacccttaagtcacaaatctttacagaacaaaagagaagtaaatagaccaatctcatataaacatcaacaagaagcagacaatgtcacaaaacatccaataaaaccttctatgtagataagatcattatgttcaaaacttaacaagaatgctatagagattgcaaggattttgttctaccaataccaccttccttttagcactccaatcgtttaaaagactcagcttacagaatattaggatctgaaactgtttgcttttcgatctgaagctggaaagcttcagagaattcctttagtaaagactcgtgaactatatcgatcaacctcaaatcatcaaccattccgtgttctccatcttcaagcaagccctttatgtttccaactttccggtctctaatcccacatggaactatccagttgaatggtgttagatctgtagtgacattaagagctaaaccatgatatgttatccatttcgacacacgaatacctatcgccgccactttttggttgcctatatataccatttgcaaacaaaaagaaatcaatctcggaatatatattagatcacttacaaaatcatccatttgaaatatgagacataccaacccaaactccagttaaaccgtcaagacgagaagctttaatggagaaagttgaggaaagcacacggatgacaatctcttcaagcatcctgaggtaccaatgaagatccatctcgtgatttcgaagattgattataggatacataactagctacattttcaaacattcctataatcagcttgaagagctcattagaaaacacacagaaacttccaatgcattgttgacattattacctgaccagggccatggtaagtgacttcgccaccacgttcagttcgataaacattgaaaggagcatcctttatatcgaaattgagataatcctctgtactagcagttcccattgtgtaaacaggagagtgttgtaacaaaatcactgtatcagcgcagtcttggtttctatcaatcaatgtctttttctcctcgacaatgctcttctgccatgaccaagctttcttgtatggaaccaatttgtcgtaaagatcaaaacacaggcacctgcaaaattgatagtgattgcacggaaggtgttcgttaaaatgcctcaaacagaaaatagagagcacaaaaaaggaaactttactttctggggatttcatgattcccggagtttaagatcttgacagatctaactaatctgtttctcttcgcgttagtacgatggtgatgatgaattcccgaaactagagtttctactccattcagcaactccataactctgtactaaagaagaaagtggaatttacttaaaatttatttctgtaaatatacagtcattcaatttttagccaatcaaaaacgacggaaacaacaattttgactctacaaaataatatgtaaatgtaattaattatttgaaaccaaaaaagcaatctttatggataacagatattttacaagcttaatttgaagaagaagataacaaaacaaaaaaaagagcgtggctttatctatcatctggtatccactatccacaactggggtcagcttctggttctctctctcggtaactttctgagctgaagaaccctaattcttatcttcaccggattccgggtatagggctttgtaaagttgttgaatttacaaagaaagatatgctggtttgtctgggttttgtagaagaatctgtgttgttgctttgagattaaagtccgaacaatgttgggtttgattcatgtccttgatgagctcgtcaatg

SEQ ID NO: 21166 - DNA, 3000 bp, Unknown
  misc_feature (1)..( 3000): 2750-1469P.txt file - cDNA_ID_1841127; gDNA_ID_2926199; Annot_ID_141416
tacagttttatgcacaagtacagggactgtggaaactgaaaagtaagggtattgaaagcagaaagaacttttgtgttgaactatggagcaagtggtgatgaaatggagaggcacgcgatgtttaccaacagcacgtggcaatgtagaaactgcgattgtgccagcgtagtagagtcctcgagagttgcatccgcggggatcgactaataaggtaaaagccaatttatttgtcaagcatacgtttcttaaaggagaggcaccgcaaaaagaaagtaaaaaggagaggaagaacttacgatttatttaaagtcagatgaccgttttttcccccaagttgagacacgcgtacgaaccaccgcagtttctgaagataccattcgatcaatccaaagctagcaaaagttctaatcttgttgtccatatgttaaccagaaaagcaaagcattaagtttgatcgacatcacttgctggaaacatttggaaccggagcttcttgtcgtattcctgtaatccgaggaaccaagcctaacaacattgaaatggaaagaatgaatcaaactggagaaaagggaaagaggggaaagaaaggtaaaatggtctgcagatcttctgatatcagaaacattaactaggatcatatattctcagttacataattatatacttaactgcacaatgcactagaagtctagaacataatcttgtactacagttgtagaatcttctattatcacctagatgaactgcaaagggatcatttgatgatcgtcatacttagcacatgaatctccatcagcaaactggttaaatgtggaaactgcaaagagacaggtactcatctaagtaaatatcaggtagttatggaaatttctctacagagcaaacgcatttaatacaaaacatccagatttgaactcatcagactactgtaattgctacctttctctctttaacgcaatggcttggccttcaattacagcaaatgactaaatgcagcacgcacaagaatatgcttattggaaaatttcgtatacaaactgattggtatgcctcttctaggtgctcgaagaacggaatcctgtgagttactatttggtttcccagctactacgactcttcactaccaaagaggcccaaaagtgggaagaatgtattcagaaactaacaatgtcttaaacccttcttccaaaacccttaagtcacaaatctttacagaacaaaagagaagtaaatagaccaatctcatataaacatcaacaagaagcagacaatgtcacaaaacatccaataaaaccttctatgtagataagatcattatgttcaaaacttaacaagaatgctatagagattgcaaggattttgttctaccaataccaccttccttttagcactccaatcgtttaaaagactcagcttacagaatattaggatctgaaactgtttgcttttcgatctgaagctggaaagcttcagagaattcctttagtaaagactcgtgaactatatcgatcaacctcaaatcatcaaccattccgtgttctccatcttcaagcaagccctttatgtttccaactttccggtctctaatcccacatggaactatccagttgaatggtgttagatctgtagtgacattaagagctaaaccatgatatgttatccatttcgacacacgaatacctatcgccgccactttttggttgcctatatataccatttgcaaacaaaaagaaatcaatctcggaatatatattagatcacttacaaaatcatccatttgaaatatgagacataccaacccaaactccagttaaaccgtcaagacgagaagctttaatggagaaagttgaggaaagcacacggatgacaatctcttcaagcatcctgaggtaccaatgaagatccatctcgtgatttcgaagattgattataggatacataactagctacattttcaaacattcctataatcagcttgaagagctcattagaaaacacacagaaacttccaatgcattgttgacattattacctgaccagggccatggtaagtgacttcgccaccacgttcagttcgataaacattgaaaggagcatcctttatatcgaaattgagataatcctctgtactagcagttcccattgtgtaaacaggagagtgttgtaacaaaatcactgtatcagcgcagtcttggtttctatcaatcaatgtctttttctcctcgacaatgctcttctgccatgaccaagctttcttgtatggaaccaatttgtcgtaaagatcaaaacacaggcacctgcaaaattgatagtgattgcacggaaggtgttcgttaaaatgcctcaaacagaaaatagagagcacaaaaaaggaaactttactttctggggatttcatgattcccggagtttaagatcttgacagatctaactaatctgtttctcttcgcgttagtacgatggtgatgatgaattcccgaaactagagtttctactccattcagcaactccataactctgtactaaagaagaaagtggaatttacttaaaatttatttctgtaaatatacagtcattcaatttttagccaatcaaaaacgacggaaacaacaattttgactctacaaaataatatgtaaatgtaattaattatttgaaaccaaaaaagcaatctttatggataacagatattttacaagcttaatttgaagaagaagataacaaaacaaaaaaaagagcgtggctttatctatcatctggtatccactatccacaactggggtcagcttctggttctctctctcggtaactttctgagctgaagaaccctaattcttatcttcaccggattccgggtatagggctttgtaaagttgttgaatttacaaagaaagatatgctggtttgtctgggttttgtagaagaatctgtgttgttgctttgagattaaagtccgaacaatgttgggtttgattcatgtccttgatgagctcgtcaatg

SEQ ID NO: 21167 - DNA, 3003 bp, Unknown
  misc_feature (1)..( 3003): 2750-1469P.txt file - cDNA_ID_1841162; gDNA_ID_1621096; Annot_ID_55702
aaaaacttgaaattgatcttggcaaatctaagtagcatcttgttgtgatcttcttcttgttcatagaaagaaatgtattccctcgcgaatatcatttcggcattgtaatgttgaggcatgcaaagagcatttcgtatacgcattaagatatggggagaacttgctccagctctagctaacgactccaagtttcttgtagtgaagcttaacgcttcctccaagatatcttctcttgttgtccttaagtgagcagcttcatacaaactcaccatgcccttgacatcactggttatagattccataaacttttcattctcccctttgaatctcttgaaaacatctattggtcaataggagaatcttgttaatacatatgaatcgattacaaaaaaatgtactggtagataacttttaccggtagacatgttgtaaccgtatgtcctgaaaacccaaaacatgatggaaatcgtgtacaaatcatcttcaccggctatcatctcctgtatcttttcaaaaccctcttctagactctgctcaatctcatcttcaaagtgaaacgctacaccaaggctcacaagcatatatatgaaaagaatcctcttcttggtcgactcaatgcttttcgaagaaaacatgagcatctcccctacttccggctttagtctctcaatctcttgggcaagggcattcatttcctaacaataatatcatatgttcatacccgttacatcgatcttttacatttattatatatatgtttgtcagtgtgtattatagactcaccgagacatcaacttgagcagagaggaaatggtgaccccattttgaaagcggcagtctcttgaacttgcgattactttcttgatcatgacaggcccgagtaggggtggccttcatgcgaacaagctttccatgctgacctgaaaatgacttgtggggaaagctagagagttttcttaccgaaaataaattggaacgtaaaggaagagagagtatagatccataagctgatatgcattgcatgtttactactagtgatatggaatacattttcaccaccaaatttataggcaaaacataagcgttttcattaagtcatcttttgaaaagttttggaagaatgtatattaatacccccatatttatcttcttcagtgtataatacaacctatgttgggaccatgatattttctgaatttatagtgatattagtttatctttaaattgatatttattaatctatatagatctttttttaattatttaattttttaaagaatacgagttgacacaattcaatatacatcaaattaatgacttggatgttgaaatttgtgtagtattagaattgaaaatttaatatttcaaaaaactcatttgacaataaatcacaatgactataactgaattcatttatataatagatatacatacatctaagtttatgattaataacctcaactatcagatttttaaatgtagtagactattgaaatgaaaataatgcagattaagaagttgtatacttataaaaacttatgactaattgtattaggaagttataaacgatactacaatatgatagttttaaaacacaacataatttaatgaaaattagagacaaaatcattgtttgatgtaataatagttcaagacaaactctaacaaacattcaatagttcaaaaaatatttaaactatagattatatatattatcgtatatatattatatttttgtggttattaatttatgatgttattaaaatcatattttttatatagggttttaaaaaattgttaacttattattttatcaaattatgttaaattttacattcacacgacttgaaactaatataatattatctccttgtatttattaatttatcaaaaattaatttgtagaggttttactgtaaaacatgtttagtttttcattttttaaaaaacctccaagtggcaaaaataagatccatctccatctaaaaaagtgcaaacaaatctccatcatttaaaaatcaacgttaacatccatatctattgttgttgttttttacttctttttctcttggtcaaactctacgttagtttgatcaataaatatgacaagaatttttgcagtctcataggcgtctttgtaaaggttagttagcgtctacataattttccgaaagatataattttcttgagatacagttaactcaattactgaaatgtaataactttctaaaagttgtggctattaaacaaaattgtgaaaaaatttaaaccaaaagccacttcaaaaacaaagaaaaccataaccattaatcaaaattcttttttttttgttaacaagtactagttgcattaaattgtaaacatatggtggtgttgtatatgtttgatacaaagaacctatataacaaaggcttgttgggatagtgcatctgccacattatttcttttccgattgacatgtccatagatgagtgtgatagcttcaacatccaatatcgtataccaccaaagactgaagagtagtaccaagaatatttatatatatatttatttatttatttattttggtaaggagaatatttatatcatgatcccaccatactttaattgttatgaaaaaattttaatttgattttcataaattttatagtttagttaagtataaaaccacaattttttttctttcaaatattatttttggagaaaacccccaaatttaaaaggaaagagaaaaaatcaaatcattcatctttgagctttcttttcttctacagaaccctaatttcatgttctaggtgtctctcgaatggttctcatctcattgattactcaatctctagggtttagtggttcatccaaattcgtaccctaatgggtgccgtagcgatcaatcgtaaacgcagcgacgaatccttcaatttcattaatcaacaatcaaccaaccctttacgaaattcaccgtatttccaagcttccaagaaacgaagattctcattcgctatg

SEQ ID NO: 21168 - DNA, 3003 bp, Unknown; identical to SEQ ID NO: 21167
  misc_feature (1)..( 3003): 2750-1469P.txt file - cDNA_ID_1841162; gDNA_ID_2926164; Annot_ID_139844

SEQ ID NO: 21169 - DNA, 3003 bp, Unknown
  misc_feature (1)..( 3003): 2750-1469P.txt file - cDNA_ID_1841194; gDNA_ID_1971812; Annot_ID_58128
ttgtgctttaaataaacatttatcaaattgtattcatcttttaactccgcaaagtgatataaaattcttcttacgaaatttctttaaatatctatgaattacatttcgtaggaaaataatttgaatttgtcttataaatttacgtttcttagaaaatggtaagaaactttctacaaaatttctaatggttattttttcttaatgaatatcttctatttttctaccaattttcctacaaacatatatgttgcaggatatctgcagtgcttgaaaagatttgtcatttgtcaaaatgtattcaacttttttttggacaatgtattcaagcttaacatacccaaaaaaaaagtaatactagtataattttctactgttcctaggtgacggttatactaacgacttttatgacagtaggtaattaatttcaacacagaacacagcaatgtctagtaattaaagtcgttgtctgccacaaaacttatgaaatcttaacaactaattctttctatctttatgacttaaagagtcaaaagcctaaaatcatttcaaaatcccaatttagtaatatatattcgtatcatttaaagtcaagtcatttttggttaatcaaatacattactactaatatattacaataaacaatcaatacttttaaatcctcaaggaagaaaatgatctacgcaagcatgcacatatatatgttaattcggcagcatgtaaataaattgatttcatacttctttgatgaattacaaatcaaataagaatccatttttaaatcaatttaactaaacacacacactgattttcaaaagagtccattttttctaaatcatttgtaaagtcacatgggaaagggatctttgttgaacgtaatgtaaatagtgggaggttagagaatctgcatgcgcattaagagaaaatgtaaccacccaagtcacttcttgaaagtacaatttatagttattgtccatcattaccctcataattttaacggaaaaagtctattattgttaagttttcatgttatttaattgaaaacgttcaaattcgatggacgtattagtcaaagtctctgtttaaaagaaacttgtgcattatgtcaatagcaatatcattaattatctactcgaccaataacgttattggtctgagccaatcgtgatatggttaatcttacggaaaattttgtgacataattattatgaattcaacacgagatttttttattttctttctaactttcttagcttatgattccgttgaggtgacgacatgtcctgacttcagctttatgaatttatttctagaactatgcccatcaatatatatgcttttatttgtttatcaaacttattgatgtttatgggaagttttatttttaattagatcatatgctaaaataatattaattttcgggattttaaagacaaatgaataaaattgttttatcagaaaaagggttgtacagttgtgttaattcatagtgtaatgtccaatatatttataatagaacattgtagttaactgtttagcagtgatcaactgtatatcactatactaaagtaacatatttttttagctatgtagttctagaaaaataagtatgaacgcattgaatttgtattcaatcttgttctctattgttcacaaaccatataattgaatcgaatcaagattaaaaatacaaaatcctaaatgtatgttcttctcacattcaatacatattttcacttatttgatcgtatatatccaaattgtcgtatcaccattatacgtgtacaatggcacatgtggaattaacaataaaaataattgatatatgatattttttttttcggaaaaataattgatgtatatgtgacaatatgaaccagttttaccaccatattatatatatgaaaagggcaaaaagtatgtattctaacggattgatgcaaatgaaagtcgttatatgattcaaatattcaatgctaaattcagtatatactcaatctagtaaaaaatccaaattgtgatctgtaaagaagcttcttttggcatatatcttattctcataattagttacatgttaagatggataagataagaccgtaacaaatacaagcaaaatagttaacaaaaaaaaaaaaaaaaaaagacaaagacaaagcaaggtatttgaaaactcaaagcttaggtaaaatgtaaaaatttgataattatgctcgcatctagatcctaataatacacagagtaccttgaaactaaaataaagagcgtccatattttcggttggttgttgaaaacttaaagaggccttcatcaattccatcaagtgacatttttcaatttctgctcataaatgatactctattttgtcatcaagtctgttatatttttggtctatatgatgatatgacgatcacattaaccacatgacgtgtaaaaatcaaataactttccgtatcaacttaagaaaataatcttttacggataagaacatatttatccacactctatttagggaaatgcatacaaagcatttagggaatattttaacatatttcttaaacaaaaatatataattgcaagtattctaagaagtatatatatcaaaattaatgcttaacccattcaagaattcattcgttttattacaattgtatattacatattttcaaaaattcaatattttgtaccaaaatctggtgagaacataaaaacagagatatatgttttctcttgacaaaaaaaaaacagagagatattgtagttttcttaatagagccagcaatggtcaaatatatcatgtgaaatagtttctaaaatacatcatccttttcttcttaattaataaaatagtcaaataaaaaatcgtctccaatctttttctctctctggatttgccaataaattggggataaccagctaccaaactcattcacacaaagtcataacagtcgtttaaagtctgatccttttcatttttctttagtgtgtgaaaagagaaatacagttatg

SEQ ID NO: 21170 - DNA, 3003 bp, Unknown; identical to SEQ ID NO: 21169
  misc_feature (1)..( 3003): 2750-1469P.txt file - cDNA_ID_1841194; gDNA_ID_1971812; Annot_ID_175779

SEQ ID NO: 21171 - DNA, 3003 bp, Unknown; identical to SEQ ID NO: 21169
  misc_feature (1)..( 3003): 2750-1469P.txt file - cDNA_ID_1841194; gDNA_ID_2926171; Annot_ID_140138

SEQ ID NO: 21172 - DNA, 3003 bp, Unknown; identical to SEQ ID NO: 21169
  misc_feature (1)..( 3003): 2750-1469P.txt file - cDNA_ID_1841194; gDNA_ID_2926171; Annot_ID_199523

SEQ ID NO: 21173 - DNA, 3000 bp, Unknown; identical to SEQ ID NO: 7790
  misc_feature (1)..( 3000): 2750-1469P.txt file - cDNA_ID_1841214; gDNA_ID_1621163; Annot_ID_57168

SEQ ID NO: 21174 - DNA, 3003 bp, Unknown
  misc_feature (1)..( 3003): 2750-1469P.txt file - cDNA_ID_1841214; gDNA_ID_2926161; Annot_ID_139721
caagttgattatatacatctgttgaaaccgagttgatcatggtaatattcatctccctcctgtttcttactttttgatattgaactcattcgaaaactcttctaattttctgatattgttgattatacagcctcacccggatgtcaagccaatggcatatgcaaacaatgattaaagatgttctctcttcctttaagcttatccagcaacagttattctcatgtagattcagtttttccctttttcaatttttttttgttttagaaacccacttaaggattccatcaatggtcaataaaattttcaaaaactctaaaaaatctctaaactactaaactatccaaatttattaataaaaaatacatagaaactttacttagaaactaatcattggatttgctattacttactaatctgtttattttacttaaaaacagattattttatcttcaaattagcttacgaatctgtttttttctctcctagaattaacaactgcgtttatgttgtgcgttatggttttataaattgttaggaattatgagttgaaaatttaatctttgtttaacctcttatgagtagtagtagtaatggtttaatttattactactactcgaagacccaaccgaatccgatccaaaaaacacgaaaaaccgaaccggacctgacccaaaaaaaccaatccgaatctaaacccgaaattttaaaatattccaacgcatcctacacttttaaacccgaaaaccggaaatccgaacccaaaaaacccgatccgaacttgaagtcttaaaatacccagacgggttttagatttctaaatccgtaaaaacccgaacccaaaaaatccaatccgaatacccaaacgcccatgcctagaatttataaaactattacagttaaatctaaatttatcttttactaatcgtgtgtgatcggttttataccaaattagaaaggaagttaagatttaaagttacactagtggctagaaattaaccatgtgtttgattgcatgtgtgtgatagatttccctaggcatgtaatctaaagtctaaacttcctcctccaattccgacttcggacctccttttcttaccactttcaaaattttccagatcttgttaggagctttatattagtatcttgttacaagctttctttaatattatcatcaaaaaggcataattacaatgccttgacaccatccatggagaatcaaacatcgttatccgaatccttaaaaagcaatacgaataaaggtcccatcgcgtacaacccacgggcctctctctatttcaacctcattaatcgtcttctccatcaccatgcatcatcatcattaggtctaatatcatgcgtccacaatacaaagacgtgaacgataaattagactcgacggccaagcacaaaaccaacagccatggcggtcgttatgataatccttacgtccacattactagtcccacatcagcttctgataagagtaagtctaaaaaatgattgttcgtgtcttaattatgcttatgataaatcttgattgatatatgatacatgtagggtcgaaggataaggttcttgaggtgttgaatcgctgtgggaagaaagtagaggacgctactcgcaaagcggaagcattagtcggaggtttaaaagaccaccgtacgtgagagtttatattttacacatgttgtcttcttaatcgatccctaaaacatttttttacatatggtctatgcatgaaaccgggcatgaacagtgaagtttagtcctagcataagtgatgcagcaatggctaggctttctcaaggcactaagatgatcgttgaaggaggaccagagagagtgtttcaacgagagtttggtgttttagctgtagagaaacttttagattcgtttgtttgctacatatcgactacttcgggaccagtgaccggagtgatatacatttccaacagaagaatcgctttttgtagcgactatgccattcgtcttccttcttctgccggtggaaacggtgttgcggcatattacaaggttagaccatgagtttcaaacaatattttttgtaatagaagtttggttcatacttaaaaaaaaagatctaagttggtattggtaacaagaattgaattgttctttgtgaaatagctgttttcattttgtaaaataagaaaataataatttggtttctaaagattagtgactatataatatattgagcaataataaaatttatatgtgatattgtattataatgttgtatattgataggtggtgatggagtgggagaagataagtagcattagttcatcaacgaacgtgttgaagccaagtgagagatacgtgcatatggtgacacgagatgggtttgagttttggttcatgggctttgtctcctacatcgatgctttcaattgtctcaacaaagctctcctcaattcccgttgtaatcatgccatgtaatcaaattctaattttcttatcaaaactacgaagactattttgatcagatctcataaaatatcaaaaaaaaaaattacaagtttaccaccaaaattatttatctgattcataactttgaccaaccaaaaaaatacaaaattgggataactgagttacacaggtaacttattgatgcttgttaaattgtcattgcgatttcgtaacaaagggtccaactccaatcccataaaaaattacgaacgatgtgtaatgactaatgacgcaacgtggcaatcatgtataccttcaacggcctagaattctgtagattgcatcaatcaacggctaagatcttcttttggctcttaacaaagtcattggctgattcagtttcccaagaaatgtctctgtcattgtgcagtagataagccactctctctctctttctctctttttgctattataaagaaaaagattcattctcccaccattgaggtttaacttatacaaacagatctttttgaaattggattcatctaagaagcagactctgttttcatg

SEQ ID NO: 21175 - DNA, 3003 bp, Unknown
  misc_feature (1)..( 3003): 2750-1469P.txt file - cDNA_ID_1841306; gDNA_ID_1620628; Annot_ID_47193
gagtttttttttttaaaagacagaaaaaacaaacattaatttcttttgttattttattttatttgtgaagaacaaaagatgaagttcgtcttaggatttatgatatcaagtgttcttaatattttttagtatgtaaaattatcagtgaattgtgaatattttgcatgaaatagaaactgatacgatacatataattaagaagaatcttactatatatgatttattagtaaaaattccaacagtttataaagttatgctagcatgttgcataggtttcaaaattcatgttaactacccataagatatcagttacatgtattatagtattgatgttttgtattaatgctaaaaatatttggctcttgtgtttgttagtagcttagtattaattagtagtgttatctccgtaggtaggtacactatactatgcatgaaagtgaactgtgaaccctccaactattacttctctagatagagtattaaataactcgaaaaaaccttttttcattttatacaaacacccatttatttatatttttgaaatctatgagaggtattaactacgtactgtttaagtagtaaaattaatcataccatgtgcaactaagttttttgggtaaattatacaccacttgtaacttatacagatggtataatcaaactctataaaacagttgaacatttatatttcgtacaaatcaagtcattttccaattaatttatttagattatgatgtttagcttaattatttttcttcgatcgtaaagctgccacctcagctgaacctaccaagatcacaactccaatgttacggcgagatggtctacagcttcgtcggtcaggatctgcttggggaatgcagccgccgtgatcttcccattgaacggctcaaatcagtggtgacgtggaacatctccacactccgtccggtggtctttggcatgtctccgtacaactccgttctcggcgagactcaccacgtatcgaacggtcacatcaacgtcatcgccgaacaagtataatcatttgtaatataatcattatttagtcattacaactataaacgaaacatagactgatatatatacatcgttaactcttaggtagtgcatcatcctccggtttccgctcttcatgcgactcacgaacaagaaaatatcgacgtgacatggtgtcaatatttcactcctaaatttcgtggtatgtttttttttatcattttagttttgtagttaaattgttctgctacatcccaaattatctcaaaaccaagtctttttgttgttgttgtcaaacctcaaaaccaagtctagttttgagtaatccgtccaagaacgaacaccaattcgaatatgcatccggtttacactttcaaaccgaagcatctcgtctttgttcaaagttcaaacatatctaatttctgcatgtactcatttaatggtccataaggtactcacgtggacgttgaggtaaagggtaaaagggtaatgaagcttctgaatcatatagagacttatgagatggaccaaccgagactaataatgagattcttaccggcgccgggagcttactgggccggaaaagtgaaaataaagtgtccggagactgatctcgaagctgagttacatttgatctccgattcattcattgaaagattcagaggcaacaacaacagatcaataaaaggaaagatctttgaatcttcctctggtaatcagctctacaacatttttggccattgggacaggtaaaaaacatagtcgttattacagctcttaaaaaccatcattagctttgaatgatgtgatacgcctcccataaatatgtttcagaacggtaatggcgaaaaatataaagactggtgagctcgaggtcatttacaatgccaaggagaatatcacaggactcaaacctccaacagtcaagaacctggaggaggtaacggagagcgagtcgacaatggtgtggagtgaagtaagtgaaggaatactgaagaaagattgggaaagagcaagagaagctaagatagttgtggaggagaagcagagagcgtctttaaaacagagagaggcttctggtgagtcatgggttcccaaacatttcttagtggtcaaagacggtaaagactgggattgttcaccgctacagcctacggttcctccggcgccactcgtcatcacataggagcaaggacgaatcattcaccggtttcaagattccaaaactctatgttgataattataggttttgaaattataaataaatagaaaaataggttgatacttgataatgacatatccgtcaataagtattaaagatgaatgatgttttttgtcaattcatttgaggttgaatgtgtgagtgatacgtcaggcttttgagaaaaagagttcttaaatactatatgtctatatgagatttttcacctatgtaataacagaaaatattttgtttttcctctacaaaattatttataatccattaaatttgaaaatgaagattcaatctacttctctgttattcgatggtgaatttgcatgtattaaaataatctgtgttaaaataataaatcaatttcatctccataataatttaataatagttaagcattagggcaaccttatttaaaagcattaagcgagccttaaatgacgaaaacatggatctaacgagtaacgactaacgcccctccgatcgaatcaatagttaatgctaacccaactctctattttgatatcctatctatctttctagctagctatatagatggagcaaaaagattgatactactagtaattgtcactatatgtactacttagtacgtaagtcatagctccttggctcttttcttaaaaataatttcttttccaaaagtaacaacctcaaatggtaattacttagtgtgagtcattgactttttggtaaagaagtgaatcatacacgtagattaaatttacagatctaatatttttggttgtgtataggcagaagaagagaaaatg

SEQ ID NO: 21176 - DNA, 3003 bp, Unknown; identical to SEQ ID NO: 21175
  misc_feature (1)..( 3003): 2750-1469P.txt file - cDNA_ID_1841306; gDNA_ID_1620628; Annot_ID_162569

SEQ ID NO: 21177 - DNA, 3003 bp, Unknown; identical to SEQ ID NO: 21175
  misc_feature (1)..( 3003): 2750-1469P.txt file - cDNA_ID_1841306; gDNA_ID_2926188; Annot_ID_140872

SEQ ID NO: 21178 - DNA, 3003 bp, Unknown; identical to SEQ ID NO: 21175
  misc_feature (1)..( 3003): 2750-1469P.txt file - cDNA_ID_1841306; gDNA_ID_2926188; Annot_ID_200779

SEQ ID NO: 21179 - DNA, 3003 bp, Unknown
  misc_feature (1)..( 3003): 2750-1469P.txt file - cDNA_ID_1841337; gDNA_ID_1620728; Annot_ID_49346
ccacacatcccaagtccatcaataacagtattaaaagtgacaacgtttggtgcaacacccgcttcttccatttttgagaacaacttaacggcctcctcaactttacctcccttgcaaaacgcattaatcgctgtagtgaacaagtaaacatccggagaaacccctttgcaaacaacatcaaaagcttcacaacacttctgaaactcattagctctcactagagaagtcaacaaaatgttgcaagtcgtcttagaaggaaacatacccttgtttgcaagaacaggaaatacatcaagagctaaataacaaccatcacgcttgaactgtgtgcaataaacttcaatcaacaaatccgacattttccttctgatttcttcatcaaaacacaaactcaaactcgccattgcatccgcaatcgcaactcgactatctctcaaaccacaaggcaaaaccggtacattcccattgatcaaacgaatcaaaactaccctagcagccgataacagattcgcatcaagcaataaacctatcaataaacaataagaacggagactaaaggagaaactaaacgaatcagaagctaatcggaagaaatccaaagccgtcttgggattaactttggatcgaaactcaggaaacaacctatcgaattcgagaggcgatagaacagttatcagttgtttacactgctcgtaatctagagatctcttcgacaaaactgaagataatcgttcgtgtaaatgccgatcagaggaagtctcttccgatttatccggccgatgaacacactgttgcaggtatcggcttgtatgaaagcattttcgagatttcgctatgaatttcaagcggcgagtgaataagtagcttgcgcgagaaagtctcctcaaatccattggtgagaaagagatgaaatgtgaggaagtcatttgcgaagagattttagggaaatagagaagagccgccattgatcaatgtcgaagaagaagaattgaagatggtgttgagccaccccattggagagagagagagagacggagaaattctcgagaggaggcgatttgggcaaaaacccagggttcagacttgggggacacgaacggggtcgataaaattgggccttttatgggcccgtaatgtttaatcattgggctgaaagctgcaacatagtagcccaatttcaactcgtaaagttttccgcgttttttcccctatcacggacaaaacaggcagccctattgacaacttgtttaaaaagaagaaggaaaaaaaaatccatatagagacgtaatccgatggtcgatggagacgttgtaagaaacaaaagaattgtagaataaggttagctagaaattgtcaacaatgggttcatagaaaaactcgtttgaatcaaaattgtgtctaaacaaaacctttgatttggtgcgtatatgacccacgcattgtaactttaatttaagtcatgataatatttaatatataatgtcatgtcatcactgtttagaataaaacgtttagcttacgattcacgtggaaacaaaattattcagagatttcatttcatctatttatagtaacattcgtcaatattaagtatcatacaattaataacgggtataaatggcaaaatcctagactaaaaaggtgaaactaaaaagaaaaaagtagagagagtatacgtgtcgtgaatgacggagtaataaattatgcaatagagtagataaaaatacaatgttttcgtcatactcttactctcttaatttaataagatatatcctttatgtaattgttctagtaattgatcgatattaacgcgataactccttacgaatctcactcacgattgcatttgcatacattatagatgtaggagatactcggtgaaaatcttagtagactagaaagcaattgatcaacatttagtaacaagctatcaccacaagttcactaaatatagtatatatttttaaaacaaataccaacacttgcattaaaagcacataaatggaaacatttaagaggacacatacaagtcccattgattatttttattttttgaccaaatactaacacacctttaaaaataagaaaatgctaacacttgcagtaaaagtgatactactaaatatagatattttaagagaacatgatacaattaattcttaaatactgtattgttttaaattttatacttttatagtttctaattattaaaatacatcataatacacaattttcataccatatgtcaattaagagtatcaataataatagtccacttatgtgtagatatgtcagacctatttttatgaagtatcataaataatgtatgcacacatcacaatcgtaaacaaattactactctttctatttcataaagtttgatgttttaagttttgcacataaattaaaaaaaaagtaacttttatatattttaattattattctgttagtttaataatattattattacctctgtcctttcactattgactacaaacaaaacttacaatcatatttttacaaaacatcaattttgatgaaacaagtaaaaatttcaaaacatcaaataactcagaacagaatgagtaaatttttagctcactgttttaaccatagtgcctactatctttaaccatctccaaaagacaccatttgtctttttaactatactaaaacaatcaaaacttttaaaaccaatcatatctcattttaagaaaataggttaaattatctaatataataaataaaaatctaaaaaggttgccacgtaaatagaagaattgattcttatttatttttttcaaaagtggaagaatcattttcttctattttaaatgtaaacagaccaaaagagaaaaagctcactcacacaaagcacctccaattctctctaccatacaaaaaaccaaacccacaaagtctctctctcttgctctctcggtgattcgattttcagaaccgaaactccggcgaaaagattatggcgggacagtcacgaaaatg

SEQ ID NO: 21180 - DNA, 3003 bp, Unknown; identical to SEQ ID NO: 21179
  misc_feature (1)..( 3003): 2750-1469P.txt file - cDNA_ID_1841337; gDNA_ID_2926173; Annot_ID_140228

SEQ ID NO: 21181 - DNA, 3003 bp, Unknown
  misc_feature (1)..( 3003): 2750-1469P.txt file - cDNA_ID_1841345; gDNA_ID_1621108; Annot_ID_56033
gcaaatagagttttggacacagaatcaacagaaagcatctcaatttgtcacaatctaagcaattaggcagcatcattgtggcaagaacaagtttatgaccttgcagaatactaaagagaatgaattaagatgattaaaagacaaacaagaaaacacattcatgaggaataatcaatcatatggataatgtcgagaaagagactctttagtgtttcagtcttatcaaacaatcatgagtttcacatctaactggtgtcctaaaatacttgacacaattatacaagcaaacaggaatatgaagatgatagaacaagtaaaaaaaacatacttgattctgtcgaatttgaggctcactctatccgcatcttctttgcctgaagacgtacaagtagattcatgatagcagagacattaggaagtgttcaattttactgagaattgagaaatgtatatagaggagaaataacgaaccttggagtggatcataaaagcctaacacctcgatttgtttaccgtccctgcgcgatttttcatcggcgacaactacacgatagaagggtcggtgtttacaaccaagacgcgcgagccttatcttcaccgtcatctctgcttggaaattgaggtctgagaagtgagaagaaagaagataagtaaaggtttttatttaagctggtgggttttggctttttccccttatctgtgttctctttcttctgttacgatcgttattgataagatgggccatgttgggccagtttacattttatctctttattcacattaagcccattagatctgctatacgtttcttttcgtgatttgctatacagaagtcacttatctaaaatctcggattatccagaaattccaaaatattcaatcagcttcctgtctttaaggatcttcctaaaagaaattgcttcaaaatgttcaatttgagaacaccagcatcttgttatcgtataggtgtttgactgttagtagagagatatacgaagtccatagtgcatgcaacaagttagatataataaaataaaataaagttatctccagtctcaaccactcagatgtcgaaattcagagtgatgcgtacatcctacgagtatgacttttcaaacaaccaccaacattcacaaaaattgcaaaagcttctacaaagataaccaaattaaccaccaccaaacacaaaccttcttcctgttaaatcattgctacagtttagctgtcgttttcaattctaaggttcacacaagattaaacgagctcatctatcaagagttattatgatccattcatcatcttctccatttcaacactacaatttgctaacccaagattcacaatcacaatctgatcaaccaaattaaagagccatcaaagaaagcgatcagttaatgaacaatgaatcctaaaatgcgagttatttaatttccatcatgtacaatgagatcttcagaagcatccgaattacttactactaaagaggaattgaaattgaactaacaaatttacacatcaattaaacccagaaactgagaaattctaccgagagttcttgaagaaaccatcccatcgccttgtgaaacttcgaaatcccaacacaatcagcacttgaatttcatgccgagaccatgcttaccacgaacgataccaggcttcaaaaacggagatatcttcgaggcatagaccttggcgattgctcttttccccagtttcctcatcctttgtctccccaccttcttactcacgctacgcggaaccaactcttcgtcaagatcatacgaatcgtcgtactcgcgatcttcttcgccgtcgtcattaacactatctccgtacgtaattccaacagaataaccagaacctccaccgagaaacatcatccgctgctgagaccatccaagatcattctcatcaacttcatcgcgaacgacatcatcgccaacatcatcatcaccatccagatccacggcgagatcaccaccgtcagcaataggaattatctcatgcggcggagaaatgacagagggtgcgacaaaggaagcgtcgtcaagagatatgacgtcatcgtcggaaagactatcgacggagaaagaatcgtcggagaactcgccatcagaaggattaacaacttcccagagatcgagatcaacttcttgatcgagaatgagaggagacatggtgataaccctagatcgctgcgccattttcgaaattgtgtgttgtttagaggttgcttctttgatttttcaagactgtttgtttttgataaccagaggaagttaccctattaatagaggcaaaccaccgagtgttatcttgtgctaattggtagttacactgttgaagatacgtatttacaaccagttatatgttgccacgtaaggattattttgccacctcagcgtcgccagaaagtttgccagtaaataaataagtggacatgtaaatttgatgtcgtacatttatgataataaaaactaaaaagataccttttcttccatttttttagaatatacctttttttcctttcaacatctataatttgatcatttctttctaattttgttaatttctgattatattaaacacattttctctgttttctgtttttttaatctaattaacacataagaaaaagggagttaaaaagaataaatgtactctccatttccatttgatgatattctttaagtttcgtggctctttttcaatttcattggctctgacattttgtttttaattaaaaaggaagaaacaaacaaaatgtgaatccttgtgagttggctcactggcaaaaaagaaagaaaaaaaattcagaagcctttgttttcatcgatgaataaattaacaaacaaaactaaaaaataggatattcgctggccgaatcgcgtcgatccacatcgcaggtgagggttcctgcaatttatccctcgtggtctctgaatctcagatcgtcgtcaacgaatcctccattttctgaatcaaaattttctggaaacaatg

SEQ ID NO: 21182 - DNA, 3003 bp, Unknown; identical to SEQ ID NO: 21181
  misc_feature (1)..( 3003): 2750-1469P.txt file - cDNA_ID_1841345; gDNA_ID_1621108; Annot_ID_171687

SEQ ID NO: 21183 - DNA, 3003 bp, Unknown; identical to SEQ ID NO: 21181
  misc_feature (1)..( 3003): 2750-1469P.txt file - cDNA_ID_1841345; gDNA_ID_2926207; Annot_ID_141813

SEQ ID NO: 21184 - DNA, 3003 bp, Unknown; identical to SEQ ID NO: 21181
  misc_feature (1)..( 3003): 2750-1469P.txt file - cDNA_ID_1841345; gDNA_ID_2926207; Annot_ID_202336

SEQ ID NO: 21185 - DNA, 3000 bp, Unknown
  misc_feature (1)..( 3000): 2750-1469P.txt file - cDNA_ID_1841503; gDNA_ID_1621182; Annot_ID_57403
ttttgttttatttttttctcccttgcacaaaaagatcattttcaatttttcattatgagttgattacttgatttccttcatgtgttattgaatttggaggactagtgattcttgtagtgattatcacattttcccactaggtagtttagtgtcagtttatttcttaactatagtgattttaaccatttacggtttacacaaaatacttctacagatttggtaaaacgattggaaaagagaattcaactagaaaaaagagagggttactgtttgttacaaacaagacaagctgtttttcattctaaattgttggcatatgactaaaacaaaatattcttaagaattaaaagaacaatcatgatcaaacagagtacaaggagtatagttgcacatttcaccattgctccttctctttgtgttctctccgcctatttaaaaattgaaatgtctttgtgagttccatacggtgaaaaatctgtagtactcacaaaatcttatgagttttgggtaaagaatcaaaccttttgtagttgtttatagccttcctcgaccgatgtagaaacgttttggacattgtagtctatccgatcaacaatcgtgccctaattgatacaagaatataagaaaactaattgttgagaagccagcaaaaactttgtatctagccagttatgtaattcataagccttttaatgactaagctaggcacctggtcaatcacaagggctgataagtctttcattatctgtgcaaggtcattcacggaacccagaacctagacagaactctgaagttaatcgccatcgaaaatgtgaagcacgcagcttcttaaatatggtcgagtaacaacttccattacctgttgtatctctcgttccctttccgctgagacatgttgcccttccttcaacttgattgtctggtgttcatcgaaaccctacaatttattgaagaccagcgattctcattatggtattggcagagtaaggacgacaaggttctgaagattgattaaaaaaaatctgactcgtcctagcatgataaccataagaagtgtttcttaaaaatgtaaggaagacaaggataactgattaaaaatctgaattgctctagctagataaccatattaagtccttattaatttgtcaatgatatatagttttacaatacaagtaagcacttaccatcccaccaagttcatcctcttcatccagtctcgacatctttccattcacattaaactctaaatctacttcatcctgaccctatgattagagaagccaaatacaaataagaacatcatattacggtacatgcatgtctcaagaatcaacactttttttgtttatttcttgaaaataaaggaaacatacctctttctgctgctgcagacgttttaagtaagtagactgttttctgcggagctccatggaaaggttctgaagatctgttgcaagagaacgctgtcaaaagcagtatgccaaaaagtaggtcaagtccattggagagccccactatacatgtacacagaactttatcctcatgctacaaactcaaaacatagaataacccaaagtacattatatagagggaaaaaaaaacacttcatacattttgctgactgataatgtcaactagataggtagtcaaaacatatgagagtgatttaacccaaaattcctaactttcttctctaaaagcacaaaagaaaaggtaatgaccatgcattctttattgttaacaagctcgattctgaaaaagtgtccaacaacctacctgcacatttttcctgagatttgattcttcagaaggccctctagtagataacatctgcaatctcttttctgacttcctcaacaaatctgtgatctcatgagtgagcatctcgacttcacgatgaatccctttgttatctccaaatgtaggcataagagcctttgaatgtgcctttgctagttcattcattttgtctcgcaccttttgtatattaaaagttatctcctcagaatcatcaacccaagctggtggcataccaattgtgaaggcatcactactgcaaacattcacaacaacacttaaatcatttgctcattctgttacctaattcgtttagggttctaattctgtatctcaaatcaatcccatgattacaattcgtttctatatataagttcatagaatttcccaggttttgcagaatcaaacaacacattatattattaccttgatggaccaggatcataggaattcaaaggagcataagaggagtgattggaccgggaaaatgaaccgctaaccatttcgatcaccggaccaccgaacgaatcagacgccgataaagataatggagcacgcgcgctcttacacgcatccctgtgtttccggtacaccgtcgttcgattcctcgtcgccatcaataccaaatcaattgattctcaacagaatctcgaaagtaaaatttcccggagaaaataaacaaaatcggagcttttgtcgtcggcaaaagcaaacgaatctgaatcgcaaaatcgtttctcattagcgcgtgttacagacttagcaacgaaggagaagtatttgggcctttttaggcccatttatatattgggcttatagtccacttgcgcgatagggtcaatataagtgtgtggagcacacgttttaagacggtggcgcaaagacgaaaatgcccgtagattcgtggcggctaaaagtcaacagagggacgttggtggttcagggtaaaagaggctatagtgaccggttaggggtagtttggtcattggatttagctcaatagattcgtgtccatggattccctcatgtcgccagagaaaaagaccacatttaaaggtcttgcctttttggtgtgtttcctcgcactttcaggctgaacaaagtactgacagatgctaataaatacacggaggaagaatatgctcctttaattattatctgagatttttcaattcaagttcgtgtggattcagaatcaaaatg

SEQ ID NO: 21186 - DNA, 3000 bp, Unknown; identical to SEQ ID NO: 3440
  misc_feature (1)..( 3000): 2750-1469P.txt file - cDNA_ID_1841509; gDNA_ID_1620646; Annot_ID_47608

SEQ ID NO: 21187 - DNA, 3000 bp, Unknown; identical to SEQ ID NO: 3440
  misc_feature (1)..( 3000): 2750-1469P.txt file - cDNA_ID_1841509; gDNA_ID_2926179; Annot_ID_140479

SEQ ID NO: 21188 - DNA, 3000 bp, Unknown
  misc_feature (1)..( 3000): 2750-1469P.txt file - cDNA_ID_1841513; gDNA_ID_1620646; Annot_ID_47609
tgtaaggctaaataacctcattttagtaacttagttttcttttcatgcttcgcaatgtaaaaaaagaatggttgatataattcttgtcattgcagccaagactttacagcttatgcaaatgtttgcttcagagagtttgggcatcacgtcaaattctggaccacgatcaacgaggctaatatattcactattggaggatacaatgatgggatcacaccgcctggtcgttgctcctcaccgggtagaaactgctcatcagggaactcttcaactgaaccatatatcgtaggccataacttgcttcttgcgcacgcctctgcttcaagactgtataagcaaaagtacaaggtatacatgcttacacatttttatatattttacataatcctctcttgaatgtgtgagttacgagcaacatgcaggatatgcaaggaggttctgtgggatttagcttattctccctagggtttacaccttctacaagctccaaggatgatgacattgcagttcaaagagccaaagatttctacttcggctggtgagttaggcagaaacataacttccaaattgtaaaacagatccaaggttcttagctgaaaacagaacactctgttcttaaaaatcaggatgcttgagccttttatattcggtgactatcccgatgaaatgaaaagaactgttggatcaagactgccagttttctcaaaggaagaatcagaacaagttaaaggctcatctgatttcataggaatcattcactatcttgcagcttcggtcacaagcatcaagatcaaaccttctatttcaggaaacccggatttttattcagacatgggtgtatctatgacatgtaggatcatcaaactctatcttttgaataacaaatacaaagtctctgcttctttatttttttttcttgattttcttttgttgctaatcatctcttctttgttttactgctttggagggacagtccttgggaatttttcagctttcgaggtaagagtttcaaggctaccaaattcagatgcaaaacttctcaatctatatttcttagttgttttgttcttgtttggaaaagtatgctgttgctccatgggctatggaaagtgtccttgagtatataaagcaaagctatggcaatcctcctatctacattcttgaaaatggtctctccttctcactcttcctgatctctatctcttgtttgtatcttagtctgtttaattctcttgccaatgcaaacgaataggtacaccgatgaagcaagatttgcagctgcaacaaaaggacacaccaaggattgagtatttacatgcttatattgctgctgttctcaaatctattaggtaagtaaagtttcttattgtattttcttcttctcttctcttgtcgatgtactaaagattaaagattttactacgtgtaggaatggatcagacacgagaggttacttcatatggtcatttatggatttatacgagttagtgaagggatatgagtttagttttggattatactctgtgaatttcagtgatcctcatcgtacgagatctccaaaactctctgctcattggtactctgcttttctcaagggcaacaccacttttcttggttctcaaggcatcatgcaaatgcagagcaacttttcttcttcagcttcttcgtagtagtaatgttgcatttacttaattctcacgaatatgttctagcgaaaaacatcaggcctctgttttactgtgtttgaactgcttgcccttttaaagtctatacgaattttatttttcctaaaaacggcatgctttccttaggcccatgtaatagtgggattattttttacactgtgacattaataatgagttccgtatttcgtttcagcacaccactcgctcatataaaattatttgtaattcggtttaatttcagcataccactcgctctttttatttattttattgtctcataaaaaatatcaaatatttggaaaacaacacataaataaataaaaatattaaagagaaacaaattaccataactatgaatcgccaaagttatgaaaagagaccaatttctttaaatattaatttttacctttttaaggtaacttcagtttggttaattggaaaacaaaaatttagggggcggggggggggggggggtaagcagggattttttgtcgggggaaataaaattgattccttaaaactcttcaaagatttgaaaaaattaagggtggcagctgcctcatcttaactaaggtagatccgcgcctagatatcggcttggtttttgtttagaagaaaattcaaaaatatcgaacatatcacaaatggagtgtttgaagtaaaagaaacaataaaaaaaaaatcgtaatggattggtacacgtacgtgaaacacccccaccatataaacattgtactaattaatgtgatacaactaatcaaacaaaatctagaatttggatttttccatcgaagcaagtcggcttgagaaatgttcgtgagaaatgtacatgcagatgcaggggacggacccaataatattgttaaatttgctagtgagataaaagacgacacataattaattttctgtaaaattttaataaaattgtatttttaaaatcaaaatacaaaaaggatttttaaaaatttggaaaactaaaaaataaataagataactagaaacaaaataaattaaataatgaatgcaaagaaactgatcatagaagaaaaaggaaacaaatgaaatagagggttagatttaattgctataactaatgactgatttcataattttaggggctaaacatgggcccgccgttgagtatatatatgatcttgtgcaacaacaccaaagtctcacgtctcaccaatacaagtttaccacaccttctaatctgtccgacacaatatctcatctaacactcccttaagtatacttgccgatcttttctcttttcttagtatccctactcaaaccttaaacccatcggaccatg

SEQ ID NO: 21189 - DNA, 3000 bp, Unknown; identical to SEQ ID NO: 21188
  misc_feature (1)..( 3000): 2750-1469P.txt file - cDNA_ID_1841513; gDNA_ID_2926179; Annot_ID_140480

SEQ ID NO: 21190 - DNA, 3003 bp, Unknown
  misc_feature (1)..( 3003): 2750-1469P.txt file - cDNA_ID_1841599; gDNA_ID_1620811; Annot_ID_50603
agaaaacccaatgatacaaggaagctcttttgcgcaagatttgccagtcaacacaggagaaagcattcagcaagataaactgcatgatgttgcagctataactaatgaggtaaccgtattgtttcttcctgagtacctttgttcttgacctgaggccgtattcacttttcactgagtaaatatagtcaaaggttcataaatctggactagtggtggtagagcgtattttactgttgggcaataaatgaaagttgcttaagttttcataatattcctgtatgtgaaaaaagatatttccttgatatttgtttttgtggttctacaggatagccagccttccaaactggtgtcaaccagaaacgatttgataatggagggtgtagagaatcgtagtagggtcagtgatgtatcaatgggagggcataaggtcgagcgagaagagggtgaattatcccccactgaaagttgcgagcaagaaaatttcgaggtttataaagagaatgggctcgagcctgtgcagaaactaccagataatgaaataagtaatacagaccgagaacccaaagagggtgcatgtggtactgaagctgtaacaaggagcaatgccctccctgaagatgatgataataaaataactcaaaagttatcagaaggggatgaaaatgcctcgaaatttattgtctcagcaagcaagtttggtggccaagtttcttccgatgaagagcataaaggagctgagagtgaaaatgaggctggagggatggttaattccaacgagggtgaagatggatcctttttcacattttcagaacggtatctgcaacctgtaaagccccttgcaaagcatgtgcctgggacactgcaagcaagtgaatgcgacacccggaatgattctcgagttttctatgggaatgattcactctatgtgctttttaggcttcatcaagtaagtgctacgaaacaaccttctcatgttcctcaaatgtcaattgtctcagtccaaaccgctaattctgctgattttccagatgttgtacgagagaatacaatcagcaaagatacattcagagaggaaatggaaagctccagatagcacatctactgattcttataccaggtggtttattttctaagcatcattggtactttttaattgaaaaaatattatttcctaactgatatttgaaagcttaggttcatggaagccctttacaatttacttgatggctctagcgacaatacaaagtttgaagatgaatgtcgagctattatcggagcacaatcatatgttctcttcacattggacaagctagttcaaaagtttgttaagcatgtaagcttccattttaccttgttatcgtcttgactctgcttctgttctctctcctttatttttgtttgctccgcactaatcatttaagtggcttggacatgcttcagcttcacgcagtcgcagctgatgagacagacaccaagcttctgcagctatatgcatacgagaactacagaaaaccaggaagattctttgatatagtgtaccatgagaatgctcgagcccttctccatgatcagaacatatacaggattgaatatgtatgcttctcttgatatgtgtggatacctgtttatatgttcccatatactaatctgtatttgcaaatttctgtgcagtcatctgcccaaacccgtctcggaattcaacttatgaacagctggaatgatcagcctgaagttacagctgtaacagtggaaccaggttttgctaattatctgcagaatgactttctttcgtttgtcagtgatgaagagaaacccggactatttctgaaaaggtgaatgaagcaatgattagagcataaccttttttcgtcttcagttgtggtagtacagttagtaatcaccttagcatactcttttcaggaacaaggcaaaattaagtggtccgggtgaagaatctctagggatgtcacgtgccttggaaggattgaacattatcaatgaggttgaatgtaagatagcttgcagttctttcaaggtaaaatactttcttgtgaatctcttgcactgataatcttttctcttttcacatgtatatatgattgatgagagtttacaatcttcattaggtcaagtatgaaccacacacagcagatcttttatatagaagaaagcagaagaaagcaacactgaatccaactggacctgaaaatgttaaaacctctgatagtagtgaactctcgagaaagaaacgaatatcgcgctttcacatgagtcttaaccgcagacttgtcgccttgccttaactcaagaacgccgtaagtaaccctcttgtcttttatttgcctgtggtgatcaatactgcaaatcatcaataatctctaactcacgataaattgtgcaggtgtgaagttctttgctgagaatgagatatgcaagaatgagtagtagtagagagagactagagaataactgtctttgacaaagattcttgcatcattttaggctcaaagagattcacatggcaacaaccatagtttttatcttctacagtctacactgcagctggagccgccagttttgctgtatagtgttagaatatcttttttttttttaaggatgatgctaaaattggatatttttaattcattcattgaacaattattgaattttccttctaatgttaaattctctttcaaattaataatctctttaatcacatgttttatttatttattttggtttatccatttggttatttatctttaatcacatttgagtttgattatataatatgattttaagagaatatgaatatatattgactcttttatcacaggtgtcacgtgactcacgtgaggctgtgtacggaaaaccttcttatcctctcagagtctcttatattaggatcgctatctactgcttcactgaaattgtcctctcagttcctacgcgaagttttcaacagattcgccggagaatcttcgaatcaacggcggagaaatg

SEQ ID NO: 21191 - DNA, 3003 bp, Unknown
  misc_feature (1)..( 3003): 2750-1469P.txt file - cDNA_ID_1841599; gDNA_ID_1620811; Annot_ID_169068
ataaatctggactagtggtggtagagcgtattttactgttgggcaataaatgaaagttgcttaagttttcataatattcctgtatgtgaaaaaagatatttccttgatatttgtttttgtggttctacaggatagccagccttccaaactggtgtcaaccagaaacgatttgataatggagggtgtagagaatcgtagtagggtcagtgatgtatcaatgggagggcataaggtcgagcgagaagagggtgaattatcccccactgaaagttgcgagcaagaaaatttcgaggtttataaagagaatgggctcgagcctgtgcagaaactaccagataatgaaataagtaatacagaccgagaacccaaagagggtgcatgtggtactgaagctgtaacaaggagcaatgccctccctgaagatgatgataataaaataactcaaaagttatcagaaggggatgaaaatgcctcgaaatttattgtctcagcaagcaagtttggtggccaagtttcttccgatgaagagcataaaggagctgagagtgaaaatgaggctggagggatggttaattccaacgagggtgaagatggatcctttttcacattttcagaacggtatctgcaacctgtaaagccccttgcaaagcatgtgcctgggacactgcaagcaagtgaatgcgacacccggaatgattctcgagttttctatgggaatgattcactctatgtgctttttaggcttcatcaagtaagtgctacgaaacaaccttctcatgttcctcaaatgtcaattgtctcagtccaaaccgctaattctgctgattttccagatgttgtacgagagaatacaatcagcaaagatacattcagagaggaaatggaaagctccagatagcacatctactgattcttataccaggtggtttattttctaagcatcattggtactttttaattgaaaaaatattatttcctaactgatatttgaaagcttaggttcatggaagccctttacaatttacttgatggctctagcgacaatacaaagtttgaagatgaatgtcgagctattatcggagcacaatcatatgttctcttcacattggacaagctagttcaaaagtttgttaagcatgtaagcttccattttaccttgttatcgtcttgactctgcttctgttctctctcctttatttttgtttgctccgcactaatcatttaagtggcttggacatgcttcagcttcacgcagtcgcagctgatgagacagacaccaagcttctgcagctatatgcatacgagaactacagaaaaccaggaagattctttgatatagtgtaccatgagaatgctcgagcccttctccatgatcagaacatatacaggattgaatatgtatgcttctcttgatatgtgtggatacctgtttatatgttcccatatactaatctgtatttgcaaatttctgtgcagtcatctgcccaaacccgtctcggaattcaacttatgaacagctggaatgatcagcctgaagttacagctgtaacagtggaaccaggttttgctaattatctgcagaatgactttctttcgtttgtcagtgatgaagagaaacccggactatttctgaaaaggtgaatgaagcaatgattagagcataaccttttttcgtcttcagttgtggtagtacagttagtaatcaccttagcatactcttttcaggaacaaggcaaaattaagtggtccgggtgaagaatctctagggatgtcacgtgccttggaaggattgaacattatcaatgaggttgaatgtaagatagcttgcagttctttcaaggtaaaatactttcttgtgaatctcttgcactgataatcttttctcttttcacatgtatatatgattgatgagagtttacaatcttcattaggtcaagtatgaaccacacacagcagatcttttatatagaagaaagcagaagaaagcaacactgaatccaactggacctgaaaatgttaaaacctctgatagtagtgaactctcgagaaagaaacgaatatcgcgctttcacatgagtcttaaccgcagacttgtcgccttgccttaactcaagaacgccgtaagtaaccctcttgtcttttatttgcctgtggtgatcaatactgcaaatcatcaataatctctaactcacgataaattgtgcaggtgtgaagttctttgctgagaatgagatatgcaagaatgagtagtagtagagagagactagagaataactgtctttgacaaagattcttgcatcattttaggctcaaagagattcacatggcaacaaccatagtttttatcttctacagtctacactgcagctggagccgccagttttgctgtatagtgttagaatatcttttttttttttaaggatgatgctaaaattggatatttttaattcattcattgaacaattattgaattttccttctaatgttaaattctctttcaaattaataatctctttaatcacatgttttatttatttattttggtttatccatttggttatttatctttaatcacatttgagtttgattatataatatgattttaagagaatatgaatatatattgactcttttatcacaggtgtcacgtgactcacgtgaggctgtgtacggaaaaccttcttatcctctcagagtctcttatattaggatcgctatctactgcttcactgaaattgtcctctcagttcctacgcgaagttttcaacagattcgccggagaatcttcgaatcaacggcggagaaatggctctatcacgcctctcatcacgatccaacatcatcactcgtcccttctccgccgccttcagccgattaatctcaacggacacaactccgatcacaatcgagacttcgcttcctttcacagctcacttatgtgatccaccgtcacgctccgtcgaatcatcgagtcaagagcttctcgatttcttcagaaccatg

SEQ ID NO: 21192 - DNA, 3003 bp, Unknown
  misc_feature (1)..( 3003): 2750-1469P.txt file - cDNA_ID_1841622; gDNA_ID_1621193; Annot_ID_57510
tttctctataatttttgtatatttaattaatgtaaatatacaaaattatatcaaatatattatttccttatatgtttcattttaatcattttttattaaaatgaataattggacacctagatagctaggccaaaacaatttttgacattccattgacttatttacccaaaatggaaagtgtgggtgattctggctgtttagatgcttagacataatcttactttctatccaactaattattacctgtaactgtaagtttcaattttaggcattttatattaattatattaaaataaaaataataacaaatagaaaaatgtatagagaagaaaatatcttaaattacctttgaaatatatattttcctttaaatggactttctatataaaaaataaatcacattacatatatgatacaattttccccctaaatgtctggttttatgccccccaaaaggtaaaatatctatatgggctgtctataaagataaatgattatcactttaccatcaatcacatgccaacacgtaagggtgaaagtaataccatatcctgaaaataaaaattgaaaatagtccagcaaagcaataagaaacacattttatctagtatataaacaatcgtcctcatgctaacaaagcaaaacacatataacaaaaacaatagatatgaagagaaagatgaagttatcgttaatagaaaacagtgtatcgaggaaaacaacattcaccaaaaggaagaaagggatgacgaagaaactaaccgagctagtcactctatgtggtgttgaagcatgtgcggtcgtctatagtccgttcaactcgatcccggaggcttggccgtcaagggaaggcgttgaagacgtggtgtcgaaatttatggagttgtcggtgttggaccggaccaagaagatggtggatcaagagacttttataagtcaaaggatcgccaaagaaaaagagcagctgcagaagctacgtgatgagaaccataattctcagattcgggagttaatgtttggttgtctcaaaggggagacgaatgtgtataatcttgatggaagggatcttcaagatttgagtttatatattgataagtatcttaatggtcttactcgcaggattgagatccttattgagaacggtgagtcttcttcatctttacctcttcctattgttgcgaatgcagctgcaccagtcggatttgatggtcctatgtttcaatatcataatcaaaatcagcaaaagccggttcaattccaatatcaggctctttatgatttttatgatcagattccaaagaaaattcatggttttaatatgaatatgaataaggattcgaatcaaagtatggttttggatttgaatcaaaatcttaatgatggagaggacgagggcattccttgcatggacaacaacaactaccaccccgaaatcgattgtctcgctaccgtcaccactgcccccactgatgtttgtgctcctaacatcaccaatgatctctagtctaagggatgtatttcgagtgaagtgtttgatcgtttgcatttgtgttttctccattttataagacaaaacttatatgtgatgtcttttttattattattaattgttggacaattcttgcgtccacacttatcttatttaccctttcttaagttccttattaaactttacattttttttaacaccatcaaaaactttctctttaagttgtttattacactttacatttattttacaccatcaaaaactaaggtcactaaataaaaaaaactatgaagcctcattttcccataggagcaatgtgagacatagacaaattgagtaaacaattacatcacttggtaaacaatttttttaatatttaattagtattggttgttattgatttaaattttatatcactttctaaataatttaaaatcgtatatttgtatcaagtgatgcaaatggatttagatttgtatcaattttagtgaactgatgccacataaactaatacgacatcgattattgcaattgatgttaaactataattcttgtatcgattgtaaacaagtgattcaaattaatagcattcaatttttttcatgcaactacttttttgtttgtagtatttgttggatagaacgtaatgttatggcttaacatttaaacggccagaactatccacactctccattttggacagatcaagcaatggaaggtcaacattgttttggcttaaccatctaggagccctatttatttgtttttaattacattttaagaaaaatgactaaaagaaaaaatacaatgaattaatatatttaggataatacagtattcaaatatttacattaatttaatatttaaaacagtataaagaaaaagaaacatatctaattagttttataggtgcttaaacatatacgaattcagtagttcttagcaaattttaactattgaactttgtgttcaaaataaccttcctatgatgtcaaatactgaaactattttagaactcttgtgagttatcttagcaccacattttatcacttataactctttttttattatttttaccaatagaaagtttataaccatgtttttataccaattgaatttcttatatttttcaaataattgtaataccaaaagatattcttagagtaatgtactttacaaattataaaagttgaaaatagcgatatatgggctccatctaatgatctcaatgcgggaccagcatgtgatatacgaatgtctatatacattattttctctgttttgtaacaataaacgagtaatgaaattatattttattggcttcaatttgtaacaaccaacaagaggtcgaatgagccaactagaatacagcccacgatcaataatcaaacctatgaaacttccttctctctttcttttaacatttccaaacactatatatactaatgtcacttacctcgattgtccatcaaacaatacatttgagatatcaatactcctgtgagaacaaaatg

SEQ ID NO: 21193 - DNA, 3003 bp, Unknown; identical to SEQ ID NO: 21192
  misc_feature (1)..( 3003): 2750-1469P.txt file - cDNA_ID_1841622; gDNA_ID_1621193; Annot_ID_174630

SEQ ID NO: 21194 - DNA, 3000 bp, Unknown; identical to SEQ ID NO: 15360
  misc_feature (1)..( 3000): 2750-1469P.txt file - cDNA_ID_1841673; gDNA_ID_2926131; Annot_ID_196918

SEQ ID NO: 21195 - DNA, 3000 bp, Unknown; identical to SEQ ID NO: 15360
  misc_feature (1)..( 3000): 2750-1469P.txt file - cDNA_ID_1841673; gDNA_ID_2926131; Annot_ID_138747

SEQ ID NO: 21196 - DNA, 3003 bp, Unknown
  misc_feature (1)..( 3003): 2750-1469P.txt file - cDNA_ID_1841673; gDNA_ID_1620841; Annot_ID_50888
tttttaaatatctgtattttgcctccttttcattctattttgtttgatacaaacgattgtggtttgtaatgttaaaattaggaatgttattgaatgatatgtatatttcataaaaataataataataaaagtaggatgaatagtaaaattccaaggcatttcataatttacccattacatggtcaaaatttatcaatattttaaaataataataatcatccaatcaagattttgggaatagaatatcttaagaacttagtataattacatatatatatatatattcccttttaaatgtatcaaaaacaaactaagaacatacaaggaatttgatgtagtactatacaatttacatgcaaacagatgtagtactatttgatgacaaaaaaaaaaaaaaagatgtagtactattttatcttttcatcggaataattcggtcatgaagctattaattggttttaatgagaatttattataacagttgttgccacactgtcgaaatactaacgcctaacggctagttaaataattaacacgcggtgagaagtgagtgagttacacgaaccactaagaatctaatataggaagataagataagcatttcacacgtgtggtgtggacaatttaacagtgttaacacgcgcatggcatgtgatctagaaattagaacattaattttagcgttttgactttgacctttgaatcactaggcgtaggtatttacacgtgtaacaatataatttttttcaatatgtgatgatcatgggccaacgtttgtgggtaaaggtgtggtgttcgatcatgatccacttaaatttactgaattttagaattataacagcagaaggatataagtaatataccaaacttaactataatctacctctccttgtctatgtatactaaatgtctaacatgtaacacaaagctgtacaaaatttttaactctcaaattttttgaaataatgcaaagctgtaaaaatagctgtacgagaaaactgtacaataaaactgaaaataaaaaaatttgtaacgtttttgataaaagttttgtaaatgtataaccatcaaaactgtacaacttccagctttgataatgaattaccattcaaagctagagtttcgaattttttcattgtatacaaccatttgaacacaactcttttcaattatgccatacatacatttagttaataaattttaccgattaactagtactgacaaaagaaacaaagagtaattatatttttttgataaattgttttattagaaaaatacttaaaattgataaaaataaataaacccaattgatatatttgatattacaataccagatattgaaacaaataagacatgttttgtctatatacttccaactagaagatatttatttatccatatcctagatattttaatgtgtgaatctaatacattctcttatatacgaccaaatagtaaaacaatatgcctctcctgcaatttttcttcatccaatatttctatggagtcatcttcttcactccttcatcactcttacctctcttaccttaatccaaaatttggaaaaagacctttggtttcttatccattaatgcagagttcgcgaaaatgcaaacaaactcgcatttgttctaacaagatgtatgttcccggtatgtaacaatatgacatattcatcacaaaatgtggtttttattcatacagaattgttctatatagattaatgcctatttttctaatgttttttttgttatataattgaattaggctttggagaagcttcaccggaggctaaggcagcgaagcatcttcatgacttctttacttacgttgcagtgaggatagtgtctgctcagcttgaggttgatttgacgatttatttgattttttaatttaggtgttttgattaataataagtatgatctatatattaattaatgacagagttataatcctgaggcttatatggagttgagagaatttttagatacaaactctgtaagtgacggtgataaattctgcgccactctcatgcgtcgctcttcacgtcacatgaacttaggtaccaaaaataacacctttatatcaataatttggttataaaattctagtatgcgttttctttttgtgaaacttgttagttggaattttaattctaggttcttaaagttatacattatacttttttaacaaatttggttttcttctagtaatttagacgaaatctctttactttttccaaacattcttttcgtacattggaagttgaaacttctcactaaaataactagttatgggagttcggtttatatattcggtttcagttatatccattcgcttatcgtttttttttttgttttaaagtttagtatcccttcggttaatttgaaagttcggttcggtttcgattatttcggttttaaaatttagtatccatccggttattttgctttaaatatttttggatatttcggttattttcggatatttttggatattttcggatattttgagatattttttttattatttttgaatatttttactattttatatatattctcaagtatttttaattatctagtctagaaataactaatacttttgtaaatatatatttatattttagatatttttggttactcaaaatatttcggttggtatccattcggtttcagttatttcgattataaaattttgtatccattcaattagtttctggttatcggttctgtttacttcggttttggtttggtacatctggttcgggtaatttgctcaggcacaaaactaacagtataacacaactaatctgtgcaattcttgtaaagaaaaactacttcaaaaattgcgtgacgaaatacaattccaccaatttgcggattactaacgaaatcactttgtagatccataagtttcgtatatcttttaggtatacatatacttgatatgagataagtaaactaaaaactttgctttttttttttggtatcatggccaatg

SEQ ID NO: 21197 - DNA, 3003 bp, Unknown; identical to SEQ ID NO: 21196
  misc_feature (1)..( 3003): 2750-1469P.txt file - cDNA_ID_1841673; gDNA_ID_1620841; Annot_ID_170056

SEQ ID NO: 21198 - DNA, 3003 bp, Unknown
  misc_feature (1)..( 3003): 2750-1469P.txt file - cDNA_ID_1841676; gDNA_ID_1620753; Annot_ID_49853
aataatttcttttaattttagtttaaaaccaatggaggatattattgtaaatatttttacggatatattccaaaactaatttttcgtggataatttacaaaagaagtttgaattagatgtttaaaatattttcaataaaaagtgtgaatgattaaaatcatatttgaacgaaatcatgataaaatttacttgaattatccgattgacttctaattatttgatttgttgtgattagatttacttgatttttgtttgctctgtaatttttggccatatatataggtttgagtaaaggctctgttcctctctctttttgtttctacattagactaagatgaccccaaaatctcatgtcttcttggtaagatttaacaaacgaaatcatacactctcgttttagtctcttatatttacccaaaccattatgcatctcattgatctcaaatatagaagcatatgagtaagaatcaaactaatctcaaatgtctacaaatgataactatacactcacttctcgttagaaagaagtactctttttgtctcttgtaccccaaacattatattccaagcatcctaaaataaagcagagacagtcttctataatgtactcatctatctctagcagattttgaccctgatggaccagtggttctcttgaaaacgtttgaaaactccatgactaaatcttcatgaccctgaagaagtgcaacaacctgcaagcaaagataacaaagctaatcaaaccaaagagctaagaagtgcaacacacaaaatgtcccaccaagaaccctacctcctggtacaagtcatttacggatttgtttccttgttggtacattgtcaatatctcgagaaatgactcatatacatggccatcattcccctggaaccttgcctgtacatcgatgaatttgttatcttaaatcacaagttagcgtagaggaaacaccaaaaatagattagtttacccatttagcatcctgtatataccttaagcttgctgataaaatttgctacacgtattcttttgttattatcaggctcagcttcgagaggggtggtttttgtatctccagttgagagcaagacactgaaaccaagaaccagattccggtggtctttcatgagttccgtcatccttgcaacggcactaggagcatcgactctacaaagagagacttagtaacatcagaatcagttcagttcacatgtgtgtgttgttttgtaagcagaaattaggagaaaatcaaatataacatggagaaaataattcatacctacgggcgctataatcattcaagatctcgagaaactgagcatattttgcaggttcatcacgaaatgattccttcaaagaatagatgtatgaacgtacatcatgaaatgtttccttagcctcagctggaaggaaggcattgaaacgaagtagcagattcacgtgatctttcaagagttcccgcatccttggaacgacggtagctaaatcgactctacaaagagaaaaataacatgagaatcaatctctcacatgtgtagactgtttaagagcaaaccaaacatacctattagctcttaaatccagcatgatgtcgagaaactctcgatattttgcaggttgatcagccccaaatgcttccttcacagcattgatgtatgacgtcgcttcatcaatagtaaacgccggtgataagcttcctccaaccatggtctaaaattggcctaatccataaagattgaagaggtctcaactcattgaagaaacagaaaatagagtgcataaatacaaatcttattcctcaagaaacttaatccaccaaacaacacaatagccgaattagaagaatcatgtcaaattcatcgcaacaggatccttaagaagatccagaatcaatctcgagtagaaagaaaagaaaacaaaaccaagaaggatgagcaagaaactagaaaattgctcgagcgccttttaacctaatcgtatctgatgatggaaggagaagatgatcgtaaccctaatcttccggtgagcgaaactatgttcaatcgaatgaggaagcaagtatgttaccgatatataagcagaccaaagacgacaatgaacaagaagcagcttcgtcttcgtcttcttcgcagagtaagggagttcaagatttctagaagcaaagtaaaacttcagagactttttttagagtttttgttcacgagtctatatttatactagggattatcatatattcatacttgacttcaatttttgttgtagttgtaaaactataatttgtaagagaaaattgaaacataaatttataaagatttctatatatcaaagacgatgatgatgtgatatttgtattaattttaatccttggtaaattcttatataaattcgtaatttatataatttaggaaacatatttgttgtcattagatttacttgatctttatttggtttgctctgtttctctctgttttcgtctatacgttgaactctgctttgacttttgagtgcttacactctcgcctctcggtttctaacaaatatgaccccaaaccaaaaatcatatatgtacatgccagaagaagaatcgacctgaattcaaatctctataatatatgaaacaatacaatcacttttcacctcaatgttttttttttgttaacattgaggttttcatatgaggtcatatcgattttgttttgaattattttagattatgatttctacatggatagacaagagttttattgtaagtgcatgtatgtaatgatgttctgttctctatacaataagcatcacactaaactctttctagcaagaagatgtcaaagaaaaaagaaaggatgtatttgataaaagcaaaaaatatcaggggtatatatgcaaattaccaaaacaaaaataaagaaacctgaaggagcaatgacaagggatttgtttttctcaaaatctctgaaagcttttggatatttgtgatcgcatagatcgattccttttgcggagaaatg

SEQ ID NO: 21199 - DNA, 3000 bp, Unknown; identical to SEQ ID NO: 7588
  misc_feature (1)..( 3000): 2750-1469P.txt file - cDNA_ID_1841684; gDNA_ID_1621153; Annot_ID_56942

SEQ ID NO: 21200 - DNA, 3000 bp, Unknown; identical to SEQ ID NO: 7588
  misc_feature (1)..( 3000): 2750-1469P.txt file - cDNA_ID_1841684; gDNA_ID_1621153; Annot_ID_173353

SEQ ID NO: 21201 - DNA, 3000 bp, Unknown; identical to SEQ ID NO: 8241
  misc_feature (1)..( 3000): 2750-1469P.txt file - cDNA_ID_1841710; gDNA_ID_1621202; Annot_ID_57684

SEQ ID NO: 21202 - DNA, 3000 bp, Unknown; identical to SEQ ID NO: 8241
  misc_feature (1)..( 3000): 2750-1469P.txt file - cDNA_ID_1841710; gDNA_ID_1621202; Annot_ID_174941

SEQ ID NO: 21203 - DNA, 3003 bp, Unknown
  misc_feature (1)..( 3003): 2750-1469P.txt file - cDNA_ID_1841791; gDNA_ID_1621143; Annot_ID_56690
ctgatctccttagtattaaacatcagtggtgtaaataaaaaagtgtggataaggagagcttagttacctataatggctgaggagagaaaaagaaatatatagatgataaccatgatcgctgtgctgtggtgattggtgaagaagccatggctgacgattcttatttatacacacagttctgggtctttcacatatggaaattactagtttataactagtggcctatgaggcattatagaaaaatgtttatcagttcttattttcgccttttaaaagtatttagctacacttacacgcatgcattaattttaaaataacgtcgattcaagcgatatagaaagaaactatttcttaaaaaacatggatttataatgcttggatatcaaattaatttacaagttgtgttttttttttatatacaggcttacatttaaccaaaacgtttttgagcttgaaaacaaatgaatatgttttgattaattgtgtaacatttaaattaaacttattaatatcgtacgtggacttatatgttttttagattttctatatgcacacatgcatgttctggaaaacactttcacaaatcctcatgatgagtttataacacttaattagttaattactcccctgaatatgtactccccttctgttcatacttgagtttatgacacttaactacttcttttttcgcctaacttcaccgtaaagtggaaccataacgatttaattatatataatagtattgtcgatttcgaggttcgatttatgggcagaagacgttgatttcacaaattagggaaaatcagaatcttaaattaatattaagaacccatagatttggtcaacatagtttctcatggctcatggggaatctgttttggtatagatgcttttagggttggttcgaaagtttttctttggataatgtgatatactatatatgaaaaattcggcatgaaaaactatttcgagggactagatggggaatatcacattagattggtgaaagtaaagctaagaaatagattttaagatcatttgatactaaaaactgtacaaagatgacttaaagtcataataaggccatctaaagacgagatccaaaccagagacttcacccatcctctattaactttgaacctcttcatggtatatctcactcttcatagacagttagaagcattaatatctaatgttttggccatgaaatggatgctgtttttttaatttagtttctgaatttggtttttagtttttcgattttagattttagttttagtttttgttattaaatttttgtttttaaaaaaaaagttttgctttttgagaaaaaataacgtagatgaagtagaactagatttcctaaataataggataaataaaaatctaacatcatgactggaagattactataaaatttgtttcctaattaattatagaaaaactttgaactatagtttcagtttcagtctaaggccgtttcttctccacttttatcagccgattcttctccacttttatcatgcaactttagattgtaatctatctagcttataaggtgttcttgagtattattaacaatttggtatgaaaatgagattttgaaaaacaaaaaccgcccacacaactgtggtctagtgttaaaggagaattgggaaaatgttggaaggaactaacctaagttcaatccaccttacaaacaaaaatcacatatgtttcgaaagtttgagtttgagctaaaagttcaagtaatttacctattattcagtaacatgcgatttggctacctctgacattagtcagaaagcatttcaaaatcggaaccgacggtgtggtgggcttttagagagaagtccactctaaaatactttggtacatttctactgaaactcactagataaatctataagtttatttaaaaaaaaaaaaaaaaaaaaaaaaaaaaaactacaaaacattctcaatgcctttgtattttttttttttttcccaatcaaggcctttgtcttactagatcgattgtcacgatgattagatggattgattgtttaggctcttaggctctctgccatcaacatgggctgaaattttctgttggaccaagttctcccaacatggatttgggccataaattgtccatattttttttctccttgtattttttattgacaaaggaacacatatcacgagttaatgacactgacatgcatctttagtagcattaaaatatcaaatttaataataaacatacagcgatacaaaactgagtcacacacacacaataagagccagtctatatgaattaaattaaattaattaattgattacctatctatgcatctggtgatgtttgtgatcgactccttcatcattctctgttcaatatttctccaagtcatcaaaattctcgccgtcaaatcaaatcataaatctctgcttctccaatttgttgagaaacatcacattccgtgtttgatcatcggacaatgaaataaacccactcaaaaagacagaatcaaactcctttttgttctctttctcttaaacccattaaccattttcgtatctgctaccaacttcctgtaatttttctcgggaaaaacaaaaaaacataaaacccaaatctttaagcgattttttcatggcgtttctggtgagtttacttgtttatgttgttcttttgacttaatttatctccttcaaataagacaaagattcgatttttatgttttgggttcttcccaaagctctgttttttgtactattagatatagaaaggggaaaaaaatcaaaactttttcgttttgatcagatctttagtttctgtagtgagtagattactgttgatccttggtggttatttgatcccatcatcaaaagtttgtctttttgattacaatctgttactttttgtagatggaggtcgatgaagaagaagagatatgatttagtcgttcttcaaattgagaatcttggggtggttgttttttattggtagtcatg

SEQ ID NO: 21204 - DNA, 3003 bp, Unknown; identical to SEQ ID NO: 21203
  misc_feature (1)..( 3003): 2750-1469P.txt file - cDNA_ID_1841791; gDNA_ID_1621143; Annot_ID_172925

SEQ ID NO: 21205 - DNA, 3000 bp, Unknown; identical to SEQ ID NO: 5841
  misc_feature (1)..( 3000): 2750-1469P.txt file - cDNA_ID_1841814; gDNA_ID_1620821; Annot_ID_50698

SEQ ID NO: 21206 - DNA, 3000 bp, Unknown; identical to SEQ ID NO: 5841
  misc_feature (1)..( 3000): 2750-1469P.txt file - cDNA_ID_1841814; gDNA_ID_1620821; Annot_ID_169481

SEQ ID NO: 21207 - DNA, 3003 bp, Unknown
  misc_feature (1)..( 3003): 2750-1469P.txt file - cDNA_ID_1841836; gDNA_ID_2926128; Annot_ID_138659
gatcagtcgtcgatcctcttgagtgatttgattttagactttctagttatcaaactcgaaagatggattctgtccttgtagtgggcattgcatcggttattctcggtgcgttgatcgctgtactcttcttcggtagctacttccggaagcggacatcggaggtgcaatccatggccaaagcggagcctcaggatccgatccggaatccaaagtcgaatcatcctgctccgaagaagaatcatcccaaatctcaagcgtccgataaggtaaggttttaactccattttgttccgagtttagggatttcagatttggatatgagttgactttaaagctttctcttcttcgtttctaaattgcttgtggaatgcagaatcagaacaaacggcatcatcctttagatttaaacacgttgaaaggccacggtgatgctgttactggactctgtttctcgtccgatggaaagagcttggccacaggttagaacctataaacactcctacttagctaatccctgtcaagaagatatttttgctattttacaattctgatcacatttgttcctgtttttgatagcttgcgctgatggagtaatcagggtgttcaagctagatgatgcatcaagcaaaagcttcaagtatttcttcctatatataatctttcaatagacaatgttagccggtgggagtttactttgcaagcccattttcatgatctaactgttttttttgtttgctttctaaaattcagatttttaaggataaatcttcctgctggaggacatccaaccgccgtggcatttgctgacgatgcctcatctattgttgtggcttgtcatcatatgtctggttcatctttgtacatgtacggtgaagataagcaaaaggatcagcaagggaagcttcctcttcctagtatcaaatgggaccaccatcatattcatgagaagagatcagtgcttaccatctctggagctactgcaacttacggtactgctgatggaagtgttgtcattgcctcttgttctgaaggtatgtttttccatggctagtgtcactgtcatagcgatgttaaattggtttcagaatctctagtttaaaacttgtgtataaattgctaaagggtgatttcaatttgtgaatacccttatgttcaatataagttcttgtattgctgttcaaaatgtactgctctggtgaaatatcccttgttttttccttaaaccttgttattcgccagggactgatatcgtcctttggcatgggaaaactgggaggaatttgggacatgttgatacaaaccagttgaagaaccacatggcagctgtatcaccaaatggacgttttttggcagctgcagcatttactgcagatgtgaaagtaagtttttgtataaattcaaaccatcatgagtgtatgtgtgaccgtatctcatgtcttagcaagtgctttgtaggtgtgggaaattgtgtatcagaaagatggttctgtgaaagaggtttcaagagttatgcaacttaaaggccacaaggtattattccactacctatagcatgataatccatctccaacgatatagattttttctcactttttgtcttgtaatcgtttcatgtttaaaccaatgctatggtatccagagtgcagtgacttggttatgcttttctccaaactcagagcaaatcatcaccgcttcaaaagatggttcaataagagtctggaacatcaatggttagtagaattgtttttaaatgtctgcatcattctgattattgccaaatgcaaaacagatccctggtaacataaggggatctgttctggaatttataatagatggaatgattttgatttattaaacaaataacctgaaaggcattgtgttgtgtaatctggttgcagtccgttatcatcttgatgaggatccaaagactttgaaggtgttcccgattccactttgcgactcaggaggcaatccgttgcactatgatcgtctcagcttatgcccagagggaaagatattggcagcaagccatggttccacattgcagtggttatgtgctgaaactggaaatgtcttggacacagctgagaaagcccacgaaggtgatagatagctctcaacatttctctttgcaacctattcaaaaccttaacatatacctcaaaactattcaaacaagtgatagtaaatttaccacggttggttgtatgtgcaggggatatcacatgcatatcttgggcacccaaggctattacagttggtatgtgcctgtctgattctttcttgtatgtaaagttgtatgtgatctgaatctcatgtggtgttgttggttctcaggggaaagacatgccatggttttggggacatcaggcgatgacaagaaagtgaagctgtgggaagctccaaagtcgcaatctttgtaggctctcgcatacacgtagtcccttgatgacatgaggcgtatttaaacggtacaacttgcgaggaaaaaaactctaataggttttgtttcgagtcccaagttgggatcaaatgaagggtggtttaaagtccttcttgttaccaagtgtcttttaacttctgaagttttgaattttgctcataggactagtacaacactcacagtcttctatgttttccaaattaaggaaatttaaaaagcacacaacaacactaagaaatatgaatcgattaaaattattatacgcattttgttttctttgtatcagaaaaatgatagtctacatacatatggtaatttggtaaataatacaaaaagaatctacacaaccaagtgaaaaatcaaaaatgtgtctggtcgtggactccgatgggctttttgaggcaaattgaaaactgggccagaaatatgaaaggcccacgtaagtcccgaatataacctaaaaagcacactctctaataacagccagaattagggtttctctttgtcttcagcagtcagtgcgcatccgtaggagaaaagtgtgagaatctgccaccatg

SEQ ID NO: 21208 - DNA, 3003 bp, Unknown; identical to SEQ ID NO: 21207
  misc_feature (1)..( 3003): 2750-1469P.txt file - cDNA_ID_1841836; gDNA_ID_1621147; Annot_ID_56780

SEQ ID NO: 21209 - DNA, 3000 bp, Unknown
  misc_feature (1)..( 3000): 2750-1469P.txt file - cDNA_ID_1841841; gDNA_ID_1620762; Annot_ID_50035
agggctaactgcacttgatactcctcctcagaagacatgtaatccgcacggttcgaagcagcggttggagcaggagaggccatagaagaagtagctccggccaccggaagcgtctcagtgactgacgaaggggttgcttgaggaggattagcagaaacgtgaatccgattttgatccgatggaggagctgcatcgttggttcgattctgctgctcttgattcccacctctgtgtagcttcttgaaaatatgcttcatcgctctcttcagattcttcttcttcttcttcttcttcctttggtcaatcaaaaaagtggtgggagtgacggaaacttagccggcgagttaaaaaagggagggaccaaatttacaggatttacgactatgccactgttttgacctttttgttaaaattatccaattaagattaagcaaaaggtaattgtgacacgtcgccatcgggacccacacgctgaagaatttctgtacgcggctaatagggtaactttttttttaatagtaaaaacataattacccgattgacaacagatgtctatatccgtaaatcctccatctagattccaggcagttttcgagcgggagattccgaaccgactatgattcaatgcaacgaaaaccagattaagaaaccatttagccatgagttagtatctataatcgttttctctagagttcaatgatgatcatgaaaccattccttattaggagcattcttccatatcatcatcacattcatgaaaagactagtaaaaaactataaaccaaaactggaaaatccgagtacaaaaaaaggtccaatgggaacagtaaagcagaacagagtcttgatttgacccagacatgccaaagaaccaaggagttttataccttttaaacaaatacatctttattcatgatattccaaacttacagaattctatatcgaccacattatgtgacaaaatttcagctttcttctgcaaatctaattggaaatattacaaacaatacaacaacaacaactctcaagtattcaatctctctgtggaatggagcagccaaccatcattctgattctgactggaacagccaaccatcattctgattctgactggaacagcttctccgtgtttctgggttttgctggaactgcttttgcggaatcaagataacaagtgttcataagtatattaaaaacccacaatcgataacacaactaagataacaaagatcaacaatgtaaatctataacttcaaacattaaacatcccacgtcatagtttcggacaagtccatatcggcataaaactcttctacattgcattgtctcacacttcaaagaacaagcagattttcaggaatatactcatgtataatttttggagagtaagaatagaatttttcggtaacactactacatgaagaaaagtgagaaatgttcataaacttacaatcaatgcttgttttcaacttcctcctcttgccattacttacttggtctccactatagttgatgctagttttcaactttttcgtcttgccattacttccttggtctccattacgtatcgacttgtaatctcgtaaaggatgatacttcatggattctagctcttttattgctatgtcatatcggtgttttacctccctctgcaattacagagataacaatttaagagacctaaaaagtcaaccagtggaagtgtggaacatgattggaattccctaactaagactcacaagtgccctattcaaacccatgatttgctgcttgcataacttcatctccatctcaagtgcacgcaatcgaccctcaacaggaacagcgttttgctcaaccatttgcttttgtctaccacgtactacctccggctgccaaacgttcaaagctactgatgcttgcctgagaaagccattaaaaaattacatgagaaggatgcatgaggcaagaacagtaggaccaatctcatttcacttgatcaacaaagaatcatctttctaaactgtcacaactgaacaagcaatctcctttataattgctattcgtagccatagacagagagctataacgactttaaaaaacgaaactttctgaaatctgacaaaatgttcaccaggttggggactacctcactttcagcaaatctgaaaattgcagagaagaagactgtagtctctcagcctcgtcggacaatcgtgcctccaattcacgaatcctccggccccattcagaaatttcactctccttcctgagtaaagctcttctatgggcagctaatttcctctccttctccctctcaaacctatcaaccacatccataggagcttaaatactcacactaacaacagaagaaatctcagaaagcacaaatttcaatcaaacaaggttacctagtcatgtagataaacttggtgggagattcagaagaagaagaagcagagacgatgtggttagggaaatcatggacgagcagaagatcccagagggaatcatcgcaggacaatcggaagagacggcgagaggagatagagatgcagcaaagatctttgtacgagaaagtcgaagactttacgccaatctctaggatctttctccatagctcgtcgggtatctcgtttgcagacattcctcttcgaaaggttacgccaaaggcaaaatcctggttttaaatccagtttaatccactccggtccgacctgaaaatcgaaacatttgatcccgaaaccgaattttatttttaatatattaaatagatatacttttaaaaaagtagctttgtttgtagttattgggcctaatgggctgttattgttgtaccgttatttgcccttttgggctttaaatgatatatcgtaggtcgacacaaacaaaataaaatattggcatagacgagctgctggtcagaagaagactcagaagtacctctctcctctcgtcttcttcctctagaactcccaaaaatggcgtaagccaaaaaatccaccgaaatcgataacgatg

SEQ ID NO: 21210 - DNA, 3000 bp, Unknown; identical to SEQ ID NO: 8924
  misc_feature (1)..( 3000): 2750-1469P.txt file - cDNA_ID_1841858; gDNA_ID_1971923; Annot_ID_177188

SEQ ID NO: 21211 - DNA, 3000 bp, Unknown; identical to SEQ ID NO: 8924
  misc_feature (1)..( 3000): 2750-1469P.txt file - cDNA_ID_1841858; gDNA_ID_2926254; Annot_ID_143092

SEQ ID NO: 21212 - DNA, 3000 bp, Unknown; identical to SEQ ID NO: 8924
  misc_feature (1)..( 3000): 2750-1469P.txt file - cDNA_ID_1841858; gDNA_ID_2926218; Annot_ID_142350

SEQ ID NO: 21213 - DNA, 3000 bp, Unknown; identical to SEQ ID NO: 8924
  misc_feature (1)..( 3000): 2750-1469P.txt file - cDNA_ID_1841858; gDNA_ID_2926218; Annot_ID_203173

SEQ ID NO: 21214 - DNA, 3000 bp, Unknown; identical to SEQ ID NO: 8924
  misc_feature (1)..( 3000): 2750-1469P.txt file - cDNA_ID_1841858; gDNA_ID_2926254; Annot_ID_204487

SEQ ID NO: 21215 - DNA, 3000 bp, Unknown
  misc_feature (1)..( 3000): 2750-1469P.txt file - cDNA_ID_1842117; gDNA_ID_1620746; Annot_ID_49729
aggctgctcaccctgacttaacgaaaaccaatctttaagacttgcagagcaagtatgagcaggtgaaggactcagcccggcttccattttcacatgttcatcaaatgaacctggcacaacaaaaaaaatccaagcgatgttaatacgatgtacctcaaacagctcaataaatactaaatgactatgtaacaaggcaccctttccaacaactactaaccatttagcaactgtgaatccttgagctcgtcagcagatgaaccaactggtgataagttttcttggctaccctaaaagtagtcactctcaatgttagtttcttctctatcgaaaaaaatagtcaattagagattagtgtagctacagaattgtgaaatcacacatacataaactttataacaaaatacaaatccaaacatctttgtagcagcattcaaataatgcaatgaaattcagctaaatcaaaacgatgaaattgaagttagagaagcgtgtaatcaaaattctcaagctaccacaaaagccgagaaaactacctcagcagaatcaggcttctcatctagaatccgataaagcgtttcgatgtcaatagtctcgtcatcatcttcaaactcaaaaccaccatcacaatcatcaaccggaaattcacctcccagaccaaacattgaaccttcctcacccatcaaaaatcacaaaaaaaaaaaaaaaaaactaacccgagaaagaacgagaagaggaacaaaccctaaatcagaaaacccaaaagtcacggaatttcagctcccgggaaacccaaatcgaaattcagaagtagacgcgtagatccagagattgtagaattttcaggtacgacgaagaagaaggcttgagaattgggttttgaaggaattttcgaggaaaggtagagagcagttgggatagagaaaataaaaatcgcgactttttgtagcgacggtggcttctttttattgccttgttctctcttttggctttctccgaattggaaaaagtaaacaccacaaggctatgggacttccggctttaaataaggaacggtcgaacatttgtttttctttttctttcatttttttccattttttcattatttaataatgcatgattatatataattatattttatgcgccgtcatctttattgttaaagcaaaatcacaatttaaacaaaaggaaacaactttaattagtagtaggaaactgaagtgtttaagtaatggagatttttttgaagtgtttgctaatcataatttattgtaaaaattatttttaattgtgtgaaaattagattttctacactaacaaaaaaatttcatatgttaaagaaaacaaatatgaaactaaatcacaaagatcaattggaattagacatgtggatcgactcattagaaaaataatcatctcaatcaataagaagagataaaacatatatttgactaaatgatcttaccaatcttgtggtcataaaattctacaaagcactatattgctaatttctacaaagcacatttgtaatcttctgaatcatttgttagccctaaaagaagactagtattatacgagatcaccatttttatgattgatcaaatatcttgtagagcgcaaaactttgtaggtagtttgatgagaaagagcttgcttattatgtgatcaacaattccgttcttgccatgtctcaaagtagttgcttgccatattaattgatatgaagagcctttgattttgcagagataggaattgccaaaagaaaccatatgaggattgactcgagaagttttagtgtaacttcttcactaagtccttccaaaccagttgggaaaaataatattaaagaataagtggtccattgattcttagtcggtcaactagctagaagacctcaaattctgcaatcgatcctttgtcttattgtggttccacacaaacaaccatgtgcaaagaacaaaacatgttttgggactttagtttgaagatgcaattaaacatattgttagattgttgaccaagaaaaaacatattgttgagattgaaagatatattttgcatcggactgcaaaatgtttatgtcacatatttgttacctaatagttgattttaatagagtataatagagtatcagttattggttttaaattgtgtatcaaattccaaataatatagagatttttaacatcagtcttatttaattatgattttaaccaagtgtcgttagctcaattggtaaagaccttatgcaaagcttagaggtcgccggttcgagtgacgcttgggacgaaactaatattttatgctgtggtttcaggcctgggggattacggactttgacccacaacctccaagatttaaaaaaaaaaataaaaaaaaattatgattttaaatcgaaattttgttcttcaaaggtaaaatagtttaaaaatctttgggtattaaaatcatttggaaatgagttacataatactatccggtatataaagaaccaaatccaaaaacaaaccggttcccttaataatttaaaccggattattcatcgacggttcgtcaacatcctaataatttaaacccgatctcttcttctctatcgaaaacctccaacttttttttgttttatcagattgtaaatttagggaagagactttcgcaagcaatctagaagcaaatcgatcgccaaatctccggattatttgcaagaatcgttcccagataatcttccccagattctccacttctccaggtacatcgttatattcaatttttgaggaaaatagtcgcacactctctctttcttagaactaccactcctgtgctgttttgagattaaagcttgaattttgactaaagccctaaattactttgtatcactatctgatcacaaagtcaatttcttttggaaatagctctgatcggagtgttgctcgaacaggtattaatttcgtattgagtggattagattagatttcaagatatgagagcctcactggcgttctaatg

SEQ ID NO: 21216 - DNA, 3003 bp, Unknown
  misc_feature (1)..( 3003): 2750-1469P.txt file - cDNA_ID_1842159; gDNA_ID_2214555; Annot_ID_134758
gtcaccgacaagacaaacatcgataccagctgtgtctaaatgaacggcggatgggtaatcgtaggcagttacgacggtgatcggttctcctctccggtgtttttgtctgagatgcgttagcgtcactctttggtttgggttttgtggctttggtcctccgtagacggtgttttccggtaggttactcatgaaacggacagagatggcttttgagaagcgagagcaattcctagtgagtgaggacgccattgttgtgaagatgaagaaaccctcttatctgtgactgtgtctgtgtttacaagaacaaggaattttacttttaagaagattcaattcctagtgagtgaggacgctgtttagattctggcaagtggcgattcagttctgggtttcacacacaaatcaagcatagcaatgacactgttaggaattgtgatagcttaactataaattcaatattttaacgaaatcaacaagatccgttgtagtctagctggtcaggatactcggctctcacccgagagacccgggttcgagtcccggcaacggagatagttttaaaatatctttactatattaaaccggattttggttcagtctggttatgttaacccagtctctgtttctctctaggctctagcctaacccagtctctgtttcgatcttattgaacttctgttccaaaggcgattccttttttatttttccgtttctgggtttagatagagaaatgtagagattgagatcgcggttactagttggaactctcttggagttggagagcatccgagggttctgcacgagctcctttaagatcgtagcttcggttcttttttatgagattgcgcattgtgataccaaaaccggattctactgtttacagtttccaggagttcaagtaaagaccaaaccatgtctctgttttttaagtcacacacgtgtgagatgacgtgaaggaattttttgttgttgttggtctgaagtagttgaatgtagttggcttctaaacctttttatatatctcttcaatataaatcacacgaagaattctaacacacaattcgttgattcatcatatctcctcttcattaatgaatggcctcgtcgactcttctcgagataagaagatgaaaaatccgcgattttcgtttcgcacaaagagtgatgcagatattctcgatgatggttatcgatggagaaagtacggtcagaaatccgtcaagaacagcttgtatcccaggtaaactttttaacataaataatctgaaattgtttttaaaaagattgtttttttgtgtgtttcttctcacttatgatcatcaaaaggagctattatagatgcacacaacacatgtgtaacgtgaagaagcaagttcagaggctgtcgaaggagacgagcattgtggagacaacttatgaaggaatccataaccatccttgtgaggagctcatgcaaaccctaactcctcttcttcatcaattgcagttcctctctaagttcacctaattatgtttgtatatatattaacgttctaagagcatctccaatggaagtatctcaatgagatacctaacaaaagaaaaaaaattaaaaaaaaaatatgagagaagggagaaaaagtaggagagaaggagagttaaatttctcggatgattggacaggtgtaatcacactattagttcaactattaaataataattaatgtatctgttttgattaaaatattaattaatatgtttttgagaaactttctttatttttactggtggagatggtctaatgttccatggttcatataacggagcaaattaaagcattgtaatcatatatgtttgcatgttcatagttgcaatctcgttttgattataaatcagttttaagcatataaccaaaataaaaaaacaaatcaattgtaatattccggtaaaacgattaccacgtgatgattatagagaggcatagagcaatatcgtctggtaaactgaataaaaccggatttggtttccatagatttttctcaagccaaatcagtttcctttcgtttgaataaacctattggcttatcgtgagtgattattgttttgtttatttacacgatgaacaatgtcaatgagacatgtcacatgtacgaagtcagttccgatatattacatgaattgctttcaagttttgatcagcatccttaaatagtcaccgaaaataagaagcgaacaagtcttggcgaagttgaagccacaaagtgtactaataaatatggattgccgaattaaaagaagaaacaaaaaaactacattttcatattttttttcttcttccatatataaatccacttttcaacttaagcaaatgcaatcaatgggaaggtaagtatgtatacctctaaatctcaaataatctttaaaattataaaatatatatgttttgactaattttaggaagataaaataatctcttatattttcatcttcttgggattatttaccaaaaattaatgtttagaaagtagtactactcaacatgtagttgttaaatatctttaaagtttaagttttgataatgttaaaatctattaaaaataattggtcataatagtaaaacaactaataattaattttttaggatattgcttaaaagttaaaacatattgctaatttaaaagtcataatatacaaaatataattgtagtatattctataataaacatgtttcatctttttttcggacgagcaaagaagtaagaacgcacgttatgaccatgatgctctaaaaaaaggatcttattccttttctaatgatggaaaaattattatattattccttttccaacaaccaaagaaaaatcaaaaatgtcacgctccggcaattaaggtatttatcatccttaaaagaggtaccaaaatatatagaaccgacagcgccataaactttagaaaagagagagagagacaaagagagatctgatcctttgaagaaacaacaccaaaaaaaaaaaaaaaagaatg

SEQ ID NO: 21217 - DNA, 3003 bp, Unknown; identical to SEQ ID NO: 21216
  misc_feature (1)..( 3003): 2750-1469P.txt file - cDNA_ID_1842159; gDNA_ID_2214555; Annot_ID_185686

SEQ ID NO: 21218 - DNA, 3003 bp, Unknown
  misc_feature (1)..( 3003): 2750-1469P.txt file - cDNA_ID_1842287; gDNA_ID_1620626; Annot_ID_47134
tcccttaactgactcattatgcggctcacataaactctgtaatcttcatcttccaacatatccgtggttaagcagcaatcaaagactgtaatacaaaaacatcaaagttcagcaaccttatagagcaatcttatatttcgtaagcagcttatagagcaatcttttgtatctttctcactaaaatagtctatttctcagagctaagcatggataagacaaggacgaatttgagaagtcatgcaacacagtgaacatacaaaacctgaaaaatctatccatgagctaaatctcaccgatcaagaatcttaagctatcaaatgttagattcagttcaattaacaagcctaacaagaagtacactataaacttaggctaaaattatgatttttaagacctaaaaattcaaactttctaaaatttaatactctaagagcaagggataagacaagcaaaaggatttgagaaatcatgcaacccagtgaccatacaaaagaaactgtttcctgacaattctttgagaatgagacatcttaagctataatagatagactttccaccaatgagcctgagcctgtgctcatggatagttaacagaatccatgaactaaatctcacccatcaagaatcttagtctatcaaatgttagattcagttcaatcaacaagcctaaaaagaactagaaactaaaacaggacactacacttatcaaaatctgatcttaagacctaaaaactcaaactttctaaaaatcaatactccaaagcccaaagaagagcaaggataagaaagcaaaccctaaacccatcacttaaaagaagaaagagcataccgtaaactctctctgagatctcaagcaacccttcaggaggttttctgtgaaagaactttctaaacaacgccattgagaggtttctttaaatgcttaactcaaaaaagcagagaggtcacacaatccctagaaataatcacttatgaccaaatgcgacccacattgcaggaaaaaccccaaataaggagaaaacaaaaacgagaaaaatgtcaggaagaaagaaggaagcgtgagataatcttattgctgggtctttaaggaacaatgcgatgtgggttttgtttcttttgtagtttggtggtttgtcttgacatacacactttcaatttcttccgttttggaattggaaacttagctttcaatcaaaacagatgtttgatagctctgcacatgcgagaaagaagaaagggaatgatgcagagagagaagagagagagtttggttatcttgggaaaagaggaactagggtttttctttgattctaagaccaagaagaagatgatatagctattgagaaattcagacagagattgaggatgatgtcggatttcagatagaagggaaaaaaaagaaaggaggacccaaagatctgttactttgtttaggactatgatacatgtcttccaatattcttttttgagttatttaagatttgctttcttttctttcctaaactcggaatttgcaatttatttccttttgccatgacttcatttaaaaaaattaaataatctttgaatgagtacacacttagatatcatagtttgtttttaagtcattaatggaaaaatacaatttttgtaattttatatttgttagaaataattttttagctaccgattcaaccgcgaaaggtagattatggttcgttacatatatattgaaccaaatcgacggaatacttggtccgtcgaaaaagttaattggttttaagaatattggggtcacatacaaaataaaactgggatttttggtatatgtataaattcatttttctaatttaatatttacattaaatttagacattttaaatgaaaagtaagctattttttatattttttgaagttcacaaaaaacattttaacgattttgaaaagtagatttcactttaattattttttcgttacactttttaaccaaattacataaaaaaaatgtttcattcatcggccctgatcacttctcaagttttccaatatatgacattattggaggtaacaagatataatacactaatatgactgacaaactgcacaagacattttcttcatgtccctatatatggttagggagaccaaattcacctaaacaatactatagtttacggggtgatgctagacatgtcagtacaatagtctcaatcagtgggaaacgttgcacaaacggatcatgtagctgagtaaatgagttgatgcctcgttagttggtaaactcatgagccattcttgctattagttaaaccaaatcccttgtataaacacgcctctcatagtcatagatgagcttatgtcttgttctagtaaatgttataaagaagataactcaattgataattggttttagcacttggtccttgctctgttgattcgaaatccttattgaaaaaagaagaacaacgtaaattccttgttaaaatttttgaaaatttctattttctttgggccaggagtgatctcaacaaatatatccgaaaatgtaaaggtgtgtatacgtatcaccccaatagctaataggcccaatacggcaatacccaaacgtcaccatcaccaaatagaatgactagattttactttgtttactacgtttattcacgaacaattattttgtcaaaattaaaagcgagacaacgagaaacactcatagttttgcctgacacacacaacaaatgtcagtatccataattacattgtttcaaattttctctaacggttacatcactcgcaacggctacagtaacaaacatttaacgtttctttaccttttcaaaattcttcttttttcacaacaaaacaaaaagtaaataatctaacggctagttttcgaattttcaccactataaaacctcacaagaacctcctcataactcagcaatttccaaaacaacattcctaacactacactccaagcaactagcttctctactactcaatactatgtttctatcggcatctatg

SEQ ID NO: 21219 - DNA, 3003 bp, Unknown
  misc_feature (1)..( 3003): 2750-1469P.txt file - cDNA_ID_1842353; gDNA_ID_1621139; Annot_ID_56599
tgttttagatacatctttcgttttacaaaaaaagtaatatatatacatctttcaaaaacagcttttatatatgtgtgtttatgcatatattactattatcttcttttattttatttttcttgttttataaatcgagataattattctaaaattaacttttattgtacagggacattccgaggattttcccaacctttctccggtaaaatcagatgaggtgtttgctagaggtttttgtttaaaaatatttttatccgaaaatcacataggtaatttgttataagaaatatagaaggttaattattatataaacatattaactatcgaaagaaatctttaatatttaacgaggatagaaagtaattgtttttaaccacaaagctaaagctgtgatatgaaaacttaaaagcaaagatcggttcgtgaagacaaaatggggttttggaaaaggaaaagaggaaaaagaaaaagaacaaacgtgtgaaaattcgagaaaaatggtaacacaaaaagaaattggacatgatataagttgccaaaaccaaagagaaaaaattgacatgatataccaatcaaatttttgaatcaggtcaactaatcaaattcacaacaatcatccacaatattatttagatttgacgctttcactgtttcacatgaaaattttacatttgacgcgatgacttgtggagtcacgatcattttagtcactcgttttaaacggatgcttcattcaaaaaatgtaacttatattcagaagactcctaacgtccgattcagatttacaaaaaaacaatatcattgaatcggaaaacagaaaagcatagtaatattctaagtatttaattataatcgtgaggaaatagttccgtaataatgggggaaaaatatatatatgataaaaccaaaatgagatttgcctgaagatgccatatgtctgatcaaacactctgagctgttgtgtcgatgaactcaccatatgccaagatacgctattagcgacaacacatttgtattgtcaaatgtcattaattaacatccacaggtccaacaacagagaaacaaaataattatcacaagtaaaatataaaattagtaatatacttgtacttataatttttggcttatgccttttaatttattttaacactagactcgacgaaactcatcactaacatgaccacaaaaaaaaaagattacaattctaaaacacaaagattaaaaaagaaaacataacgaagtaaaattaagactagacatcaactttacaagttgaaggagcgagaagaggaacttgtccgttagaagatggattaaatctcaaccacacatcacatctggcgtaaaatccataccgtccagtcttaatcgcaccagctttccaacgtagcctcccaaaaatcaccactctcatcaaaacgacgccgtaagcttcatcattttttaaaccattagctacttccggcgagactggtataccgttgcctcccatcaccggagctatcacaaccgtagatttatgtcctaaacgaagcggtggtagtggaagcggcggtgttatgatctgatctttgtacgttacgtacatagagagcttgtcgtagtgaatggagactctccggttagggtttcttgctaaaacgctgaactgaacggaggttgagattaacggcggcgctgtgaaattcaggtcgtagatggcggctccgacgacggtgagacgtggtttatgtggacggtagacgagccaaaggattaaggctatgatacctagtatgacaaggatggtgaagatcgcgccgcagattgcgcggcgagcatctccaccgcctcctccgccttctttagagtaagattctggcgttgaagaagcggagggagcgttcttgtgatctgctttggctgcgtgctctgcttttgcttctccttctcccatggctatactctacagatataagtgttaaagtgtgtatgtataggtatgtgtgtgtctatacgagaatcagagggttcggtgaagagtgaagactctaaagaaggaggaggagaagaaagaagataagtagatgcaaggttttgtctcttttctagttaataagagtaaacagtcttctagagtacagttttattaattgtttattaacttagaaagcttgtagttgtaattatgtgttaaagctaatctttttataaagtagccgtaaattactactgtttttacattgtgattttattttgttataatacttaatgtaataatataagatagagaagtactttcgaaagactccaaatctcggtgcaaccgttcacgtgacggatctgatgagtgatgaattttttaaaaatgaaaaatccaatgtaacgtgtatacatatggctatacataatcaaatactttgttgtcaatgattgacttatttggtgacaactatggtttcgtgcaacgtgataactatcactttttggccgtgttaatttttaaaaaaattagaatgaaatttatcaggttacggcctgtcaaagttagcaataacctaatatctgtttgcatgccagaatacggttatgtagaaagaaaattaaattatcatatttcacaattctttatcaactgtataaagcaattaataataaattaattagataccacatgtgtcatatttgttctaatgtttagaaaataaaagtacaagtcttttatgtccacatctccaacaatacttctgaccaaattccatatattattagtaagcttccaaaataaataataatcacatttaagaagaatctgttatttaatcacactaactgagataccgcaccaccgacactgtagtcaccgacaatgctgtggatgctacctgggcctcaattataagcccattataaaattgggcctacactaaaactattgtgtacagagagatatttgataatttgctgactgatacaagtctcacttccaacggccgatttattaaaaaaaaactccgacaaatg

SEQ ID NO: 21220 - DNA, 3000 bp, Unknown
  misc_feature (1)..( 3000): 2750-1469P.txt file - cDNA_ID_1842357; gDNA_ID_1620762; Annot_ID_50045
tacagagactgaatgatttacttgttgagagagaaaaactaatacaagatttagaagctgagattgaatacttccgggaccagacccctcagaagaagaataagctagatgttgcagaaaaagtgaccgagatggattcccctagtgagggaatgagcaacaagatacagagttgtttagttgggttcgacgaagagagattatacatcaccagttgtctggagaagattgaaaacagagtaaatggcaaggctcatgacgataatctaccagcacaagaatctgtttctgagctacatgagagagtagaaaggctgaagggagacttatacttcctagaacaagttatgaattctcttggccatggaaatgaaggcgtgcaatttgtaaaggaaatagcttctcatttgcaaactctgcggagtctcagcatgaaaagacaagatcagactgagtgttgatgtcctgagtaacaatcttcacaaaggtatgttctttcctcttccctgattgttgtgttgattttgttcttcagataacttcacctgcggaaattatagctctttgtacaaacatcttattattcatatgtcgttctggttttttaatatgttagacacctttgtggagaggatattgtagaggaaactaaaagaagttcaagattcaagaagcttaaagaaactgtatagcatcgtcttcattgccttcccctttcgtatacgataatctcagaattctttacgatttcatttttgggtttggtgttcataatttccttatgggttttcatattctttgtgtttattttgcatttttcttctagttttgagtgaagagtgaatgtaggttttgttctgaagttctcatttgattttttttattaggttggttgatacttttgtttagcatgtcaaaagtcatgcaactttgttaaacttgttgtacatttcttcgttataaactacttatacgtaatgtcctttgttaaactcatatttctttgttggtgttaggacctcgaatttggaaaataacaagaaggttgatacgcataatacaaacttacaaaagacaattaaaagaggaagagaagccaaaacctaatatctaaaatattttcttactgttaaagtagtgatatctaaaaaattaaaaactgtctttggcgaaaaaaaaaagggttcaagaataataacatgtaagaccaccatgcatcattcttatttcttcttttagtttgaacttcaataatccgtcctcctctgtcttaaccaactccttaattaatctgtcttaagcttccttaatttctacaacacttcctttgtctcaaccaaatttgtgtagtatcattcatgtcccactcttgtacatctctcacttctatgcttaattggaagattgtatcacagaacatgccacagcttgtgcccaatgcctcagtctcgttttaacctgttgaggatcatctcctgcaaatttatagaatataacatcaaaacacaatcatattatgaaaatatcaatctgacgaaaaagtttaggttgctatgttacctggagacataaccttcaaagaatcagagtcgcttattggactaccaaaagaggaagatcggtctccgagggaagtaggacgggaggatgaagaagatccaccactgcctggtgtagaaaccggcgagatctgacgagtcacagcgaagtaaaggtccaatgcaggcaatgtagttgtaagatgttgcccttgctcctcgttaaacccgaaccctaactcaatagatcctttgagctcactcaagtcctcgtccgtcaagtcatctcctccttcgttatgcttctcaaggtgatggagcatctggcgacggcgacgctcccatgcgatgtctctacgggtctctaacatggagagttgcttcgagagacgtttcttagccttagctttcggtggttccaatggcatcttttgaagctcttctacttcgctgtcgtagaaagatgacgacgatgaggttgatacactcaatgcttctccaaccctcaccatctttctctgttgttaatataagaaatcgcaggcacgtttatgattatcaacaaggggcagaatatttttgtgatgatgtgccttgttgtacaagttagctcatgtaagcgaggaaaaacagaagaacttgaatagattagtgaaaatcccagaactctgattccctttaaaaaatgttcatcccggaagaagaaaaggggtaagaagttttttctgtttggtttattttattaatgtacagaaggagatatgttttctggtgaactttaatggtgtgatattacaaaacacagaaacaatgagtttcttctaccacacatttggtgttgtttaaaagtagggtttgtagaatttccatttgccatttttaaagggatctctctgttaattccctggggagattctggagcttgattgattatggagacagaatccaaaaacaaaccttggtggtttttgttggaataactaactcttacttgatataggttttgttctagaaatttttggtgttgttgttggtcgaaacatattactaacacttgcaactaacaagatggtataaccactaaactagtacaagtatcatttagttaattaaacatgttagtatgttacaaaatttacgaatcaataacgaaataagcaaaataaccaattccaagccaagtgggacaaactcgaccgaaaagaccaaaaatcaatcataatttggtatcaaaaccattataccgggaagtaccagaataactcggttgggcctagcctctaataaaaatcggtcgggaaagaaactcacaactctctctcacacagcaacgttctattgaaatttggcctgaatccccagagtgcgacgaaaatgcagcagcaagtaagaaaatcatctcgaataggagtaatttattttgttagcatcttcttcaattgatgctaatggatggttgatg

SEQ ID NO: 21221 - DNA, 3000 bp, Unknown; identical to SEQ ID NO: 4765
  misc_feature (1)..( 3000): 2750-1469P.txt file - cDNA_ID_1842369; gDNA_ID_2926148; Annot_ID_197870

SEQ ID NO: 21222 - DNA, 3000 bp, Unknown; identical to SEQ ID NO: 4765
  misc_feature (1)..( 3000): 2750-1469P.txt file - cDNA_ID_1842369; gDNA_ID_2926148; Annot_ID_139184

SEQ ID NO: 21223 - DNA, 3000 bp, Unknown; identical to SEQ ID NO: 4765
  misc_feature (1)..( 3000): 2750-1469P.txt file - cDNA_ID_1842369; gDNA_ID_1620729; Annot_ID_49363

SEQ ID NO: 21224 - DNA, 3000 bp, Unknown; identical to SEQ ID NO: 4765
  misc_feature (1)..( 3000): 2750-1469P.txt file - cDNA_ID_1842369; gDNA_ID_1620729; Annot_ID_166046

SEQ ID NO: 21225 - DNA, 3003 bp, Unknown
  misc_feature (1)..( 3003): 2750-1469P.txt file - cDNA_ID_1842475; gDNA_ID_1620667; Annot_ID_48075
cacttcatgaatggatacatggttttgctttaagcataagtatatttgtattaaattttcactcaatttaattgcacgaatcattacaaaaataatatctcgctactcatataaataccctataaataaataagtgaattttttttatctctcatggaaatttgatttatgtatttatatgttttaagattcgaagaaatttttaaataatgaaaatttacaaatatataattcttaattcagaatttcagatattgaattacttattggatttttaaaacaaaaagaaaattacatgactttttttttcttttttttttttaaatatctgttagttcaagttaaaagaccatacattttctaaaggcgggacctatatcaggttaaattcatctccttttagaaaaaaaatatatttgggaaaggctttgatagcaagcaattaaagtatccgaaactaacaaaacctatctggtcttggactcttagtctttatataaacaacatcagatagatcgagagaccatacgcaacaatttactaatttctcttctccttcgttgcttttgaaaccctagttattatcgagagatcaaacacgtacgtacacaaaagaccgatcaaacagagaaggatgcagaagcgtgagttcatggagttgttcgaggcagcacttagagcggctaagtctgtgaaaggtgatgagaattctccagaggtatcgaggtttgtcgatgccatgaatcgtttgaaggaagcacccaagtcacttgtttgtgacgtggtctgcaaaacctccatggggcagggtttggaattcttcatcgatcacaaaaaccctaaaattcgatcggaaggaaggattcttcgggatctttggatgaagtttttttacgcttcaggtagagaaaagagccgtgataatagagaagctgcggtgaagatcccgacgcacgcaacgatgaagaagactggagattcaaagcgagacaaagtgcgtgagattctacaaacatctttggctaaagtcgcttctgaggttgttgacacggagatgaagacacgagtgactgcttgtgatccttgggttgtggctgtatctgtggaaactgcaatgtttgagaacttaggttgtttcatgggacctcaaaaagcaaagtaccggtctattctgttcaacatgggagatagtaacaatccagatttgaggaggaaagtgttacttggtgagattagtggggagagattagtgaagatggagaaggaagagatggggagtgagaagattcagaaggaggttcaaaggattaaagagagagcaagatttaaggaagagagtcgcgtgaagatgctttcatcagcagatatgatcatcatttagttagctgcagagatttagtcatgagtttcattattgtatagaatcagtattcgtgtcaattttctatcacaaactcgagatattagtagattgtaatttcaatacgatgatcgttttcaagttgcttcattgaatggtgtttctaaatctgcgtttaaagaatctagtcaaagtgtttcgtttcataagagggagctctgcagtttatgcagtttaaggggtctttggttttttcttttgaatgtttgtcttctattcgcattaggactcattgttcttatgcagccattaattcccggagaaaatgctgtacaatggttccttgcaaattacattctttggctacaaaatcctcattgtatgaagttgttgtacataggttcttggtacaccaattcgagaagaaatccgttgtatgaatccacgcattacacagatttcaggtttccgcagataaaggcacatctgtggcacaaggttcgtgtcttttctctttttacatacattcttgagagaaccaaacgctcatttacttaatggaaggcctttcccacctctcttcaacttcaaacaagaagtagctggagcatcacctgaactagtcaacaagttgatccagaccatatcaaaacacaattaggtctaagtttcttgattcaatctggaacataaagaatctgcacaaagacaataactctttaaatgtaatgtaccattacacgagccacaaggtcatagttgaaggaaaaagtggaggacacacttcgaagtttttcctcctcgaacaagtttgatggtcaaagccagctgcaagcaaaccaacttccccaaatctgcaaaaacaaaaactctcaagttgtatctgcttatttctcttctcttttcaagtttggtgaaaacaatctcatcttttcttgtttcttttacgcatatgtaaatgagtttagtcagaagttttatatagtatttgagcagaaggtgaagaatctagtcaaagtgatcaccaaagtgtttcataagagtttgtgcagttaagggtctttggtttttctttttttcatacagtacttttgaatttttgtcttctattattaccaaattttatgaaatggtttgtttatgactcattttcttacaaaggcaaaatcttaaatacttttttcctgtatttctgcgtaaagattctctcattattcattcattgtccttggtccttaccatattcatcaaaggtagctgagagaagtcagagaatgatgattcttaacatgttgttttaattaaatgtaatagcatgagagggcaacaatccgttgtagtctagctggtcaggatactcggctctcacccaagagacccgggttcgagtcccggcaacggagttttttttataattgttaaccgtaagtcaggggtactttcgtcattaccttatttgaagaaaccctagtgtctttcatataattatcacacactacgcagccgacgcaattcgtgtgccactctatttgctcatctccttcgatttcgaacccctaatcttgagatggtaaagtttcatccttttgatctatggttatcttcgttcctcgttttggggatttaacttactatttacgatg

SEQ ID NO: 21226 - DNA, 3003 bp, Unknown; identical to SEQ ID NO: 21225
  misc_feature (1)..( 3003): 2750-1469P.txt file - cDNA_ID_1842475; gDNA_ID_2926171; Annot_ID_140120

SEQ ID NO: 21227 - DNA, 3000 bp, Unknown; identical to SEQ ID NO: 5785
  misc_feature (1)..( 3000): 2750-1469P.txt file - cDNA_ID_1842487; gDNA_ID_1620818; Annot_ID_50653

SEQ ID NO: 21228 - DNA, 3000 bp, Unknown; identical to SEQ ID NO: 7592
  misc_feature (1)..( 3000): 2750-1469P.txt file - cDNA_ID_1842586; gDNA_ID_1621153; Annot_ID_56921

SEQ ID NO: 21229 - DNA, 3003 bp, Unknown
  misc_feature (1)..( 3003): 2750-1469P.txt file - cDNA_ID_1842620; gDNA_ID_1621150; Annot_ID_56859
aaccagctctctcagccgccacaacagccattacagacgcgtgtggccggatcacaacacgcttaaccactgccgggaaatcagagatgcgcgaaccagaatcttcaactacctcgccaataccaagtcccggatcgggagttgcgccgccgttttgctgaagctcatcggcattttcaacgtcatccatttcttcgttgttgttgttgttattctcttcgtcttcttcctccatatcttcctcctcttgtttcggtttcctcgccgccgataacccccctctcttcttccttttccatttccctcttctatctgcgacagaattgtaaaaagtgtaattcaattcacacgaattctcgaaatacccatcactacgatctatgtgggtaagtcaaatcccaatttaaatttggattttgagagagataaagatgtgaaacagcaatttaccttcagaagctggcatttttgtggatgaagatagagaaatagaggttttgggttctgtggaatcgaagcaagacccttagtaaaaagaattgctttctttgtcttctctcctccgagtcgttctgatttccagctctcgagctaaacaccaaacctttttctcgcaatttctttcaccatttccttcattaatctctatatattaattcattctccacgacgacctaaccttctcgacaaacaagagggttctgatttcgaaattcaagcttcgttgaccaatccaaattttggtttaacttcggttaaagtcaactttacttcggttttatttttcaattttgaatgagaaaaaccgaatcaattatttagttcggttcttaaagttcaaattggttaaaccggtttaaattgatacattagtcgaccgtcgcgcattaatactggtgtggtggttccgttaacgagcaacggcgatgaagagacctcgacctacatctcagccgtcgatctcttccaccgtcaaaccaccactgtctccgccggtcacaccgattctcaaacagaagctacacagaacaggaacacctaaatggttcccgttaaaactaacccacacggagctgacgttgccgttaacttttccgacgggtcaaacattccggtggaagaaaactggagcgattcagtatagcggaacgattgggcctcacttagtctctcttagacaacgtccaggagacgacgcagtttcctactgcgtccattgtagcacaagccctaaatccgcggagcttgcgttgctcgattttctcaatgctgagatctcgttagctgagctatggtctgatttctcgaaaaaagatcctcgtttcggagagctagcgagacatctccgtggcgctcgtgtgttgaggcaggatccgctcgagtgcttgatacagtttttgtgctcatcgaacaataacattgcgaggattacgaagatggtggattttgtttcgtctttagggttacatttgggtgacattgatggatttgagtttcatcagttcccatcattggatcgattatctagggtttctgaggaagagtttagaaaggctggttttggttacaggtgatttcatcactctctaatggttgcattatgttgaattagacatttaggctaaaactttgcttgaagcttatacttttatttactctgtggctatacattcatagaattgaagctaatgtttggtctaagctagataatcattgtgtggccgtttctctgattggttctgatctcatttgaaaactctcattctggtttatcttgtggtgagcagagccaaatacataacaggtacagtgaatgctttgcaagcaaagccaggtggtggtaatgaatggcttctttctctgcgcaaagtcgaactccaagaggcagttgctgcgctgtgtacattacctggtgttggtccgaaggtagcagcttgcatagctctgttttctcttgatcagcatagtgctattccggttgacacacatgtctggcaggtaacaaagtccatcggtttctatgtattgtacttacttaattgagatccaattacataatggtgatgatgacttcgggcaactttttttttgttctgttttggataatggatcagatcgcaacaaattatctactgccagaccttgctggtgcaaaactgacacctaaactccatggccgagttgcagaagcctttgtgagtaaatatggtgaatatgctggttgggctcaaacattgcttttcattgccgagttacctgcacaaaaaactctcttgcaatcgttttcccagcccattaacaaactggatgagtctgcagaagttaatgaaactagctgtgatacgttgaagccatgactatgtgtctacctaagctacgaggaatcgttttcacaacccattcttgatgcgtcaagtccagaaacttgaccttggaagagctaagaaaattctgaagctgatgcagtatttggctccctggcaaatgagcgtagttatttgttatgatcattgtttactaaggaaccaatcttgatatgtacttgtaactttacattcaaacttccaaattaaattctaattgtttgttccctttgcaattctcttgatttgaaatgagaattttttccttttatctatttcttttgtcaaaaaacaaaactaaatttcgtcgaaattaaatttctataagaagcccaataaagcgaggcctaaattaggcccaaaatactattggaggcgaaaaagaaagtccggctggattttcctccaagccaccgtcgactttacttagtactccctctctctcccctcctccttcccagatttcgtctccgttctgaaaaaaactccaaattctactctgaaaccctaagtttccgatgtcggtaagtttgataattcccagttaattttaatttcggagacctcagctctattagtcttacgcatcaatggtttaatagtgactgaacgataaaattgattgatatttgtggcgatg

SEQ ID NO: 21230 - DNA, 3003 bp, Unknown; identical to SEQ ID NO: 21229
  misc_feature (1)..( 3003): 2750-1469P.txt file - cDNA_ID_1842620; gDNA_ID_1621150; Annot_ID_173210

SEQ ID NO: 21231 - DNA, 3000 bp, Unknown; identical to SEQ ID NO: 7287
  misc_feature (1)..( 3000): 2750-1469P.txt file - cDNA_ID_1842703; gDNA_ID_1621137; Annot_ID_56572

SEQ ID NO: 21232 - DNA, 3003 bp, Unknown
  misc_feature (1)..( 3003): 2750-1469P.txt file - cDNA_ID_1842707; gDNA_ID_1621152; Annot_ID_56901
ttcttcaatgactaaacattgtagaatgtgtctgattttcttgtaggcggtaccgcttttcttatcagagattgctcccgcgaggcttcgtggaggtctcaacattgttttccaacttatggttacaattggaatcctaattgctaacatagtcaactacttcacctcctcaattcatccttacggatggagaattgccctcggtggcgcgggaattccggctctcatcctcctctttggatcgcttctcatctgcgaaacacccactagtctcatcgaacggaacaaaaccaaggaaggaaaagaaacactcaagaagatcagaggcgttgaagatgttgatgaggagtatgaatcaatagtccatgcttgcgatatcgcaaggcaggtcaaggacccttacacgaaactgatgaaacccgcgagcaggccgcctttcgtgattggaatgttgctacagtttttccaacagttcactggaatcaacgcgattatgttctacgctccggttttgttccagactgtagggtttggaaatgacgcagctctgctttccgcggttgtcacgggaacgatcaacgttctcagcacgtttgtcgggattttccttgtcgacaaaactggccgaagatttctattgctccaatcttccgttcacatgctcatatgccaggtaacattagttaagttaacttttcttgtgtcacaagcgatcctcctaaactaacaattttctcaaacagttggtcattggaatcatcctagccaaggacctagacgtgacgggtacgctagcacggccacaagccctagtagtggtgatcttcgtgtgtgtttacgtgatgggtttcgcttggtcatggggccctctaggatggctaatccctagtgagaccttccccttggagactcgaacggaagggttcgcattggccgtgtcttgcaacatgttcttcacgttcgtgatcgctcaggccttcctatcgatgctttgcgcgatgaagtcagggatattcttcttcttcagtggttggatcgttgtgatgggacttttcgctttgttcttcgtgccggaaacgaaaggagtctccattgatgacatgagagatagtgtgtggaagctacattggtactggaagaggtttatgctcgaggaagatgagcatgacgttgagaagagaactgattgagcttgttgatcgatcacattctttctctaactttccttagttttttttttgtcatatggggaacaacatacagtaataagagaccaacttgttattcttgtattataatatgctttcttcaggtttggtatcttacataaaaaaagaaaactccagggtcatacaatttttatgtgttttaagtcacttgatacaagataaatattgttcataataaaataaagttgttgttttacagtgggtaaaagtgtcacattattatcaacgattgatccatgtacaatactttctatgttccttaatatttgatttaaaaaaaaaaaacacatgttaagaaaacatattaaaaaatgattctaaatattttgttttttgtgatttatatttgttataattttaaaccaataatatttaactatttattttgaaatttgatattcatcaataataactaattaatattgcttaggaaacctaaaaaatcaatctgttaaaaacatttttttttctttcaaaaaaatcaaataataagaaacagaaggagtaattaacaaattatcacccgaaaatattcggtgctccatttgtttctgattttagttgtggatttcgaattgaaaattttattttattttattatacaacatttgccattttatttccacagaaaaatctgaatactgagagtgagaggtacatggtcatgaactcatgatcacatggttttggtagcacatggaactgcatttcagttctacatgtagttgtaaacatcagaataactacatgtatggctatatgcatgtaaaaccgcagttgtccgtattcacaaacgtaccaatttttaaccgctaaaatagtcgttcaaaatgctttaaaaccgcaatcgcaggcatccataaattctcgcagtcgtgatcgcacgtcagctccgtttaaacatgtcaagccttgagtcgatcattacaataatatctcgtgtaccacgttatgcttaaaaaaattaatcatatcttaaacacttgccttgccacccactacttctagatctcccacaaatccacagaaataatatatatggtacttagaaaaatcataaaaatatcaaataccaaattgaagtctctggcatgagtcggtcactacaataataactaaactgaaatacattttatggctaattgatgcagaacctgaaattaaaaaaaattaaagatacaacaaaccatacctttttgtctttttttttttttaattattttaaagataactcatttattttgaatgtatgtacgcagttttcggttccgtattgtgtattcatagtctaccataaaatttaacatctacctttcccaatggacccaaacgcttcgaattgaacatgggcgttgctttctcttgtgagttgtatctaatataaaatttggataattatgatttcgtcggtgattttgatatactatatctctcgtgtacaacgttttgcttaaaaatttgttcatatcttgaacacttgtgacttgccacccactacttcgagatctcctacaaatccgtagaaatatcgtttcacaatagacttgcatgttacttggaaaaaggattaaaatattaataaccaaatcgaaatctgatactttacacattcgaagtcaaacaaaataataaaaatgaatgtgtaacaaatatatttttttccccacgaagaatccacttttagtattaactaaactcgatcagtaagtaatccgtctatataaatgtggaggcttcccaaaacaaaacaaaacaaaaaagatctcaaaatatg

SEQ ID NO: 21233 - DNA, 3003 bp, Unknown; identical to SEQ ID NO: 21232
  misc_feature (1)..( 3003): 2750-1469P.txt file - cDNA_ID_1842707; gDNA_ID_1621152; Annot_ID_173295

SEQ ID NO: 21234 - DNA, 3003 bp, Unknown; identical to SEQ ID NO: 21232
  misc_feature (1)..( 3003): 2750-1469P.txt file - cDNA_ID_1842707; gDNA_ID_1620787; Annot_ID_168177

SEQ ID NO: 21235 - DNA, 3000 bp, Unknown; identical to SEQ ID NO: 5434
  misc_feature (1)..( 3000): 2750-1469P.txt file - cDNA_ID_1842723; gDNA_ID_1620790; Annot_ID_50453

SEQ ID NO: 21236 - DNA, 3000 bp, Unknown; identical to SEQ ID NO: 5434
  misc_feature (1)..( 3000): 2750-1469P.txt file - cDNA_ID_1842723; gDNA_ID_1620790; Annot_ID_168240

SEQ ID NO: 21237 - DNA, 3000 bp, Unknown
  misc_feature (1)..( 3000): 2750-1469P.txt file - cDNA_ID_1842741; gDNA_ID_1620784; Annot_ID_50395
taaggcttatgcgttagtagtagggatcggatgcatgatttggacccgtgatttgatcgatatggaacattttgaacgcggtggaaactctatcaacatccggctagcgggttctaaactaggtttggaaaaatgtttaagctatcatataacattgtgaaagatttaaacatgactaatctgtttcttttgttgtgtatacaggtggtgggaaggaaaattcaacactttggataattgttttcagtgttataggagcattcttactaggattatgcatttggatcttatggaagtttaagaaaagccttaaaggtaaagtctctattcgtacatagtcttgtttcacaagaattaaactactgagactgtcaattactccatgatctgcagctttcttgtggaagaagaaagatatcacagtttctgatatcatagagaacagagattactcaagctcgccgatcaaagttctagtaggggatcaagttgacacacccgatttaccaatattcagttttgacagcgtagcctcagctactggagatttcgctgaagagaacaagcttggacagggcggattcggtactgtatataaggtagaaaatgattttttttttctgacaataatactggataataaaactttgctttgtatgcaaaaacttatgtgttatgtttggacagggaaacttttcagaaggaagagagattgcagtgaagagactatcagggaaatctaaacaaggactagaggagttcaagaacgagatcttactaatcgcgaaactccagcatcggaatcttgttagattactaggatgttgcattgaagacaatgagaagatgcttctctatgaatatatgccaaacaagagtttggaccgctttctttttggtatgtttttttctaaacaatttcaattaaaatgttttgaaaatgttcggattgagtatataatgactctgcgcagatgagagtaaacaaggaagtttggactggagaaaacgatgggaggtcattggaggaatcgcgaggggattactttacttacatagagactcaagactaaagatcattcaccgtgacctaaaagctagcaatatcttgctagacacggaaatgaatccaaagatctcggatttcggtatggctaggatattcaactaccgacaagaccatgccaacacaatccgagtcgtcggcacatagtaacttaacaaacctctttatctcctctaaattaaacaatatcgaactctatcaatttttaatgattttgatgttcaacaagtgtagtggttatatggctccggagtatgcaatggaagggatattctcagagaaatcagatgtgtatagctttggagtgttgatattggagattgtgagtggaagaaaaaacgttagctttcgagggactgatcatggaagtctcattggttatgtacgtctcttttctttaaccataaattttcaggtctaactaaaatattcgaatatttgttactaatgaatgttctaaacggaaaaaaaaaaataaggcgtggcatttatggagccaaggaaagacaaaagagatgatagatccaattgtgaaggacactagagacgtgacggaagcgatgagatgcatccacgtgggtatgttgtgtacacaagactcggtcattcacagaccaaacatgggttcggttttgttgatgttggagagtcaaaccagtcaacttccacccccgagacagccgaccttccactcgttcttgaactctggtgacattgaactcaactttgacggtcacgatgttgcctccgttaacgatgttactttcacaacaattgttggtagatgactcactgaccagaagttatttttccccaaaacgctctttgactatccatttggtctcgaactcttttctccatagttttcaactttttatacataattaaattcttcgttgaaaatattataatacatgtacattgacgatgaaaaactaatcggatttgtacacaacatacttttagcaacaaaagagaagaagctcaacaacatacttaattgtgaagaaaaaagcgttgttgttcgaacatgaattggagaagttggaatatggacaaaggtagtggcatcgaaggaggaatttccagtgatttgagatttaatgagttttaagatgattttgttgaattttagggaattagaaaatttgttattaaatttataaaaatcttcccttaaatcatatgatttggacatttgtattcttaatttttttttttttgacatctcacatatttcttttttaaaaaactgtaaaaccataaaaaaaaaaaaattatttacggtttctatatgattatagcttttataaaactaaaaaccgtaaaaccaaaaaaccgaagtgaaaccaaaccgaaaaacggtatgcccatccctagggctagtaatgaaatcaacactcttgaagtggagttatctacatttttatgtttgattataaattatatttttccacccatttgtaaaaatcctatttaaaagagaaaattttcatttataactaagttctcatttgtgaacaatgttggttgatttgattctacattttaaaattaataatccaataacacttgagttttacaaactttttaaattcatgtttgaataacacaagattttaatacaaatcacaccaaaacctttattcaagattttattttacctatctctcctagtaaacataaccaaaaaagtggtaataactcttgctgaaaaaaacaaatggtaataattaggaaccgttagattagattcatatcggacggtaaaggctgtgataccatcaccgacttacatgagaacgaaacactggaaaactcaattccccaatttctccaatctgagaaaatagggtttccgatttggatccttaattcagacacctgactcgtcttctcatcctacccccaattcaatattcgtcgccaatatg

SEQ ID NO: 21238 - DNA, 3000 bp, Unknown; identical to SEQ ID NO: 21237
  misc_feature (1)..( 3000): 2750-1469P.txt file - cDNA_ID_1842741; gDNA_ID_1620784; Annot_ID_168066

SEQ ID NO: 21239 - DNA, 3000 bp, Unknown
  misc_feature (1)..( 3000): 2750-1469P.txt file - cDNA_ID_1842794; gDNA_ID_1620674; Annot_ID_48211
tattaaatatagttatgggagaacccttttgctaatcttcgcatatattcaatttttcatctatgcaactatagtttattcaaaagttttagttaccatcccgtcgcaagcagagctggggcataactatctcggaagaagattctacctaacactaaactacattggttgtttgagatcaatttgattgaaatgatttcgttattgtaataacaaataaaaacaagataacttttagacatttttagttttgaacaagatatgacaaacattctaatccataaagacaagcgttttggttcctacttcgtatcaagagggctacttactaagttactatttgaccttgagagacgatcgttgtgaaggtgttacactaaaatattaattatccactaatgacgaacagtgtccttaattttttgttggtttggggttttggttgggtctctattggcccattgggcttattatgaatgcttctagtttttgttgttgtgtaattttcatctcggtgtcaacctgtcaagtcaattgtcacctcatgcacaaacggtaacttatttgagacgcaaaatttacaacggtaagaaaatatagacgttagaaaagtagccgttgaaagaagaaatccgaagctgcctatataagtggctcgtgctcactcacttacttcccacaatcatttcttcttctgtataatcgcttactattctcgtagtttcagaaagcaaaagtcttttttctagttgaaaaaccaaagagagagagagtcagagagctcaaagttcatccaaagttaatcgagagcaagtttcattcctctcaacaaagttcgtccaaggtttctcgtagtcactagccgaactctgcttttaagattggtaagaattcttagatgtttccttacttttctacgacttatgttgttgatcgaaacactttcatggtctattcttctcactaaagtttcgtcagtttcagttttacgcatcatactattttcactttgtctaaactcacatcttcctctgttttctttttcgagtgttcttgcaggtttctctccaagcaaatagctagaaatggaaggctcatcaagcttcactacaaccaacgcaaagaaagaaaaacagagagcgttcacccaatttccccgtgatttcattatatactatcatcgtaatcaagaactctgctttgagactctgctttagggtttggtaagaatctgatgtttctcctttttgtttgacgaattgagccgtgtattttctgaaacatcttgattttgggaattgtagtcataatgttaaagagagttattatagtgtaatttatctttgagaaatttctgccatctaaactgtttctgacaattacaggtgagagagagaagagataaatgatccgtcacagtcacgacaaacgatccacggcaacctttggcggtgatagcgggcttgttgcgccggggtatcatcttggacttccagttgactactcgccgtgatgttcagggttagtttcatcaatgctcttcttatatgtctctctcagtcgttactctgttaaaagccatataataaatcgtagacttggtgagttatttggtcggattttatagattaactctctcattcatccatatgtagctcgtgtatttatgatttttatgattttttgtcattgcatattttcaaacttgttagtaattttggaatgttgatttgataaaactgattccaactccacgaatcctggtttatcaaaactgtgattgtatcatcgtacacacatcaaataaaaacttttactttgaacattttcaaatgctaactttttccgacaaattaattacatggtttgtgaaagattcccaactcttaacgtttttgttctcgctgtcgcaggttttcttatcaaggaaggttacgttgacccgaataagttcattagcatagacatctttcctcacgaaaggcaaatatgaccaatgttgacattttacatactcggtaaaatatttgttagttgagattattgcaatttttggcagaaaatattaccacactttgttgacatacaaataagttcaggtttggtccatacaccacattctcactagccaacatgcaaattcaactaaccacattcaatatcatcaaacatccttgaaattttaacataaatttggcgagtatgcggaagaactagtgcattacaactttattgtaccgcaattggctgattggtttcataaatattgaatcataacttagagattttttcacatttggtgagcatccggaaaaactagtaaaaaaatgaattagaatagtaaaacaaatcgtactagaaattttacagacagttaaaaacacgtataattttagccagtgttaatttttcttatttgcattttaaacaacaaagacaaaatacattatgtgcaactcctttattttacttttttgtatacaagataaataaattaatttgaatatacactaaaaaatcaaacagaaaaaagaagaagaagtaaaatagtaattatttaaaagacaacagaagaagtaaaaaaagtaaaaagattgcaaaacagtcggaaggttgaatggctgagattaatcgaacgcttcaatggcaattatttccggccatcactttcttctctacttctttctttctctctctagttgttgttctctctctctctcgcatcctccaattcatcgtcctcacgttcccttttgtttattcatcttccttccttcttcacatttctgattttctctatttggggggtttgtttccacattatacatatctagggttttgagatggttaattgaaagataatggtcgaagtttcggaggaattggcttcacattgtgggtgtttctggcttcctcaggtttaaatctgaggttgatctcttttgttttttggtaaattgtgacatattttggctcgaagaagaagaagaagaggcaatg

SEQ ID NO: 21240 - DNA, 3000 bp, Unknown; identical to SEQ ID NO: 21239
  misc_feature (1)..( 3000): 2750-1469P.txt file - cDNA_ID_1842794; gDNA_ID_1620708; Annot_ID_48932

SEQ ID NO: 21241 - DNA, 3000 bp, Unknown; identical to SEQ ID NO: 21239
  misc_feature (1)..( 3000): 2750-1469P.txt file - cDNA_ID_1842794; gDNA_ID_1620708; Annot_ID_165368

SEQ ID NO: 21242 - DNA, 3000 bp, Unknown; identical to SEQ ID NO: 21239
  misc_feature (1)..( 3000): 2750-1469P.txt file - cDNA_ID_1842794; gDNA_ID_1620674; Annot_ID_164209

SEQ ID NO: 21243 - DNA, 3000 bp, Unknown; identical to SEQ ID NO: 21239
  misc_feature (1)..( 3000): 2750-1469P.txt file - cDNA_ID_1842794; gDNA_ID_2926210; Annot_ID_141942

SEQ ID NO: 21244 - DNA, 3000 bp, Unknown; identical to SEQ ID NO: 21239
  misc_feature (1)..( 3000): 2750-1469P.txt file - cDNA_ID_1842794; gDNA_ID_2926210; Annot_ID_202556

SEQ ID NO: 21245 - DNA, 3003 bp, Unknown
  misc_feature (1)..( 3003): 2750-1469P.txt file - cDNA_ID_1842843; gDNA_ID_1620636; Annot_ID_47386
aattctgcaatactgtgccatccctaatgaccatgaatcccgaatctccaatattggctatgtggagttcctacaaagtaattttacatgatcacagactgactctatctcaaaaggatttccaatgcaatatatatgttagggaccaagtctcacattattgtcaagatgagcaattaaggctgttgatgatccagaggacttagtctcattgacacttctatggagaacttgaactgggtcacttatcttagcagtttcattggaaataatcttttcacagttgctcatgagttcttgagcatacattcccttattgattcctgaaagatgaatcaaacatatattcggcaaggccaaatacaagtgactgagtttctgcaagaatttggaaaactatgtgaaaatacttatatacagtatttaccttcaaatgaccactgagagactccatcagcaatacctatccaattgtggtgagagataaaataagcatcttcccgacctgccaatgcctggacatcattatttctaaattactaaccacataacataagtatagggatttaaaattcaaaaattgtcagaatgttaaaaatgatgtttttgaggtggttggaaatgagaacaagatatgaaagatcttgagatatagagtgttaataattaatatttcaacaactgtctcttatttttgtgtatactaaacagaaagaattacaggtaccttaaaggggctttggagtgaagcaaaaccagagtccaagtaaaatgctttggacacaagttcttccctgtttagatgtcaaacatccaaccatagcaaaacaatcatgcttttataaaagctgcaatatgattcctagccctgtatgaaaatatgaatagatacatacatatatgcatgtagctgtatctgtgcaagacaatagtacagtttgtctaagaagagttaaatatatcacttactaacctgccagaagccgctttaatgggttcaagactggccgtttcaggtacaggaagttggagatcttccacttttgtgtcatcattattggatatgctaccactatcagttattgtgtccctcacagttatttcatcttctgtggttgaagctacattttctccatcattttccttcatgaatgataagtaattagagtggtggcactaattctgttcaacaacactctctgatgtctctttccttctacacctgttaaaactacttaatggtttagagttagtactcaccacatcagacgtaacaactacaagcttttcagtgctctcgtcaacgctactatgcactgcttctggttcaacaaaagtttccatagggtttttctcagacgtatcaataataggcttttgagcgatctcatcaacgctgtgacgtgttgcttctgaagttgaaatgagttcatcagaagagacagcagctgtagctgttggttcaactacaggattctcctcagcttcaaaagtgttcagaaggttttcctcagacgtatcaattacaggtttttgagcaatctcatcaacgctgcgatgtgttgcttctgaagttgaaaggagttcatcaggagacaaatcatctgtagctgttggttccgcgacaagattctcctcagcttcaataggcttttccgtcacatccaaattgtcatcaatttcaatggtggatacaggcgtaatttcctgttgtgtagacaatgacggtcttgcctgaacctccatacgattctcttgataaccatttgtctcacagtctcctattttattgacagaaactttcttcatggcttcagaagaaagaggctctacattatatgacttagccgtgatttccttctcaacaacagcttcttcttcagtagagctaattggaatagcttctgctacactaactatggagctcagattggaaacactagcactcttggcatcaattttatcttcgctccgtgatacattcacagtttctttcttcttcttagtaggagaacgaacccttttacgatcctttattttaatgacattgctaagatcggaaggagcagctgtttcctctttctcagtacttgtttcaataatagaactgaccaatttcttttgtttccttgaaacttcactggcttcttcagcaatcttagcattttgcgtttctacctcaacacatctcgctttttcttcagcctcgagatatttctcaatctcacttgcatccccgaaccgaaagacatgacttccatctttaagctctgcaagatccaaacaactatcaatataagagtatagctcagatttcaaagtaaataacttttctattcttaaacttgaaactaaaaaatattttaggttttgatacttgaatccgaagtaaaattggttacaacctagtaattgagtgttcagacacttcaaaaattagggaaaaaactaaaattcaaaacttctccggtgaaggaagataaaacaaaagaagaagaggaaacacgaagacttacgagtgctggacacgagatcgaacttctctggagcagaattctccggtggagaagaagaggaagctgaagactttgaaggtgaaatggaattagccaactgtagctgagaggacaatcggaactcaggaacggaatatctgattccaccgggaaatctccatgaacggtgaagagaacaagggaagatgagaaaaggaggagcttgaagagaaagaatcaaatgatcggccataacttaaacattgaagtctgtaacaaagagtgtcacagaaatggtttagagtagacgaagaagatgataattgggtgacgttacaaccggtggtaaccctctgtttctatcagatgtgttcgcttcacagatattttgtggctaccgtttttttttcataattgggctataaaaatcatatctttttgactcttctcttctctatccattctctgccgaactagtcgtcaatcgaaatcccaaagatcagcgatg

SEQ ID NO: 21246 - DNA, 3003 bp, Unknown; identical to SEQ ID NO: 21245
  misc_feature (1)..( 3003): 2750-1469P.txt file - cDNA_ID_1842843; gDNA_ID_1620636; Annot_ID_162920

SEQ ID NO: 21247 - DNA, 3003 bp, Unknown; identical to SEQ ID NO: 21245
  misc_feature (1)..( 3003): 2750-1469P.txt file - cDNA_ID_1842843; gDNA_ID_2926204; Annot_ID_141659

SEQ ID NO: 21248 - DNA, 3003 bp, Unknown; identical to SEQ ID NO: 21245
  misc_feature (1)..( 3003): 2750-1469P.txt file - cDNA_ID_1842843; gDNA_ID_2926204; Annot_ID_202070

SEQ ID NO: 21249 - DNA, 3003 bp, Unknown
  misc_feature (1)..( 3003): 2750-1469P.txt file - cDNA_ID_1843013; gDNA_ID_1621098; Annot_ID_55773
ctgaataacgaactaaacatgttatggattaggccctaatagctagtccagttaggattttaagattttccgatgtatattaagtgtcaatgtgtcatacatgagcctctaataaacacacgcccaaaatcaatagaactaactaaccctatacaccgaagtaatatagaaccagcacgaactctagatctggaaaatataaatacaaaatatcttttaaaatgttttctaaatattattgtaattatcatatgaaaaaaaaactattcataaaaagtaattatcaacatatgtaatctttcaaagatgcacttgatgtgtgtatcttgttggttagaattttaatttattaatcgataacttggaaggcaaataacagtaaaaataataatctaactgtagtaaatatctccccacacgtcattttttttatttttttttattttttattttggcaactcacatggtttgattcattgataagtcagtttcaattttatttttctcaaatttaaataattctccatttctaaaaataaaggggcaaggtattggtacgcacatgagactaacattcatacctttttatgaaataaataaaacaaaaagggacacaagaaggaacgcaagaattttaaactgaaatgattgtatctctaaattgagaaaaatcccaaaaagaattagtaacaaattaaataactaagcggtgttgttttattcggaggtaaaatatatatatggagggtatagcgtcaactcgcttttttactacattttgatttctctcccaaagttctttaatttttgtttgggtatcacatttgtagtcagaaacaaaattgttgaatgaattatcgacgactattttcactcgttggaatagtcgggattcaatttattaaaccgtcgtaaggaagctaaagatgtaaaaatgatgatatacagacaatttggctagctcattcactttttaaatgggcaaaccaatcatgaatgctagtttaatttatcgtgtgattgattttttttttatataaaaaaatagaagtaaaattgtaactttttatgaaaaccgtcgtaatcgtacgtcactaagctacaaaaatacaacaaacagtgactaataagaaaatgtagagtgatattagatgaatttaacacgtggaaaaatcatgaggaggagatgattttttctgttgcattcccttctgtggttaccagctacgataacgttcacgccctcctccacttaaattagaatgtgagaaaataaaatagcaagaaattggagatcacaacagtattgagtgtaggacatattacaaaggagacaaaatcagtcaatagtaaaaaggtatcacaataaaaaaaaatgtcaataaaaaggggccattgtatgacatgaaagaacaaaattaagtgatcatcacttctcctcctttatcgagagcttcagttttagagcaacaatgtctctatttctgaagcccttcctcttcctatacgacaccactcttagtcttctcttacttctggtactttatagctcgatctctctatatataaatacttaaataattactgtgacattaagttaattgttatttctcatgcatgaattagttcaatggatggagtcttgaggatacagcagcagcccaaaagaggcgtgaagcagacaaaaatgctgcagaaactgaatggatccaactccaatacttgtggaccaaaacaaggagtgttgtactacttcccgttttcaagggtttggtggttatgtgtttggttctatccattatagtgttcttcgagagtttttacatgaactttgtgatactcttcgtcaagttatttaaacgtaaaccccataaagtgtacaaatgggaggccatgcaagaagatgttgaggttggacccgataactacccaatggttcttatccaaataccaatgtacaatgaaaaagaggtatacgcatatatatactacctttattaattacactcttttattatatggttgatttagtagttcaagttgtagatgattttacggatccggccgtaagggtaagtagcttgttcgaattccttttttttcttatttattaattagatattacaaaaaaaaaactaaacaattcatacaacatgttaaaaacaatggacaaaccaatctaaagttcaaaacgcattggttaaatatttattcaaccgattttttgacctagaccgctctaattacttggttaagaacatcagactaatatatttttaaaatttaaatttatttaataaataaccacaaaagtggaaaaatattttgaagatacgaatatataaaaataacatcatgttttattttaatttgaaaatagaaaatatattgaaacatacataatttctgtaactatcatatatattttattaattaaacaaaaataaaataatatgaaaatgtttccgaaattttttgtttaattagttaggtgttagacttagacccccttcaagcgcttgattagtgcctaatttttttgcacaaactttattttgtgtttcttatcttttattggagaaacaaacaatataattgtttgcttaattttttcttttataatacttttaactattaaatttaaaatttgtttgaggtttaaatagttctccttatatatagaatttccgataataaatagtatagtgtgtaacacttttctcacaattttttcacctaagatgtttatctttttcctataattgaatcttcttttgatttacaaatcaaagatatatcacaaaattttgatatagacgggacttctatatcgatccatcacatattagaatgcaaacattgtaatttgtatatatagtatgatgaatgtgaaagtgtaagcaggaaggtgtggacgtagagattgcaaaatggcaaagccaaggcataaacataaggtgtgaaaggagagataacaggaacggctacaaagccggagctatg

SEQ ID NO: 21250 - DNA, 3003 bp, Unknown; identical to SEQ ID NO: 21249
  misc_feature (1)..( 3003): 2750-1469P.txt file - cDNA_ID_1843013; gDNA_ID_2926166; Annot_ID_139913

SEQ ID NO: 21251 - DNA, 3003 bp, Unknown
  misc_feature (1)..( 3003): 2750-1469P.txt file - cDNA_ID_1843072; gDNA_ID_1620769; Annot_ID_50170
ggaatgttgcatatgcttatggacacagagttagatgttacgcaacaggattatgttaggaccgcacaggcaagtggaaaagctttagtctcgctaataaatgaggttttggaccaagcaaagattgaatctggaaagcttgaacttgaggaggtgcggtttgatttgagaggaatattagatgatgtcctgtcactcttctctagcaagtcccaacaaaagggggtggaggtaacttactatatgatctgcaaagcaagggttgtaactgatagcaagtctttcttactgattttttgagtgttgctgatgaacgcagttggcagtatacatatctgatcgtgttccagatatgttaattggtgatcctgggaggtttcgacaaatactcacaaatcttatgggtaattccattaaggtaaacttttttattatgtttttttctgaccattccttgcatccgagttgatcaacggagctgatcatttatatatattctggcagttcactgagaaaggacacatctttgtaactgttcatttggtggatgagctatttgaatctatcgatggagagacagcatcatctccggaaagtacactgagtgggcttccagttgcagaccggcagaggagctgggaaaactttaaagctttcagctccaacgggcatcggagctttgaaccatctccccctgatataaacctaatcgtctcagttgaggatactggcgtagggatccctgtagaagcgcagtcccgtatttttacgcctttcatgcaagtcggaccatccatatccaggacgcatggaggcacaggaattggacttagcataagcaaatgtctagttggactgatgaagggagaaattggattctcgagtactcccaaggttgggtccacattcacatttactgctgtattttccaatgggatgcaaccagctgaaagaaagaatgacaacaaccagcccatattctcggaattccggggcatgaaagctgtggttgtggaccataggcctgcaagggcaaaagtctcgtggtaccattttcagcgtcttggaattcgagtcgaagtagttccacgtgttgaacaggctctacattatctgaagattggtactaccactgtgaatatgatactcatagagcaagaaatatggaatagggaagcagatgatttcattaaaaagctacagaaagaccctcttttcctttctcctaagttgattttgttagcaaactcagtagaatcgtcaatatcagaggctttatgcaccggtatagatcctccaatagtgatagtgaaaccattgagggcgagtatgctagcagcaactttgcagaggggattgggtattggaatcagagaaccacctcaacacaagggacctcctgctttgattctcaggaatcttctccttggtagaaaaattttaatcgtggatgataacaacgtaaacctcagagtggcagcgggagctctgaaaaagtacggagctgatgtggtctgcgctgagagtgggataaaggcaatctcattgcttaagccacctcacgagtttgatgcttgcttcatggacattcagatgccagaaatggatgggtatgcctgattggtatactagtttttttgaaaagttcgaaatatgtaataagaaaattgaaatgtttttctgccctgtctttctgcagatttgaagctacaaggagaatacgagatatggaagaggagatgaacaagagaataaagaatggggaggctttgatagtagagaacggtaacaaaacaagctggcatcttccggtattagcaatgacggcagatgtgatccaagcaacgcatgaggaatgtctgaagtgtggaatggatgggtatgtatcaaaaccatttgaagcagagcagctgtacagggaagtttctcgctttttcaattcgccttcagatacagaatcataagaggagatggggctggaagaagaacagcgaaggaaacacaaaaactcgtgtctcctatgcatcttgaagtagtagtaagccgcctatattcctcctctctatatatttactcacctaaaaacatgtcttctcaactgacagtaacgccttatgtgaacttgtttataggaaaaacagattgacgattgcaaaaagagtgtatatagaaaggccggtgtgaccaggccaagaacttaggaccagtactttctcctgtaaattttttttctacatttttctctggtctgattgagacaacaaaacttgtggtatgtagatgagagtagcagctggaatatattcagagttgctttggacagggaagagagcatcatagtatgtgtgtaaaagtgtgtgtgcatgatttaggatatttcttcttgtattagagaacagtgctgcagtttctttgttatcatcatggtccaagatagggaagtggacattactacttatacatacactggctttgtgatataaagttgaagatagcttttactttctcttccccttctttacgtacaatgcatattggaaccaaaaccaaatgatcggaccgaatcaagaaacagaaccgaatgtcttcaaatagttgtgttttgtgtccaactaaattcacgtagaagaactatagaaacgtggaccccaaaacgtgagtgtggttgtttgacttttaaacacgtccgtgagattttcagattgacctttaggtcacatttttgtccaccacatcaacatgagagggcttttctcaagcatttcaataatcggaatccaatcactgaccgccacgtggacatcatacgtctcaataaccaatcatagaatggttgtgacgacgttcacggtgagttgcagtacccgatcccttttaaggtccgtgacagaataattttgaaaccagcaagacaaatttagtcaaaccaaaaaaaaaaaaaaaacgaaagcgcaaagactaaggagaaaagaaattcttcgcttcttctccggtgtaatcatg

SEQ ID NO: 21252 - DNA, 3000 bp, Unknown; identical to SEQ ID NO: 5326
  misc_feature (1)..( 3000): 2750-1469P.txt file - cDNA_ID_1843230; gDNA_ID_1620780; Annot_ID_50334

SEQ ID NO: 21253 - DNA, 3000 bp, Unknown; identical to SEQ ID NO: 5326
  misc_feature (1)..( 3000): 2750-1469P.txt file - cDNA_ID_1843230; gDNA_ID_1620780; Annot_ID_167902

SEQ ID NO: 21254 - DNA, 3003 bp, Unknown
  misc_feature (1)..( 3003): 2750-1469P.txt file - cDNA_ID_1843238; gDNA_ID_1621173; Annot_ID_57269
gtaacatgcgacaatgcgacatgcggatttgattttggtagttagataacaatatcactagacttatttcttatctcacttttgaggtaggaccaaagacacattaatgttgacaatctcaaacaagaaagattcaagcttaattgacatagataattaagatggctcattgagctttattgaacaagaaatgtaaaagaggaaattgtatttagattgtcaccaagaacactaaaactttagatttgatttcaaaaaaatggaaagaggagagttgcaaggttgtcttacattgatgttcttaagacaaattaatatgtatctctacttggtaaaaccctagtaacatgggttaatggacttctcatcttgggcttcatttggatccaccaattattaacaaggagaagtgttataggaacatgagaaagcaagaaggaagctaagatcatcttttcatatgcccaaaattccctagttagtcttgtttagttcatattttcttgtacctaattgctttatttcatgtaagcaatatcgcatgtacgtatacgatgtatttttatataaccctagttcttaaatatttgtaatgcttattaaaaatcacaggttttcatcttaaaacaaattggcaataagtaaaaaaatttaatgttgaatttatcaaacttccaatgtgggacaatttccctatctaataagtctttgagaatttgtgagaaacggtctaacaagaacaatccaaacttaatatattggaaataccataacaagacggatcacttatacgaaccgcagaggtgagaaacccctttatttggaaaagtgtctagtgggtcaatctggctctgataccatattagaaattataggctttcaactcaaaaccaattgacaatgagaggagaatattagtgtagaatttactacaagcattatataatattaatatatatcaaattacaactttaaaatataaagtatcatattttgttttattcctaatatgatctaatttaggaaataaaaactctaatacatgtatagtacgtacactgatatgtgccctcttgggaggaaaattgcggaaccgcatttttgcgggaaaaatattgactcacgtttttgtggaaactatacggaatcacatatttttgcgagaaaaattcattctcttatttttagctggaaattatgaaccgtattgttagcaaagaactatagaattatgttttgacgctaaaaagcgaactcgcattttttgcggaaaaatggtgagatcgtgtatttgacagaaattttgattttgagagagaatgagagatcgatgatgaaagatgtgagaaatttgtgtttgcttctgtttactaaaattggtttaaacattttattcagttatatttggtttacacatttggttattttgtcaatttggttatgggtaatccactaatctatttcaaccaattattccaacccaaatcattacactcattaatccattgattcattaattatcaaatttccaacaactcattagatccatgagttggattggtttgggttgagttgaaaaattaacttcaattcattttgacatacctataatatggtatatcatacgaaccacctaaaatatgtgatgcatgcacttattaaattgcattttacaccatgtttttgtttaagtacgtcaacattgaattagcacaatgtatacgtacaaaaaagactactttcatggtaatttaatattctaactcaacaagatatcatagaatgcaataagaagttgtcattgcaatgaggtactatcaaaattctaaaagtctcaattgtgtaattttccctaagaaatagggaaaataccatttaaatatcaaacatttacaaaatgctaaacaatgttcaaattttctttctatacttcttaagttttaaatacgaaatttctttcacagtaccaaattaaaactttgttaatatcatcggatatttctaaaaaaggaaataatttacatgatcctcaatccccgaaaaaaagtatggaagataacagttctgcatatgataaagcacctccaattttaataacgattaaaaaaaagcaaaagggtggttggtttatatttattgtcttttggatagagagtctctagtttcatgtgataaagtatcgatcgcccaaaatccattcatacgagatatgctgtgctgtgaggtgtgagcggtaaggctcgtgatgaatggcaaacgattcatgtaactattttcttttattatcttaacaaagtcgttgttactctaaatttaacacttgatcatatttctaatatgtatattctgaataatggcatggcgtcaattctaacttatgagactttaaacttataatgttcactttctcggtagcaaaaacgcttctctttgccccttaagtagaaggacaagaaatctattttttgtttcattgctcccgtttcctcacatctgcacttgctaagccaaccttggcttacttatgaccacctcgagaagaacctatttgaaaacagtctaatgccacaaaccaatcttgatgcatggacttctagttttgcgagaacgtttaatacatattatactgtatgactgttgaccaatcaattgaaaatgtgacttagtttgtgctgcaagtcgtgttccgtatgaggataacatgagataacgatagtaattaacagttcacaactgagtaaaagaatgcaacacattaaaatgatcaattgaaaagcaaagcagtccgaaaagtgtaaacaaacatttaaaaataaaaaattgttacattcaggtagagtaagcaatcccacgggattcatgtcaccttaacctcccaaaatatcatgacgctaagacaaggtaatgtatacgtcactcttctctaacaaaggctatataaaccctagattggcactaggcttccatgcaacacaaaaacatacacactactaataaaccatg

SEQ ID NO: 21255 - DNA, 3003 bp, Unknown; identical to SEQ ID NO: 21254
  misc_feature (1)..( 3003): 2750-1469P.txt file - cDNA_ID_1843238; gDNA_ID_1621173; Annot_ID_174050

SEQ ID NO: 21256 - DNA, 3003 bp, Unknown
  misc_feature (1)..( 3003): 2750-1469P.txt file - cDNA_ID_1957064; gDNA_ID_2214502; Annot_ID_133682
attaaacttgatcctaaaaaaaaatcttaattatttttcttttcatcttaaatactaattttgtaactcaatcttaaatgtgcatatgcttttatcaagtgtttttgatagctatattattttaattctatttatatgaaaaaaacatatacaggtggaagatttctttgttgaaatgcaagaaaaaataatttctatttgttgaataaatgtcttaaatggagaaagctccttggatatcattgcatatgttaaaattttctacatttcaacaaagaatatagaaaatttctatgtttttctttgttagtgtgacagaatctactaaaaaatacatatttttatgccaatggttaatatgtttaacgttttgtgttttagtgatatcatacaaaagtttctagctagctagatttttatgccaatggctctctccatttttttatgattaaattttcaaaaaactaacaagagaactttgtgtattatttcttggttttttatactccaatggtaggttctcttaaaggaggtctcttaaaaaaaaaatattcatataaattattttatttcatacaacttaatattacaaagcataaaatattaaaatacattttttggaaatattataaaatagatgtgaaataaatattataatgtttagttaaatatataattttgtcataaattatgagctaattaaaacaaaattagtaaaccaaaacatttagggggatgtattggattagggattttagaagatttttgtttttcttaaaaaccatatcaaatctagtgttattcaaaaattaaaaggtttttgttcctctactcatcaacaaattaaaattcttataatttttttttttttgtttggcttgaatctgcatgactcactcaaattagaagccaattactatcatcaaattagagatacatttaactatgaagcgaattactatcaccaaatcatgagctatatgtgttccatagttacagagtctatcaccaaaatacataacgccaacaaaacaaactcctagtcttgtacatctatgaagccaatgactcaaaacatacaacataaccatcatgaagccaattactaagaaaaagcaacaaaagaaagagatagatacagagaaaagagaaaatacttgagcaagttgggactgagtcagcttcttgtcttctcgggcttgcatgatggctttcttcaacttagtgggcacacgatcacctgattttaaaaccatataaaggtgttaacgataaccagcattacgaatcaatcaaacacatatgtagacttcctctcgctaataatgcaaactgaagaaaatattaataacccaagagaacagactagattactagaatgactgtacccaagcaaaagctggttcttatgggatccaaatcaacaacactgatccccatgcaacaaacaataaaacgaaacagatcaatcagataacttcttcgttttctaaagaaccaaatcatctacacaactaaatcaatcaaagcttagtcatcttcctatctgacaatgctctgattcgagggaacgaagcaagggtttggtgggagattggatttgggacaaacacatatagaattgggtcatcgatttggtgaaacgaactcggaatggtgagcagcgtcgagagagacgaccaatagagagagtgagaaaatttcccgacggaatgaaaaataaagacacaaggattttttgttggttaaatatatcaaccaaccactgactgccacgtaggaggctctctccagaattatttgttttgattatttttaatcaacaacttcaagagaaccctatcaaattgtgatactcatatcatgacactgacaaataaaagagaccatgaatatggttaggccatatgcgatatggcttcaaaaaccaagttgggacaatcttatgtttagtcttaagtttgagttcattttaattcattttagatactattgtttgatgtaaaattaaactttgataaataaatgtacctaaatttggattgattttttcataatcatgtttaaaatttttggtgttatgcaattctgttttgttttgtttttccataataagcatctgaacatttttacaatatttatatattttaagaaactgaagttttaagatgtattaatctacattaaccttttctattttaatgttaacaaatattatatattataagtacaatattcatcaaatactataacatatatgtgaaatgtaaatatttactactaatcaaatatcatactgcatatttgattgcaaaagagctaaaaatcattaatattgcacattaaaaatagtcaataaactaaaatcattaaatacacaaatatatcataacacagcaagtgtgtaccattattaatcaatagatttacgctatacaagttttccgaattatgtatgtgaaataaatcacaccaaaaaaatgtatttgaaatgaaaaaattccccgcctctgtaatttaagttttttagattaaaacagctaaactcttttcattaatttattagagatacaagatattgttatttgttaccaataccaatatgtaaatttttctgagtaattattataattagttgaatttggctaccatatgccaattttcaacacataaaattcttttaaacgtgaaaattccaataatctaagagccaacaaccacgaaaattaaacctcgttttagtctaaactctaaaatgagaaataattagaaaccaataaaggctcttaaagaaagactaggtcaagttcaaagcaagttttgctttgtgtggtggtcgtcgtctctttctttaaacacacttgtttttttctttttcctttgaccactccaatataaacaaccaagaaccagtgttcctcgtccattcactctctcgtaatcacacacacactcactcatacgaagccaattgttccacacaaattggaagcgacgacaatg

SEQ ID NO: 21257 - DNA, 3000 bp, Unknown; identical to SEQ ID NO: 4153
  misc_feature (1)..( 3000): 2750-1469P.txt file - cDNA_ID_1957076; gDNA_ID_1620687; Annot_ID_48475

SEQ ID NO: 21258 - DNA, 3000 bp, Unknown; identical to SEQ ID NO: 4153
  misc_feature (1)..( 3000): 2750-1469P.txt file - cDNA_ID_1957076; gDNA_ID_1620687; Annot_ID_164648

SEQ ID NO: 21259 - DNA, 3000 bp, Unknown; identical to SEQ ID NO: 4153
  misc_feature (1)..( 3000): 2750-1469P.txt file - cDNA_ID_1957076; gDNA_ID_2926209; Annot_ID_141906

SEQ ID NO: 21260 - DNA, 3000 bp, Unknown; identical to SEQ ID NO: 4153
  misc_feature (1)..( 3000): 2750-1469P.txt file - cDNA_ID_1957076; gDNA_ID_2926209; Annot_ID_202489

SEQ ID NO: 21261 - DNA, 3003 bp, Unknown
  misc_feature (1)..( 3003): 2750-1469P.txt file - cDNA_ID_1957136; gDNA_ID_2214537; Annot_ID_134417
tacgaaactaaagttgtaatttgtataaacaaatcagaacttgagagagagagaagagagaacctgtaaattcttgatcttattcagaatgaaattaaggaactatcaactatgtctatttattgatacaatttggaacacgtttttgttgattccaataatttagttatacttgtaagttgtaactaaatcatgattgacctttttctgttccctttacttttccttcaaaaagaatatgagaaggaaaacattttacaaggccaaaccaatccccataatttgtaatttaagtcatattagaagagaaatagccaaactaacccaaaatatattagagatctcaagagcatcctggctgcatgttatcattctggacgatatgtcacgagacgagaggttctaacaaataaagcaatagatgattttgataagagtccaataatactagcatattacaagttgtcagatggagacatccatgattgtaatgaacagaggaacaaaacaattttgtttcacaaagaaattttgttataatatttttcatatactgtttacatcgtcgtcccattcacgtcctccttcatcaccgcaaagtgccaacttccgctagatcctcatccattttgaatcaccaaattaatccttaaaaatgaaaaaaaaacaaactaaactatttgttagtccaagtatgaatgcatagctttataatcatttcctaagctggatatgtgattggtaataaactaatactaccatgacaacattgtaccctattcatatacatcgcaataaaataccaaaattttccactaatcgcagatagaggaatcaactaatgcatggtagggtaaatatttatagtgtgatgttgatagctctattataggtgtactatataaatcaatgacgatataagtatactgtatagtattaaacaagccccacacaacaaactgaaattgcatccacatattcatttctcacgtttatttcatctatatatcctaccctacttgctcataaactttcctctcttgtcttaaacttttaacgttacaaagtcacagccacaatattctatcctcaccgatataataatcaccgcaacagtataatcttaccttgatatctattatatggattaaaacccgatttcttactaaacatttgacactttcgcgtagaacataatctgtacatacgaatttcgaattcatatatatatatatatatatatatatatatgttggataatgattgttttctcgaatattgtgtcgatttatagtgtagtcatattttagatagctactccgttcatcaccaatagcttgtttctatggttaatttctttcacttattagatttatctcaaccaatcactcaattagtttctagagattgttgtgattgctatactacatgttaagcactttttatttttgccggatttcttggccaaaagggttggcgatagaagcaactacattaaattcatgacctaagctaaattacatgtaacgatatacaatacaagatttgtctaaactaaacattgattcaaccaaaacttatatagactatatatttaacccaaatacttatcatataaatgttttcttttttgacgtcaacacaaccgtaaacattcgaaatcttatatatttaattatttactatgcttgttatttcatttgtcgacgttgttttttttttttgcattcttcagatccactaagaaaaggcaagtccgaaagataatgggcccaattagtggctatataaaaacccgacccggaaagactaaacctgatccgcaaccgaaccgacccgacgacgctagtataccgtaaaaatttgacaatcttcgtctccggcacaacaaaattgttcttcttcggcaagattcctcgattttctccgtgttctgtaatttccgatagattttgacaactctctttgattgtttccctttagctttttatttttatctgccttttttttttttgttgttgttccggttctattcgtttccttttgttaccttgtttttggttttgatctcaaatcctgctctgctctactatcttcaattcgattcttcatccgaacgaagaagacacaaattggagcttcactggtacatattcttgacgctttatctctgatttgctatttagggcttttcaatgaatgaatttagtttttctgctatgttcattgggaagtaagttcaatcgtatgtgtgatgatttttcaggacgttgatgataaagcatgaatcacggagggaacactcaggccgtagcaccaatggaccctaattccattgaggtaattaacaatctcttgcgccttctctttcttttaagcttaaatttttccaatttgcagatttatttagtctttatatgcaagtgaaatttcgtgcattggttcaatttttgcgaattgaatttgtttattttagtttgctccagatttaacttggtagatatgaaagttatgcttgttgttagttcaccattgtaatggttagaggaattttgcatgtcagtatgtttatgcagcagaaaaaaagtgactttgattctaggctccgtatgtgaactcttggaacatttcagaaaatcagtttctgctttaagaatagacctatcatcaattctgtggagccgtatgattttcactagtaatatgttatgaatacagctcaatgatgcaaagtacaacattttctattaggtgttaggtattgttacgaaacttagctgctgatcacttacttcatggaaatttgcagttttattgtttgattcaatcagattgatttgagactgtgggaggctttagcatcctaatgtagtctttatctgagatgacatttctgtttgttgtttgtctatgtttcttttcactcttcaactttttgtttatgtctacttgttaaatgaagattctcagaccttggccagtactaatgttttttcttttatg

SEQ ID NO: 21262 - DNA, 3003 bp, Unknown
  misc_feature (1)..( 3003): 2750-1469P.txt file - cDNA_ID_1959852; gDNA_ID_1621095; Annot_ID_55655
tggttaaaaactaagaaaaaacattgaaggaaatctacactaaacacttaaattatcatgaagtagttattagtaactggaaaaacaaattgacaaaacaaataaccatatagagtacaaacaagatcaaggtaacatataaactgaattaacatggaacttgaaatgattggtcactttattcaaatcacaacgaaaagcgaaagccaataattaattaaatccagcgtagagcaattggtagtagtcttgtttatgccacgaccgggggatttaggacggcataagcaagcaactcttggtcatcgacaaacacggacatgtcttcctcaggtaagcttatccatgcttctacaccatcaccttcttttgaatcaatcaacacgacacccaccatgttgtcgtaaatggtatgtgacgcgtatcccacccagaccggactacccgatccgaagtcaacctcgtagaaaggctttctgcaccagctagacattatgtatcggtctatctccgttgactctgacacagtttccgccatcaaactcaacaaactctgaccaattgtattgccttgaagactctctttgatcatctcgttgactctctctttgttcttcctgaatgtggccacgatttcagggatctcaaactcgctctccgcgtctttcttgagagaaaatccgctttgtaggttaccaatcacgtcttttggcgcaacactagatggaatcctaagtcgaatgtccatggcctgccacatgacggcttgccttggaattaacaagttagagcgtgaggagtttctagcacatctccagataagtgacatgatagcttcaacacgtgtaggcacagggacgctttcgctagcggccttgtgtttcagctcagcaatcttagaaggttcgaagacgaatcttttgagtacgtatttacttgtgatgttagaatcggaatccgttgatgggaactgttcatacatatgagaaggaggaggaggataaatagtcgtttcagcgaactcgatagtactgtttgacttccctttggccgtggtggtagcccagtcttttacaaaggtaaccaatgaggctatatcacagattttgtgagagacagagacagaaaccgccactcctgatccagacccgaagaaagtgaccttgacactcaacaacggccaggccgctggagattctccagcagctagtgtcgggaggaatcccgacagggagtcagtgttgaggtttctaaggaaatcaggaagaaggagatcggtgcgtgcctcggtgaagacggctccttcgtcgttacagctgatggaaaggccttctattcgtccagctagtggatagaagcgtgagagagtctcggacagagagagtttcagattttccgagaaaacctccgaggactcggtgatgagatcgtagaagaagatcgtcgacacgtagattccaggacaatagagatcaaggatagagagctgaaggcgatcacgaggtgatggtgaagcaggtttgatcacttctttcccggtcacctctagcttcgcttccatcgtcttcctttaaaagtcaacgggttacaagattgaagtattgaggaaactttgacaagaggagaagatggaagagacaaatggatcagagatgtgtccttttaaactggtagttgaatcgttgatacaagtttcaactcctatccatgtgtccacactaggaacaaaatttaatttaagaaaaaataaagtctgctaacaatgtttatttaattcattcatattagtaaattaaataaaacttcaaatgcttaaaatagacgactatgtaatatttaattggtgatagtaatataattcgacttctaaacaaacaaaaaaaaacatatattgaagattgatttaattgtatttaaaattttagagagcgtttatgaattataaaaggggaaataattttgaaatatatagttatatatatagaaataaaataaaaaatcagaaagaaaatataaacgttatgagaaagaaaaaagagcaaatgatagtggcatataccaactggtaaaacttctaagaggattgtttgttaaaagtctcacatcgaatatgagactgagccctagtccaaaaattactaaaatggtcaaaatgatttgttcaaaaagggggtatggaacctcactaaaataatagtggttgcattttagtaagtgaggttagactaatggttgaattttagtaagccaaaaactttccatcagtaattgctaattggatcaactaaatgccatcacacaaagaaactattgctgaaattgaatattgatattatcaaattttggtatatctccaacaaccatagtcctcaacaaacatagagtaagtctagttcctaaattttcaatatctagctgtttttttcttttcaatatccaacttagtaaacacattgttcagaaacacgccaaaaaaaaaaatcaacacatctcaaaccatcattatccagaagggtacagtaaatccagttcctagttttcgatttctaacttcaaaaatgctctctttctacatacacttttttacaagtctctatcacagaatcggaacatgtggatagagcaatggttagtagactcttttccccgaccactctttgacgttcctcgataaatccgaacctaatgatcaatgaacacgacgagtcatttatacaaaggcaacaacaaaatgtggtttcttctcagtttgcttccttgaaaatttagctgttatatactaaaaggccttttgtaaggctaaaaggccaagcctttgggcccattaacatcaccgtttattcgaaacgtatgttgttaagacttgagagaagtttgacggtgaaaaaaggaaaatatttacatatatatagtaaaattaaaatagtagaaagaaaaaaatcagaaagctacgaaagaaaaaaaaaacaatctagcaacagaagaagcttcgagaagacgatg

SEQ ID NO: 21263 - DNA, 3003 bp, Unknown; identical to SEQ ID NO: 21262
  misc_feature (1)..( 3003): 2750-1469P.txt file - cDNA_ID_1959852; gDNA_ID_2926163; Annot_ID_139799

SEQ ID NO: 21264 - DNA, 3000 bp, Unknown
  misc_feature (1)..( 3000): 2750-1469P.txt file - cDNA_ID_1960072; gDNA_ID_2213644; Annot_ID_132354
ttcgtagtttcttggaagtgtatgtattttatatttgattcagacagcctgtcgacaaatatcgacagctacttatgttgactttaaatatctccaagcttcagaaataagttcaaacaataatgtaaaataacccacataagcttagacttggaaattggactatatattcgtaaccgcaaagtaaaaatgatggaaatttcaaatgaataaatctatgaggttgttctgaagaaagcaaactaataaattgctaatttggaagcagattaataatgggcaaacgattttatatgatcagaaaaaaaaatctaagcagagagtgaaaacagaaaaacggagaaaaagagagcaaactcgaaaaaagagattgaaaccagtcgttgtgcatcattcacatgtaaagaccttcaggaactccttctttcttcttgaacataaccttctccttcgccttcttgaagtccacatgcgtcacctaaaccaatagaagaccaaacaaaggttaaagtaaaattattcaaagattgcgttcgatgaatcaagtggtgagaagccagagaatccttactttcatccgacgctctctaagagcaagcagaccagcttctgtgcatattgcctttatatcagctcctgagaactcgtcttttgtcattacaaactcttctaagttcacatcttcagccaaagtcatctttgatgtgtgtatctaataatggcatgcaattaaaaaccgatcagatctttctagaaaattcacaaaaaaagaaagaaaacttaaggatcaccagttgtggaacctggaagatacgtcttcttgttttgatatctggaagagggaattcgattttcctgtcgatccggcctggtctaagaagtgccgggtcaagactctcgatcctgtttgtcgcgagaataaccttaacatctcctcttgaatcaaacccatcaagctggttcagtagttccaacatggttctttggatttcacgttccccacctgagtttgcgtcatacctgtttcaaccaccattttatatcacatattagataccatctcttgagcaaaatcaagaacattgtttatcaatggatcatgtttatgttgtatttaggcataccgcttggtgccaacagcatcaatctcgtctatgaaaacaatagaaggagaaaggtcatcagcaaccctgaaaagttccctcacaagcttgggaccatctcctaaatacttctgaatcagttcactaccgacaacacgcaagaaagtagctgaagtagaatttgccactgcctgaaagaataacaagaaataacacttgctcatctccaacagttccgaatttaacaagcataagagacacattaaaaagaggcacactgcaacaatccatgcttgcgacatagacaaaaagaaaacgaagacattaaatcaatccacgtgactctgaaaatcttcctctatctacacaagtactatgatctaatatctcaattctaggtgatcaaaccaaagaagccactgtcctgactaattcatctttctagtgaagattgataaaagacagaaaattttgcatgcatgacttgacataaaaccaatcatacttgggaagtaccattatgtgctgtattaagcaattaacaactagaaagcttattatataatggatacactataggctaaaagacgaaccttagcaagcaatgtcttcccagtgcctggctcaccatacaagatcacaccttttggtggcttaattccaatatcttcatacagctcgggatgtgttaaaggtaactcaacagcttccttaatctcctgaatctgagcttctaaacctccaatgtcagcatatgactccaaaggagccttctccactttcatcacagacaccattggatccacttcatcttgaagaatcccaacaacagagagtacctatcacaaaaataataaaaaatatcacatagaagaattggttcaacgtttccatggaagagcattgtaaaactcaataccttgttatgcatcaaaatagagcagccaggttcaagctgatccttatcaacgaaagacaaaatgccaacgtagtactcaggaccaaccgaagaagaaacaatggcgtgattctcatcaataagctcttcaagattgccaacactcataggtgtaccacgaagatcatcaactttagatctatcttcctcagctttctcttcctgaggtttcaatctctcctgattcgctacgaactcttcctccataagcaaatagtccttgattcgctccaatttcagcaatcgaagcttacatttagtagaaggagtcaccgtcggcaatctcgccgccgcttcaggtcctttctgcttccgttgcttcctccctacacgagcaggtggtgcggctggttcgaacttcttctccttcttctctccaccatctggtttccgatctccttgccgattcaatccgccggaaggtccttgacccattgtgcttcgtctctctgaggtttcttgctctcggagaaacaaatcttttaatctgataacgggaggagatgattaaagtgggcttattattttaggcctttttacgatgtgaaaaacttagtgggccttaggtatcgcaaatttttttaaaactgattcaacctaagctattatctggtttagttcaataactcggtttaattatctttaatttcggtttaagttttgtaaaagtcaattcgttggtttggtagttggtacggtcaatcggtacaggtaaggaacttttcttttgccatttggggaaatcgaatcaaaaatcaatttcatcgtcttctctatctgtcattcatcatcatcacaatcatcatcatcaaatctcaggatcttcgaggtggttcttctgtttcgcaactagcttctagattgtgatttacaatcttcgaactctcggtgagtttctaggtttagggttttatctctctttacacgacaattgttatg

SEQ ID NO: 21265 - DNA, 3003 bp, Unknown
  misc_feature (1)..( 3003): 2750-1469P.txt file - cDNA_ID_1974108; gDNA_ID_1621090; Annot_ID_55491
acagcgtgagatacctcaatgaagactctcttcatcggcttctatctaactgccctgttcttgaagatctattggtggatttacttttgtcagacagcatggaaaagctaactgttgttgtcccatctttgcagattttatcactctttatacctcattcttatgagatcgatgggattgtgatagaaactccttctttaaagtattttaaacttatagaccataacagtaagagtcactactgtttggttaagaatatgcctaacctgatagaggcagatatagatgttgaattacatagcatcaagagtcttattggatcaatcacatctgtcaagcgtctttcaatatgttcacaggtatcattttctcaactcattgtttagatatgcatttgctgataatttttaatattgcgcaggctatgtatgatggaggttttgtcttcaaccagcttaaacatctgaagctatgtagatgcaaagggcattcgtcggatttacttgtccgactgctcaaagattcttctaacttacaagcactagacctttccgaaatggatgtaagtttgttcgtcaaactcttttttcttgtctgatgcacattatggttttagtgtaattcttcttctgtttgatctgtaattcttcttctgtttgatctgtaattcttcttctgtttgatctcagtatcatgagaatcatgatatcctttactggcatcaaccaagtactgtccctgaatgtatgttgttgagtctccaaactctcaacttgtcggcatatagaggaacaccagaagagagagatcttgcagtgtatttcttgaagaacgctgttcacttgaagaccacaacaatcaagtcatgtgtttttgatgatgaaagatttgacatgttaaaggagttggcactttcttctagagcttcaacaacatgccaactcgtgtttgattgagagtatttgatcaccaaaacaaagcttgttcttcagttcttccatgtccccgggctcgtatggtttgtcttcaacctgaaaatttgttttcgtcaaccatctttttctatgttttccgttttttttgtatgtgataaaaactttattctatatgttgtccaccaaaaaacaaattatgttgattggagaagttatatgataagttttaatcgtttatggggttttataggtgtgtagagatatatacataccttgtgaatgaagaaaagagaactagctctgtgttgaaaaactgaaaagcatttgatgccctgataatttctctaaaattattaaaccgaaatactaatacgatccaagtggaaccaaccaatttcttaatatctaaaataccggaatctaaagagtcgaaccaaaccgaaccggaatgtcctctaatttttatttttaaacccatgattatgacatgcactaccggcttagtggtgatgtttggcaacatggtttattcaattctcactcgcactgagtgtctgtggctcataaatcatttaccttttcaatttctcaattccaaatctaaaagtcgtcaaaaatggctctccgatctgtcaaaacgccgaccttgataacttcggtcgccgtcgtctcctcctccgttaccaacaagcctcactctatcagattctctcttaaaccaacgtcggcactcgtcgtccataaccatcagctatcgttctacggttcgaatctcaagctgaaaccaactaaattccgatgctcagcgtcggctcttacgccgcaacttaaagacacgctggagaaactggtgaattcggagaaagtggttctgtttatgaaaggaacgagagacttcccgatgtgtggattctccaacactgtggttcagattttgaagaatctgaatgttcctttcgaagatgtgaatattctggagaatgagatgttgaggcaaggacttaaagagtattcgaattggccgacgtttcctcagctttatatcggcggtgagtttttcggtggttgtgatattactcttgaggcgtttaagactggagaattgcaggaagaggtggagaaagctatgtgctcttgatcctgatttcaatacttggtttttgtgatgatggaatttgatcttatctatctatctatcacctgggaaaaaaaatgtgattttgatgtttcagagtttgtggttgtaacattaagagacatatattgtatgatggatttaggtatacaacagttggagttgcttggaatttgagtttcctttgtcatatgtgttggcctgcaaatttgtgttgtttgttgaaaggtttatgtgtgaagtagtgctagtagaatctaagtttgtttctgactaagagacatgaagtcatgggttgttatgctcattcatatcctgattgagatacaatttaaagaaacttagttccaaagattctgaacattcaccggtacagtgtgtctgcaaatggtattctgtctcacttcaatgtctaaacacgttgtctcaaaatgtatcgtttgttagatactcctttcaagacatatgatttagcctcgcatgtgttcgttgatccaagttttaccggtttgataagtctccagtcttagcaataaatccagaccggattcatgaccaatcgcagatttaccggtccgggtcaagttttaaaacattagtagaaatgtgtttcaccgaacaggaagacttatctgatagcatctcgttgcagtggataaatggcaaaatagtaatatacgtagattctgcttttatctgaaccacatagtgcagatggatatcgaacagaagaacatgatatcgagaagacacgtggcccaatgaaaaagccacgcaggctctgtatagccaattgcaatctggttttagattctcatctcacaaatcttacttatacgatcagtctcccacattcacacttccaccaaacacctctcgtccacatctttctcctttggtggcaaacacaacgacagatagagagaaacgatg

SEQ ID NO: 21266 - DNA, 3003 bp, Unknown; identical to SEQ ID NO: 21265
  misc_feature (1)..( 3003): 2750-1469P.txt file - cDNA_ID_1974108; gDNA_ID_1621090; Annot_ID_170674

SEQ ID NO: 21267 - DNA, 3000 bp, Unknown; identical to SEQ ID NO: 13945
  misc_feature (1)..( 3000): 2750-1469P.txt file - cDNA_ID_1974112; gDNA_ID_2214675; Annot_ID_136651

SEQ ID NO: 21268 - DNA, 3000 bp, Unknown; identical to SEQ ID NO: 13945
  misc_feature (1)..( 3000): 2750-1469P.txt file - cDNA_ID_1974112; gDNA_ID_2214675; Annot_ID_189190

SEQ ID NO: 21269 - DNA, 3000 bp, Unknown; identical to SEQ ID NO: 3127
  misc_feature (1)..( 3000): 2750-1469P.txt file - cDNA_ID_1974121; gDNA_ID_1620627; Annot_ID_47162

SEQ ID NO: 21270 - DNA, 3000 bp, Unknown; identical to SEQ ID NO: 3127
  misc_feature (1)..( 3000): 2750-1469P.txt file - cDNA_ID_1974121; gDNA_ID_2926186; Annot_ID_140806

SEQ ID NO: 21271 - DNA, 3003 bp, Unknown
  misc_feature (1)..( 3003): 2750-1469P.txt file - cDNA_ID_1974269; gDNA_ID_2214559; Annot_ID_134861
gttttgttttgtggttctacgaccatttttgcaaaatgtaaataattttcagttgtgtgtatattatatatctaattgcagcttcattgtaaaatgtaaataatcttcgattaattttatacttttatttttttgggacggtttttgtgaaccaaaaatattgtttaggtcttgaacactttcatagactacatataatccatcaagactggagaccggagaacgtgatgattatgtatgataggaagactgtaaatgaaaaaatagatgacatggacattgctaagattgaacatggacattgctaagattgaacatgcaccattcttgagtcaccttgccagaggttgttatgtttcttataccttatattgatttgataaactaaatgatatgccgtaattgtcaacacgtgattgagttttcaaacaatctttaagaatgcatgtgtaaaaattgtaggtgagcggagtctgggtctccaaccactagagcaatttgacggcaaaaaggaaaccactgcacctgattctcggtaatataatctccaatctcttttcaatttttattccgctgattattcgctaaaatgtatatactccttatttgttgtctgatcgttaatgaagtgcttcttcaccccttttttgaccttacaacagttattggagatgcaaagtagaatgtaaagctagatcgtaatttcttagaacatagcgacaaaaaacagtgtaaagaacttgaacgctccaaataatagctacatatatttgataaaagattacaagtatgacaatgtgattgatttgttaagaattattcccaacattgtgcatcactttggttgactcccgaaaaacataaaagtatgttatttcaactctaattatttgtccatatctagaactagatcggaactttctacacaaaaaaaaaagaactagacgtgaaataatgaaacaattcaatgagaccttattagtgttgtaataaaatttagtattattacttattagtgttgtaataaaattagtatgttaaaatttatattttaatatagccctatattcatttattcactatggttatttatctatattttgatatatgtgaatatttgtgggtccaatgtcctcttaaaggcatgttctttgattgctggtttgattataaaatcatttttcttgtaccatttttattttgttttgtgatttttcttccacttttgcaaaatgtaaataatcttcagctatgtatatattattagctaatttggtcatataaacgtagcttagtctatagtaaattaatcatctacatatgacttatacatgcataaagtgagtataaatgtatgtttacatgcgtaaatcagaagaacctaaacatatttcatttagtactacatgttattgatttttctacctagacatggacgttgaaccccatcaacatattaaattcattgtctgatattttctcagaacatatatacttttattgtttttctgccgatgtggacaacaaaagcatggaatacgttcgaccaataaatcttcgtctcttatttgattaatgtgagtgtatcaccaaaacttgaattatttgccatttatttttatatccgaccgtggactataatttctttttattatttggttatatattgtctccgtttttggtttaaacgtcgattcaattttgattgacatttgaatcgaagccaaatcacgaaaacacacattcgagaaagcttagaactgaaatgaaagagtgcaaaaaagttacaccaatataaagttgttgaaatttcggaatcttgtaagattaaaagattgttagtagaaaaaactcaacctcccaatcaaaaattacaaaaatagtaaaatattcatccacaaatttcatttttttaaaaagagaacattcacacacacttctagattgatcaaagataaaacacttatataagttcgactaaacctaaagatattatcctcattaattagtcacaacttccccaaccaatttcttaagtcaagtaattcctttgctccggtggaggcattctcaatgtttaaggaattagtggcgggaccaagaaaaatcttatcaaagtcaaacaataaaatggagacaaaattaagtgcaaaccttaaacttgaacgggtcatacacaaccaaatctgccaaaaaaaaaagtattttattcaatgaaaaaaacatatattctataaaatttgaaggcatcattttcagttttttcaccctcttctcataacgtaggtcccgaccatatttgagattttatccatcataatgaaaaatgaactaaacggctccctttcaacaccacattaccgacacccaatcagctttaaaactcaattctatggttcatttattttgaatctaaccatattattaagatgtggttggcttacacaatcaatagttatgtactataccaaataacttattgaccaatcctataaagaatcgtttcaaaacacttttagaaagatgctttactttctaaaacgatcgttttcagtcaggttttctatcggttcacctattttctcttttgtagaaaggcgatcgtgattgttaccggcctcactaaattatggtttatatattataattatctatggattgattatgatttcctaggcatgtacgtacgtaatattttttttgtgcgacgtttcagtgaaagtgtagttgatagtgaatgtttcgagttcaagttataaatcatatcaatagtaatccaaatctttttttttgtgatacgaacttggtaaacgtgaatcacattttgtaataatgcaagatgacagaatcgtggtaagaaaaagtaactaatgtaacttatttttacgttttaaccgttatattctctatataaacgaaggagaaatgaaagtattcatcaagtaaagaaacaaacaaacaaacaaaaaacacacttcactcgctacacaaggaagagagatg

SEQ ID NO: 21272 - DNA, 3003 bp, Unknown; identical to SEQ ID NO: 21271
  misc_feature (1)..( 3003): 2750-1469P.txt file - cDNA_ID_1974269; gDNA_ID_2214559; Annot_ID_185846

SEQ ID NO: 21273 - DNA, 3003 bp, Unknown
  misc_feature (1)..( 3003): 2750-1469P.txt file - cDNA_ID_1974419; gDNA_ID_2214620; Annot_ID_135866
tttataaaaataaaacttgcaagttttaatatattacctttaaaaaataaatcgttctgcggtataccgcgggttaaaatctagttaacatataacggagaaaatcactcatatgataagtgataacagttgattgaagaataaaatcattgaaagaatcgttattaatatacactcttccgtttgatttgttgaatcaaatgtgttaaacatccgttcaaaggacaaggccataagcgcctgttcaagtcgaggatcgcaaggtaagtttcctataccgctacatgtgtacgtgaaataacatacttaaagtatgaggttatatggtctgcgaatgcatgaaccaaaaccaatgaatgatggtcattatcgacgacaatgattttgaatcataagcgagcaagacatgacctcagaggtggcaaggagatctgagtatccgaacattgcgagtcttaatgacaatgtgagatttcacatggacacggtttctcaaaataattagtatttgttttcgtgtttttttgtcgttatatgttttcaatcgattatgtgtcaaactcatacagaaatatgatattacaatgcttagaacatggttataagtgataattataaaatatcattaaaaataatttaatattatttataatatttgtttaatagattttttttttttcctttttggtaaatgcgaccaatcagaggatatcacgtcacatgatactggtatcaaaaacatcattgagctgatcaagttcattttaattattttattaatataaaaataatttttggacttgtgatactatagaaatatcactcatgtacatggtcttagtttccccaaatgtacacttgtattattgaaactagaaaagaacccgtgatactagtaaatcttttatttattatgttgtaatttaaataaatatatatttagatattcaattcaacaattaatatctcttgcatttttatttatcaaaaaaaaaagagtacaaagcaaaatattcagagaaaaatagagtccataactccatatatgtttgttttcttaatgtcatttactcaattatttttcatatataagtaataaccaacatatagctgtcaaaaaaaaaaaacaacatggttggaaaatggtcacaaataaaacactgctaagtttgccaaaaaaaaaaaaaaaaaaactgctacatgcaagtggagctaccacgcaaagttagaggcttaaacacatttactaaaaagtaaaactttaggtacgaaagttccataacttctcaccttctctgtagtcgaagaatctgaggattgataaatgttttaaacaaagaagcacaacaagcgtaagaaaggcgcagaagatctctcgaagataagatcccaagatttggagaactagtccgattctctaaccatgttcaaaggtgaaaattaaaaagaagacaagaacacctgaatattctttgataaatgtacttcttttcacatctctaggccagccagtaacttcgattcaagaactcaatcatcccaagagatcaaagagatttacacaagatgaactagtttacaagaggctgcacaaaagaaaagaaaaaaatggtttggttagtgaggaatcatcttgattaatttttcattttaataaatgaacatatcattgtcaaagaatgttattccgtggcacccacgaatgaacatgttttagagggctaaaatctctgattatgccaaagtacatcttttttagtactgtgtgtcgtctgagatttgtcttattgtctaataattggaatcatgttctgacgtacacctactagctaaaggcaccagacataaatagtgtttaatattcagcaaaatcatcgtccttttctatagatgctcaatataaaccagtaaatgtatagattacccaagttgctcaacgatcttgaagccaataatggcatgattcgctttttgtcacactccggtgattaaagacttcaacagagctaatcagatcgaaaagacatctatcactgcaaagaagtacttaactatatacttttctcgatcacacaagatggaaaaattgcaagaaatattacacacaagcttaacaattcacctacaactacaacactacaacagatactcaataaatttcagtaaatataagattacctgaagttgctctttttttatttattgaataccatgaggttttaagccgaaacccgtaattctccaaagcccgaaatcacatcatgtaatattagtttcatctcaaacgtcactcgaaccggcgacctctaagcatgtaaattgcttaacgatctttggagccaagaatggcaaaatcacaatcccacaatggaaacaatataaaagttaactaagctaatccaacaatgcaaagaggaactctatagagattatattattttcaatcatacaagaaaaaaaaattgcaaaaaatattaaacacaagcttaacaatcacatgctttatgaatagtatcggatacgatagggggttaattcgacactaatgatgatgataagatccaaaatgctgaaagaggtaagggagggtccaatagttattggtaaactttacggacactagcaagaaaaaggaagcctcctaatttccttatagcaatggtcaagagaatctcattccactaaaactattaaacctttattatgtcctttaagggactagactctaatgatcattatcatatcaaagcttctatcaaaacttttgtcccttcactaaaattttatgtggtagctaaaagaatggtcattctaaaaatctctcatttcaaagtatatattcttccaactggcttataaccccacacattgcttttctcctcctacatataaggagctccacactccctcaaactaaaccaattcaagtcatctctatccgtcaacaatacaaaccaaccttctcaattcctctcttttcatccacattttcactagctaatg

SEQ ID NO: 21274 - DNA, 3003 bp, Unknown
  misc_feature (1)..( 3003): 2750-1469P.txt file - cDNA_ID_1974423; gDNA_ID_1620620; Annot_ID_46992
ttcacaattttgtgtctatattttagggtaataaaatgggtcgaactaagaaaaaaatattagtacaaatctacaatgctgggattatttggtatgacatcattaagacaacagaaaaagagaaaaatcttttggttgtcggctcggcgcagcgccaaattaaacagcaacaaagtggtgaatgaataataaacagctacagagggacccacaacatggccgtcatgacttatctgtaataatacacgtggcgaatatctatttgtggtcagtcatgacatcagttcaaacgcgcaaaccagtcacgtttatacgtgggaccgttgtttgctgtaaacacccaaacataaaccctaaacactttcgacaatttatctttcttttttgcaaataaaaacatttcagaaggaacgtttctcactggatgctgatgttgatgttggaatatatgttttatttgacttttaatatacttatttttacttggtcaacttccaatacctgtcccttatttaattaggctctctaatcatatcattgacctctatcttgtaaattatacgtttagggtggttcatttttgtattgcatttattttctcagttatatttatcaaatcttctatatatgatggttcagtcgattcgagattcgacgaccaacatacctggctgtccattaggattattaaaattcaattcttgccaccctaaattattggaaccttacaaaacatatactagtatataactatatattgtcacgatacacatgatcgcgcggtttaaacaagatttaactttaaaactaaacgatattttttggtattttgtgggaaaaaataaaacaagatttggagacaagattttgtcctaacgataacgatgaaaaaatgaaatcaagtaaactggaacacatacatttttccaactacgtactaaaaataatgagcattttaatactatatagttgccttttaacactaattaatttatttccgatttatgtatatctggtgattcttgtcaaatgtaaaagaacgtagatatctatttctttcattataaaggctcgactctcctatatacatatagactcatgactattgtctgttagctagatgtacattatataatatacacatgaataaacatagatgtagtttacaaccaagcaaacgagactaatttcatattttatactaccttttttataacattagcgacaaacattcagttaagaatttatataattttgaaataattgcttccaaacaaacacaagttgggaaataaccactaataaaaagttaaagaaacatcatacacaaaacttgaagttgggcatgtgcatgtgaaggaaattttttatactttatagacccttttttgtcatcatttacacttatagatattatagagtgagtgtttgctcaaaagaaaaagttattaaagagtatgatcatttgcaacatgttactgacatttccttcttccatattttgtatagtttttttatttattttctcgatcgacaatgggccgaaagttaccacagatatgagagcttgagaacagaataagatcttcaatatttaaactaagaaaatgtgaacaagggctccacacttatgttctttgttctaaaacacgtaggcaaaaggttccctctaactctctaagcattttagatcaaattgtcatctatgaaaaacaaagctcaaaagacgctttatttggcttgaatcaacaacatatttaggtacttcttgtcacaagttttttagaatcacatgtgctaactacatacaaggacacaattacactatactaatactacaactgtttgttctttgggttagaagcaacttagtacgttgaccctcaaaagactcgtttcacgaaacacgagttacattaatatttttctaatcgaaggaaaaggaacgaaacgtaataatgccgcttaacccacaaactcagtcttttgcttaggtagacccaaatgcatccttttagttctaaggttccgcaaatcttgtcacaatctggttcaccgttcacgcatacggaaactcatacggctaaaaaaatgtttgcatagatgaattgaacatgatccaatataatgttattaaacgcatacggctaaaattttgacatgtcaagggaagtgacacgtagacaagtcgttacgccatgaggtcagcgtccttcgtctacgtggacacactgcacatccacgtgtatccatcaaaaagcgagtttcgtaaacctatgcttacactcgcgcgcgtgatattgagatgttgatccctctcaattaagcattcaatgccactgagcctaatttccccgcacgaaacatttactctgtttttttgtttccctccttctacgtttctctgtacacggctttcttaaattgctcacacgaagcagataattcgtctctctatctctctctccttgcatcattttcttcgtctcattggtattgattgattcacgtgactttgtacattgcggttaagttcttccgtcttggtcattccacatgttgtgtagtgttcaacgccgaattttccttcacccgaggttagaggcttgcggatttttctgtacattggaattagcttcgatgtttcgagattagtgttagaaataatagtttgcgtgttaaagttcttatctttcctgatttggtcggttacctcagttttgtcttgttgtgagatgaatccatctcttgctatattaaggacaaatcttcaaatcggtgatattttgcttcttttttttctcggccacagattaaaatcgtcaaattatctgatttttgatgccctgaagctttagcttgcatctgtagtcatttgtcaaagataattgaacagaggctttctatattcgtcgtcaagggtttaggagattctgggttttggcgtgattttgaggggaaagattgaaactttccccgtgaatggtaagacagtgagagatg

SEQ ID NO: 21275 - DNA, 3003 bp, Unknown; identical to SEQ ID NO: 21274
  misc_feature (1)..( 3003): 2750-1469P.txt file - cDNA_ID_1974423; gDNA_ID_1620620; Annot_ID_162239

SEQ ID NO: 21276 - DNA, 3003 bp, Unknown; identical to SEQ ID NO: 21274
  misc_feature (1)..( 3003): 2750-1469P.txt file - cDNA_ID_1974423; gDNA_ID_2926189; Annot_ID_140955

SEQ ID NO: 21277 - DNA, 3003 bp, Unknown; identical to SEQ ID NO: 21274
  misc_feature (1)..( 3003): 2750-1469P.txt file - cDNA_ID_1974423; gDNA_ID_2926189; Annot_ID_200901

SEQ ID NO: 21278 - DNA, 3003 bp, Unknown
  misc_feature (1)..( 3003): 2750-1469P.txt file - cDNA_ID_1974557; gDNA_ID_1621119; Annot_ID_56252
actatcattgtaagtaaatgtttaacaaaatttcttgaagttgcatcatttctattgtgccctatttgtttacatgctgtatcacattttcattgcagttgtaagacttatgggtcgtgctgcttcccacattacgcttgagtgtgctttacaaactcacccaaacataaccattattggagaagaggtaacgtttttggttgacttcaattcaaattaccgtaaagatatctgaatcttaatcgtgtagatgatagaattagactgcaaatcagattcatatttgtgacacttttccattgaagcaaattattcatttcaatatggggttattggttcagagagacctcacacatgcctcattagatcagtttatatttactcaactttgatctggaaatacttttttgcaggtttctgcccagaagcagactttgaagaatgtcacagactacatggtggatgttatctgcaaacgtgctgaacttggttacaactacggtgtcatactgattccagaaggtctgatcgactttattcctgaggtgtgttgtcattgtaaaaaaatagaatctactacttttaaaccgattaatataattgttcttcttaactgatgattaattttatttcatgacttctcaggtccaagagctcattgctgaactgaatgaaattctggcaaatgaggttgtcgatgaaaatggtttgtggaagaagaagctcaccgagcaatccctgaagctgtttgatcttctgcctgaagcaattcaggaacagctgatgcttgagagagacccacacggaaatgtccaggtaattgatcatggtcctgtctcctcgtactaaatttccaccacaatgcagttagcttcatctctcacaaatcattattaataataccatgtcctcatctcaataggttgctaagattgagactgagaagatgcttattcaaatggttgaaactgaattggagaaaagaaagcaagctggtgcatacaagggacaattcatgggacagtcacatttcttcgggtaagttacgcaatttgttctttcagttaaccaaatcgttatataatacattgcttatttattgatgtgaataatacaagcttgatttatggtttgtaatcaacttgaatacaggtatgaaggaagatgcggcttgcccacaaattttgatgccacatactgttatgcacttggttatggcgctggagtactcctcaacagtgggaagaccggactaatttcttcggtttgtactccaccatttccactaaaatctgttttccatctgtgatcataatagcctttggtaaactagtatgtgcttagaatgagatgagttaacttattggcgcaggttgggaacttggctgctcctgtggaagaatggactgtaggtgggactgctctcacagccttgatggatgtcgagaggagacacggtacagaaatataaatcaataaagcttactaagacacattttgaaatctagatattaaaaaatcagagttgatttcaacttgcaggtaagttcaagcctgtgatcaagaaagcaatggtggaacttgaaggtgaccctttgattcccttcccttttcatagttttcgattggcggttagattgtcttgctgactgtctttttgagctctgcaggtgcaccatttaagaaattcgcatcactgcgtgaagaatgggcattgaagaaccgatacatcagcccaggtttgttgcatgtttcttgtctttttttgacaaaccatctgttgtgtttcagattctaatccctttgcgggaatgttatcgacttgcaggtccgatccaattcactggacctggttcagactctctcagccacactctacttcttgaactcggggctcaatagtctctcgactaaccaccattcctttgcttttctgccttccttggaatttcgcatcagtcttgttttatcttgaatattacgtgtccgtaacatttcgattaagttgattcctctcgtgtttcttcaacatataagataattataatattatttctctcgtgtttcttcaacatataagataattatactacatggtctaaatttactacaaagatctaaagtcggagtctgtctagaaaaaagtcctttgcgggtctattaggaaaatcgtaagctactttttgtcaacatatgcgttacttgaatttttatgatgtttttaaagtacaaatttagtttaaggctaattattgtttcaacacactaaaagtcctggtaggctctatatacacatcaaggtcagattctaattttaatacaaagttctaaagtcagaattcaaatttaatacaaagttcttttggtttctattaggaaaatcttaagctactaaaatcaacatatcgttacttgtgaggttaactgttaaaccaccttttgcttaccagtaaaccctattaaaagaaaatagtaaaacctaatgctggtaggttctagagatacatcaaggtcattttcatatcaaattataccggtaggttgctttgttaacgggtctattatttgcttcttgaaagcaaaacaacacataacttttacatgtatgttaactgtttatagatcctaacttagcaagtgaaatgatatttcaagtggtgccttggtggaatgttaaattgtgataaattaaagatatttataagaagaaataaaaaacactaaggttgtttctgttaatagctaaactataggactaacattaaacgttaatgatgttcgaagttttctaacgaagagaataacagacacactgaaattcaaataatctctctctctctctctctctctcactatcttcgttaaattcggcaaagctttcgctttcttatttatggaaatttctttcatcctttagtttagtctctctctctctcccttttttgtcaattcagagacagagaggagagagagaccaagaaaaggagacttttgttgatcatg

SEQ ID NO: 21279 - DNA, 3003 bp, Unknown; identical to SEQ ID NO: 21278
  misc_feature (1)..( 3003): 2750-1469P.txt file - cDNA_ID_1974557; gDNA_ID_1621119; Annot_ID_171993

SEQ ID NO: 21280 - DNA, 3000 bp, Unknown
  misc_feature (1)..( 3000): 2750-1469P.txt file - cDNA_ID_1974569; gDNA_ID_1621138; Annot_ID_56586
tcgggacgaggattattttgccacagctggtgtgtcgaaaaaaattaagatatatgagttcaattcccttttcaacgaatctgttgacattcattatccagccatagaaatgccaaatagatcaaagcttagcggcgtttgctggaacaactacattaggaactacctagcttcctctgattatgatggtattgtcaaggtatttgaacctttgaagttttacgtagattgtttatcacttgattacccctttatttccttcggtctaatgaatacaaacgtatttatgatgaatccagttatgggatgtgacaacaggacaggccatttcacatttcatagagcatgagaagagggcttggtctgttgacttctctgaagcttgtccgacaaaattagccagtggaagcgatgattgttctgtgaagctatggaacatcaatgaggcatgctcttctatactggattttgtcgttttaatagctactcctactgagatatctggcatatatacatatgaatatatcaatagcactttggattattctgtcaatgttgtcatgctcgtattttcagccttgtagctaatagacaatcttcttgtttgactgtgcagaggaactgcttaggaacaatcaggaacattgcaaacgtttgttgtgtgcaattttctccacagtcctctcacttgctagcctttggatcatcagacttcagaacctactgctatgatctaaggaatttaagaactccttggtgcatactgtcaggacacaacaaagcagttagctatgcgaagttcttggataatgaaactcttgtaacagcatcaactgataacacgttaaagctttgggatcttaagaaaaccactcacggtggcctctcaacaaatgcttgcagcttaacttttggcggccatacaaatgagaaggtagctaatgctgaaacgtaattttgagttaatctatataatgatgtttctctttttccttcgtggttgatttgtcttttcctgcctttttcagaactttgttggtttgtctacttctgatggatatatagcttgtggctctgagacaaatgaggtatgcccctacaaacctgggaactctttgatattcctataactttgtgtatggaatctccttttctataatcctttaacaagcattgccacagattgatagtttgattctcaacttaactagaagctccagagtttatttcatgtgatggaaaaaatcacagttccatgtgaattccgtctatttatacgcgatggaggaacttatccattgatactaacaattagtaaaataactggcgtagggtcaaaaaagaactaatctggtagtattgttgtttaagtgatctctctgattgagaaatatgctgtttcttgttttgttcaggtttatgcctatcaccggtctcttcccatgccaattacctcgtacaagtttggttctattgatccaatatcaggtaaggagatagaggaggacaacaacctgttcgtttcaagcgtttgctggagaaaaagatcgaatatggttgtttcagctagctcaaatgggtcaatcaaagttctacagttggtctgaaataaatacatacatacagaagaagctgaggtaattctacacctagagccctcttggtttatggtaaaacaaaaaccccatcaatccaagaatcaggcaaaacaacggagataacgaacaagctttcaacacacagatatgagatagttttatctatctgttgctaaagttttcctcaaatggggtgaaggaatgagagtgagtagaactatagttgttcaatagttgcggtttgatcagcgcggtaagggtttataccgctgatgggtatacatagtaaggtaaaagaccttctcttttgtggtgttctaaggtgtttatttttttattttttattttggctcttacaataagattcctctttgtgatatgtaaatttgctccgatagttctaaggtaaaagagcatactctgatgtatatatagttgaaatgagctttttagttctacggatgaatctcctccaccaagaaaagaaaaatcttcgtttttctttttaaaaactttaaatgcatcgttttttgttgaatgttcacaaaagtaatctttgaaatgctttatcattgtacatagcttaggactgaatcagcgtaataacgttatcaaggtttcttgctcaatcaagctgctccaacttgtttatggtcttcttcacttggtactgaaaacttttttactttctgagacaaacaacaacagaagatgaatcaaggccttgctcaatctaagatcaagctgtcttacatctatgagaaagacttaagaatcacaaagaagaattcatagtgaactagtgaagcatgccatatggaaaaacaattgttcaaaaactccaattgaggaaatgttggaaaaagaaaagaacaaaccttagatagaacacattctcagagagattgcagtagaattagacatttctcttgatcgaatttcgattccgaaacacaattgagaagattcacagcttcttgtcgtcaaattggtaggggaagctttttctccattatcataaaccctaaactaaaagtttctgcaaaaacaactattttatcgaactcttaatgggccatcaatgggcccatacttataaacttaaacccttttccaatttcagtcgtattttacaaaaaccatcaccgtcgttatcacagtaaccaaacaactttcatcgccgggtaagctccattcccaagctatttcgatctcgtttcacgtcgatctatttctagtcaagttaatctcttcttttagggtttaattagttaagacttgcgtttgattatctcaagttcagaatttgtttcttgatgatctaaaggaaggaattttatacttatcaaattgaggatttttgtttttggatgcagagaactgattaacatataagaaaatg

SEQ ID NO: 21281 - DNA, 3003 bp, Unknown
  misc_feature (1)..( 3003): 2750-1469P.txt file - cDNA_ID_1975940; gDNA_ID_2214651; Annot_ID_136421
ccaccgacaagaagacctacttcgccggatacaaagactgccacgtaaaacccggattccggatcgggtcctgatccaaattttgcgtgagtcaggtcccataccacccgaatatccggctttcgagataacttctttgatccattttttctccagaatgtcaagggtttgatttcgagccggaaggcgaagggaatggagtgacggtaacaatctagagagtgtagatagcaatttgtggagttgcatgagtagaaatgaaggtggagagagcgtcggaggaaggatcgagaccatgaaagaaagaaaacaccaacgttagtgtggtactgacaagttgtggtagcgtcgccggaggtggagatatacgatggatttgatggggatggaagagccgacggtagatcgtcgttgatggcggtggcggaaggatggaaacaggcggacaaaggggaggagccaccgcgaccaagagcagagattttcatttttaggtatagtcaattaatatgactggttgatcttatatacgcacatgcatacaaaaagacactaattatatgtaaggatatgactatttgagtatttatctatacttgagttggcttatgtgtctgaaaatgagttgtcatgttgtgaaaattcaaaagagtgggtcaatgtcgagaaattgaaagcaactttgtggataaattttatagaccgaaactgacgttcattgatattttgtgctggttttcacattatttatatgtagattatgttctagttcaattcttttgaagtcgcttgactttttgtctctttcctagtttccttaatcttttccacttatattagtttttaacgtttgtagtcacagtgaaagctaccaaaattctaaaaatggtaaagagaaatagaactgtatcttgttaaagctcggttttcatgttacttaacattacatatgttgtgtttgatagtataaaataataaatttgttatggataattagatgaaaaaattaaagagttttgcgataagtaagatatttgtttcttgttggtttaagagtcggtttgggtccatgatataacactaattaaccaatagttgtggccttgtgggaggtaaatgatccaacaaactttgctttactaactcacatcttttttcttttgaataactaagaggttttggcctaggccaatacatcctctcgggatgggactaaagcattttatagaattttctttcaaatgttattggaaccagcaacctctaggcttagctaaaatattttaccagttttgagctattgacacttgataactcacagtttttagatgtagtttctctaaatcatgcatataaaataaacatcatagagatcactagtagatgatttcatcaactagttctatattcgatacgattttacacgaaactcgtattttcgaaatgttgtacattgtatgatataaactttagaaagggaagatacaaaattaagttgctgactatatgctaaacctatagacacgtgaacaatgagatgacggcaaacatgtggatttaagtttgcttcggtttgtttcagtttgttctagtttgctacaacaaaactccaaaatattgttgatttggtggctacaaaaaaattataatataaaaatagaagatatgtgtttgattaaatatactaacatagttttgatcgtattaggtagagccatatttagataagtttgtggactgcgatgaagttatgaagccacacaatatgtatttttttttccctcatgcttgattcgttattttctctgtgatttgatatgtatgcaaatttatttattaatggttcctttttggattccagctaacaaaagaaaaggtttgaaaatgtccaactacaaatttaatatggaaacgtacaccaattcattgcgagattggtgcattactcgcttgctttttgtttcataccagacaattcaaaacatgtgattgatttctcaactttcattctctaatcatttagaggatacctaccaaaaattaatatcctccaaaattatttggccattgacattacaaataaagaaatgtctttggatgaaatatttcaaaattatttttattcattaaaacaataatgatttaaatactaagcacacatatagtgtgacaaaaatatgtgatttaaggatctcaggatacaaacatctctaaactagttttacaagcattcgaaaacacagctctaacaaaccaaatcactatgatattctcgaattacttactttctaacaagaaaagattgttggagatttttatttgcgttaaacgattaagttcttaatcgatgtaatcggtgtactagacgacttaaagaataggttagctatgatgttgagtcaatcaaccacatcccctccacaaatccaggagagttaaaatttaatcttttaccattcattttttccttctacaggttcgaaatcgaagtccggtccaatcttgaaaacatcaattatccaacatttttgtgctggaccgaagccaatggcaggccagatattataaccgaaggcctgaaagtaagttacaacgagatagtaagaagatgcttaagtaaatgggcctttgtggcccaatctataaaacctaaccctagcatcgtgtccccatataaaactcacctccatcgctttctacaagtttcttctccagatttagggtttctcagtgtttcggctcggcccagaacaagatcgcaagacttcaagatggtaaatcctttcacatctccttcattcttaatccttatacttttctattatcaattagtatgtaaatgttacggaagttcgagactttgaatcattttgatgatcttctctgcttcaaccttaatcatctacactgaattttatcttaatgttacgaaagtttaagactttgaatcatttttgatgatatcttctttgtatgaaacagccgtcgcacaagtcgttcatg

SEQ ID NO: 21282 - DNA, 3000 bp, Unknown; identical to SEQ ID NO: 11724
  misc_feature (1)..( 3000): 2750-1469P.txt file - cDNA_ID_1975979; gDNA_ID_2214512; Annot_ID_133875

SEQ ID NO: 21283 - DNA, 3000 bp, Unknown; identical to SEQ ID NO: 11708
  misc_feature (1)..( 3000): 2750-1469P.txt file - cDNA_ID_1975979; gDNA_ID_2214512; Annot_ID_184307

SEQ ID NO: 21284 - DNA, 3003 bp, Unknown
  misc_feature (1)..( 3003): 2750-1469P.txt file - cDNA_ID_1976286; gDNA_ID_2214536; Annot_ID_134381
tttcgggaaaaaaaacgttcagatattttccaaacgtgacctaaagatggtcatcaaaataaaaatcataaaaactaaagttaaaaatctttctctctctcattaatcttatttcttgatcgtcattgttgtcgtcctccactgcaaatccgttataaacgagttgacgtcatcttccggcaagaaactcaaccgtctccggcaatacattgttctacctctaaacatctccgacgaacgtttcatcggcgccggtggacattctctaactatagggattctattctccggacgagtcggtgtcttgaacccatcattctcttcctccacaacttcttcttcttcttcttcatctaatctcttccttttcagacaaatatccaacacaagtttatcgtcggaacattcttcttctctcgtctctttaacaccacctaacgttacctcttcctctttcaagctcgtctccgacatacctaaaaatctataaaaatcaagaaatggcacccaaaaaaaaaactcttgttcctagatagagagagagaagagaatgagaagaataagaagaagaaataatgattgatcgatgtagatagatccaacgtggtaaagaatattaatcaagaaaattgtcagcttttgtttttttattaaattatttttcaggtttatttatagtcggagattagagcgagtttgttgtgtattgttggatgtggtaaggagagtctaaaggcatacataacgtaaccaaaccctctgattcattgagaaggagacattattcgacataataccgttacgataaccataatatctcgtcgataaagtaatcaaaatatcgccgatgcctttctgcttctcgcaagttaagcaccaaattgacatctgcctttacgtttccaatctccatgtgcgcttttttttcttctcaggaggaaaaaaatatatttgttgccgttagactttaattacgtatctaactcatatttattaccacctaatcttattgctaataacttttgtgtatttataaggaggagacccactcttatagttttacattaatgacttctatgatcagtttagataaatatttttcctcaaccggactaaatgtattcttctatatatatataattaggataaacattttatgtaagaaatctaaatattgtttagttgaatgtaagaaagttttttggtgtaaatgttaagaaatgaatgtaagaaagttttcttccctattcatttttttgtcttaactttggtgatttcatgatatttatttcatttaagaataggaaatcgcttgtgaaattggaagcaaattaagaaaatacatgatagagcttttaaaagtgtggatgacctttcaatacatatttgcttggaggcgatggtgaaaaactgaaaatgacatcagatacacgcttgtgaaccatctttaaagtattgatggactcttcactatgaaagctctctttaaaattaattttctttgtacatgtctctaagcaatgtcaaattaattagaggtccaaattcaaaaaaatgtcgtattgaatcattccattactaaattggttcaatgtcagatttaaacagcctagggataatttagtgagatatgagattctactttcaacatatactaatcctaaatctctagcaactttttatataagctataaatatcatgaaaatgtattttaatcgtttcataatttatgcagtcacactaatggaaaaaaggccaattattattattttcttcagactataaatgaaaacataaattaaaatgcagattagtttaaaattttaataagtaagtaaaatgcttatagccttatacaaaatcatatttggaagtttctaacattgttgcaatttgttatcacaaatcacagtaatatttgtatactaattagtaattacaactatacacaaatttaaatgggtaatcatatatttgtgtccagtggattgaacaaatatgctcggcccatgcggaagtaatgccaattttgggtgagtaaagcccatgcgaaattttcacataagaaatgcatgctttttgttttcaacgacatgagttgcatgctttttatcattgcttatatagttgcaagtttgcaactccttgatattttttttatgtagacactactaccaccaaaaacttttggtctgcttattcttgtttactatgtaaaaaaaataaatgaattgtttatttactccgatttgatggagtctggtttatgaggttttatagcctttacagaaaattgatagttacaaaaatatttttcaaaaataaaagggtaaaaccgtcatttcaagttgttattgttttgggggactggatttgaaatgaaatatagaaccggaaaacaaggtgagccgaagtcgaagcctttggacccgtttttatatttactcctcccattcccttctccttcaatccttccttcctcctcctcccttcttcttcttcccctctttcattttccagccactacaaacttttctatctctactttttttcctctcgatttcaggtactttttgagaccctttgttgtgattttcgaacacacaccccaattacgtttgatttttgatcccgcatcgatttcaattcatccgtttctgagtttcttttggatctgggtgtcttgagctaatcttttcgatctgttgtttatcgattttactcatgcgtatgttcattacaccatttgttatttgtttaatcaaccaaaagactcatgtttttcaaatgtctttaatataatttttctgattgaattttataatatttacatgattctggatccagaatatccttcttcttcttccattttgtcctgtattgatttgtctttgaaaaaggattgttctttgtatctgtattggtgaaaaaggattgttatttgttgataaaaatttgatctttaaacaatgtttggttttgcataaaggtagaagaaaatg

SEQ ID NO: 21285 - DNA, 3003 bp, Unknown
  misc_feature (1)..( 3003): 2750-1469P.txt file - cDNA_ID_1976336; gDNA_ID_2926258; Annot_ID_143155
agctgatcgcagtttctctccagtccacatgctttaccatatcctaaaaactatatctatgtatggtttggtttaatggcgtagtagtttgttgcgaggaatctttcatgatgtaagaaaaacaaagctgtttggaaccttttgtcattataaataatctcttctctttctttttcgtcatgtctcgtaaactttatctgccacggatgtatgttcttaaagaaattgaagattgaaattgatcaattgccaataatgatctcttttgtctctgtatatgtattgattcaaacagaaatcatagtagaaaactgtcaagagaaattgaccttttaacataatatctaagtttgggctggataatatctaatttttgggcctggataacgttttacgcgtcagggactaagttgtacaaaatgaaactaaagggacaaaatagtaaagttgggtgccactgttccccgcgccacaaaacaaaaacagtacagtgagtcagtgaagctgacattcacacacacacactcacacaaaaaccaaaaactaattttcacgaaatccgaagcttaaaaattattcctctactgtttcaatttcatctcttcttcctcttgagttggcaatttctagggttttctcattttcctttttttccatttctggaaactggtaaaaggctttttctttgtctgtgggggagaaacaaaaatggagacagacgaagcataccaaaagaaagagcgagctgcattagtagccatcgttgtccttgcttgtcttgctttatcttctttgttcgtcgcctttagctactactgctatattcgtaacaaggtttctaagcgtcacagaattagcaagagtaagctcaacaattcacacttcatttctccttcttatctttttacctgtatttcttgttcttacgccggatgctgaaatttggttctaattaaggaataattttggaagataattgttcaattagggttcgatttatgttctgggtattgaatctgttattgttttacctgtcgatttttagggtttgattgtgaggaaaaaggcgattgtcagaaagtacaagatgttactgaaaatgggttgcaaattttcacctttaagcaattgcattcagcaactggtggatttagcaagtctaatgtggttgggaatggtgggtttggcttggtttatcgtggtgtgcttaacgatggcagaaaagttgctatcaagctcatggatcatgcaggaaagcaaggggaagaagaattcaagatggaggtttgattatttttagcttactctttgatctttattttttcaaagcttatgcacattttgctgtttgcagcgtttttgattacttgattgatcaattttttgtatctggtgccaggttgagttactgagccgtctgcgttcaccatacttgttggcacttcttggttattgctcagacaatagtcataagctgcttgtgtatgagttcatggcaaatggtggtctgcaggaacacctgtatcttcccaacagtaagtttctttttccagtagagttagaagttgctgcatgtttgaagttgtcatctgaagactccaaatttagtctatctgtctagatgctaacaatttgaacatgaatcctagatagtgtataataattacgaattggtgaatatacgtctggaattcttgttggatttgatagaaaaatctctttttcttgcatttagggtctggttctgtcccaccaagattagattgggaaactaggatgagaatagctgtggaagctgcaaaaggcttggaatatctccatgaacaagtatcacccccggtgattcatagagactttaagagcagcaatattctgctggacagaaacttcaatgccaaagtttcagattttggattggctaaagtcggatcagataaagctggtggacacgtttctacccgtgtattaggcacacaaggatatgtagctcctgagtatgtttttcactcaatcatctctttgttcttgtttccatcagttaactttgataggttggatactaataccaatattttcaatatcttatgtcaggtacgctttaactggtcacttgacaacaaagtcggatgtctatagctacggtgttgtcctgttagagttactaaccggtagagttccagtagatatgaagagagctacaggagaaggtgttcttgtctcttgggtacgcgttcctttcacaaactgctcttgtgtcatttcttcttgtctttgctctaataacttaacttttcctatctccaggctttgcctcaattggctgatagagacaaagtagtagacataatggatccaacactcgaaggacaatactctacgaaagaagttgttcaagttgcagcaatagcagcaatgtgtgttcaagcagaagctgactacagacccttaatggcagatgtggtgcagtcactggttccattagtgagaaaccgtaggtcagcttcaaagcttagtggctgctctagtagctttagcttggctcggtctcctaactctccgggtaaagcaagcataggttctcaatgaataaatcaatcagagaagacgaaatgtgaggcttttattatgtaacggtatttactaaaacagacaatgatgtaaacacttgagtgatcaaacatggagtcatagagataatcatcaaataaactttttcgaatctctatgggctactagttattgggccaatcctgacccattactatattctacagagacgagaatgatattagttcatgagaaaaaaggtcacgtgagggaacgtgggcttgatggagaaaggagggtacaatcgtcattttgagtactcgtaaaatttgcttagaaccctagaaggctaattagaactagggtttatatagtttgccgcttcatctccgtttcttctttccgattcgtgttttcccgtcggccggagatatatcgcaaccctaatccgaaatg

SEQ ID NO: 21286 - DNA, 3003 bp, Unknown; identical to SEQ ID NO: 21285
  misc_feature (1)..( 3003): 2750-1469P.txt file - cDNA_ID_1976336; gDNA_ID_2926258; Annot_ID_204622

SEQ ID NO: 21287 - DNA, 3000 bp, Unknown; identical to SEQ ID NO: 6953
  misc_feature (1)..( 3000): 2750-1469P.txt file - cDNA_ID_1976558; gDNA_ID_1621118; Annot_ID_56235

SEQ ID NO: 21288 - DNA, 3000 bp, Unknown; identical to SEQ ID NO: 6953
  misc_feature (1)..( 3000): 2750-1469P.txt file - cDNA_ID_1976558; gDNA_ID_1621118; Annot_ID_171958

SEQ ID NO: 21289 - DNA, 3003 bp, Unknown
  misc_feature (1)..( 3003): 2750-1469P.txt file - cDNA_ID_1976558; gDNA_ID_2926161; Annot_ID_139708
acatcataagcaaaacaaatccgatcaatatgtttaaattctgtaatacaagaacaatataaacaaaaacatattattcagaaagcaatgatacattatttgaatattgtgtgtaagagtgaacgacaagatcatacgtcagagataatcgactggtaacaactctgatcttttccaacttttggtcaaagtcaaaccatttggtcatttttacagtaaattattgagtaatatgtcatttactcatttcttttgaggaaaactctttttttatcagaaaacaaaaacaaattactcattttcgttttgggctcaagacaaaagtccttcttttaaaaatattagcccagttaatctatacaggcccattaaagcccatactaaaagagccgagcgttccaccgcgtgagattgacgtgcgtgtatttacgcgttaatgtttcgcgtggtatttgtttatttgaataaagattccttagctttattcttagtaggtcctcatgagtcatattcgtgaaattgaggtttttgaacgaactcggggctttgattcgaagtcgaaagttttgattttatattgtgatttctaagtcgaaggatgtgttactttggtgttttttttatttgattttttaaaaagaatatttgatagttgtaaagagtttttgtatatgtttaatttttaaatagagaaatggtcaacgtagcacaattaacttgtaatagagaattgctcaacgtagcacaattagtgtagatctttaaaattaaatcatcgagcgaattttagaattctcccaaatagttgttatctgcaaatgtcatgttatttacaattcttgatacataaaatagttagttttccatgtggtaaaaacaataaaacatacgaccaatcgaccattgacataactcttctaaatccacgatgagttatatatataaacttataatactaatcacaattattgttattgaggaatatacatcgtgagtatcatcaaatctcgtcatcgcactttgcttgaacgtgcaagaaacttggaaacgcgtttagagcaaacaccgggacaccgaagtaccgtttattgaattcctttttttgtgtgtgttgttcaatacttaaatcgactaaaaaatcattagcctaagattcacatatcagaacgtgcttgggccaaaaataaaataaagaacgtgcatggaccaaccaaccatatatatatcttcatagtattattgataatggcgggtcccattatgtttgatatattttcagttttcaccatggaagcataatctcaagaatatgcctccaataaaattcgtttgtacatgaattccttaagtatggcagaatactacgtataccccacataatagtttaatctaatttaaattagtgtaaattttccaccaatcaatttattaattacttaaaacaacaaaagtagtgaaaaacaattaaaaacacatatctccctcaaaatacccatagtaggctacaactgtagatttcttgtttcacaagacacaagaaaaaaaaacctaacttagaaatcattagaaggaagtggttcatgtccattactaccgataaagatagtatcataaacaatagctgcaatggctgcaccgataaaaggaccaacccaatagacccaatgattcgtccaaatccagctaaccacggccggaccaaatgaaaccgcggggttcatcgatgcaccgtcgaaagcaccaccaaccagaatgttagctccaacgattaacccaatcgccaaaggcgcaatgattccaatatcacctttcttgggatccacggcagtagcgtaaaccgtgtaaactaacccaaacgtcatcacaatctcgaaaacgactgcgttccagggcgtcactccatatgatagcgaaaacgcagccgtttccatcccgccagtgcttaccttgagcaacaagcaagctacgactgctccgagtaattgagcgatccaataaagaatagctctcaacaacgttatgtttccaccaataaaagccccaaatgtaaccgccgggttcacatgaccacctgaaacgttagctccaacggaaaccgcaacgaacaacgcaaacgcatgagacaaagacgcggccacaagaccggcaggtgtggctggaccatctccagttagttttccataagccattccagagccttgacccgcgaaaacgaatataaccatcgagaaaaactccgcgaaagctgctctaatcgcatcgggacgactagcttcccccggcgttccaatcgcaattctgttgataggcatcgttacaaaaaaatttgctttcttgcttcctcttcattttgtttttcatcagtaaaagtttaaatagttaaagcgttagtgccaagtgtgtgtatgagaatcgttcaagagactgagattagtgttttacggtgggccctaggttataagaaatcgaacggtgattataaattcatatttaattaataacttacttaccaattaattaaatcttaatccgtttttctcgctttctataaatactattatgggtagcaattgaagaacacgcgctttactgttttctcatcatcgtcacttttctttctccacactttccgcaagattgttctgttcttcaaacgattctaaggtacgacttttttttttgaaggttcttgatctcaacttttgttgcgtattgatgtttgatcctctggattttgtatccaacggaagatctatcgagaaatgaacaaattcgatacaaattgttagtgtttagctgaattatgtagattttgttaacttcgatcttgaagatgattgatgtttatcgtactagtagaatctgatgttaaatctttgagtgatggatcgtgttatcagcatcaatagtgaaaagattctatattgatttagacgtgaagtcatgaaaattgactaacaagattctaacgtttggttctgttttgctctgttttattagatg

SEQ ID NO: 21290 - DNA, 3003 bp, Unknown; identical to SEQ ID NO: 21289
  misc_feature (1)..( 3003): 2750-1469P.txt file - cDNA_ID_1976558; gDNA_ID_2926161; Annot_ID_198757

SEQ ID NO: 21291 - DNA, 3000 bp, Unknown; identical to SEQ ID NO: 14168
  misc_feature (1)..( 3000): 2750-1469P.txt file - cDNA_ID_1976561; gDNA_ID_2214704; Annot_ID_136931

SEQ ID NO: 21292 - DNA, 3000 bp, Unknown; identical to SEQ ID NO: 14168
  misc_feature (1)..( 3000): 2750-1469P.txt file - cDNA_ID_1976561; gDNA_ID_2214704; Annot_ID_189782

SEQ ID NO: 21293 - DNA, 3000 bp, Unknown; identical to SEQ ID NO: 7000
  misc_feature (1)..( 3000): 2750-1469P.txt file - cDNA_ID_1976580; gDNA_ID_1621121; Annot_ID_56281

SEQ ID NO: 21294 - DNA, 3000 bp, Unknown; identical to SEQ ID NO: 11179
  misc_feature (1)..( 3000): 2750-1469P.txt file - cDNA_ID_1976634; gDNA_ID_2214482; Annot_ID_133295

SEQ ID NO: 21295 - DNA, 3000 bp, Unknown; identical to SEQ ID NO: 11179
  misc_feature (1)..( 3000): 2750-1469P.txt file - cDNA_ID_1976634; gDNA_ID_2214482; Annot_ID_183399

SEQ ID NO: 21296 - DNA, 3003 bp, Unknown
  misc_feature (1)..( 3003): 2750-1469P.txt file - cDNA_ID_1976638; gDNA_ID_1620671; Annot_ID_48158
agaccagtttccctggcttttgaaaacactcttgaagcaaggaaccgattcatatgaactacaaacactctggttggtttggtcatcaatttgagaaggtccacagagatttcatcatccgttgcattgggagaaatcaccgtcctataaggtatacggatgttaatcgcttgtaatgcatcagtaagaccaggcattataccttctccaaacgcattgttctcatacacaggtacgacctctctccaaccaaacacctttatgatctcacttatggcttgcacttgtgatgagtcgtcgtaagtagagcgaaagaagtatggactacggccagagtcaaggaaagggctcgttgcagaaaatgaaataattggcacctgagatttttggcctacctcgatcacgaaagaagcttgcatcgtcgttcttggccccagaattgctttcacttccttgttctttataagatcaagagctgcggaaacaaacataagacatgtggtgttatatgagaaacttgaaaacagaagaccaaatggaaggtagtgatgactatatctttgtggagctgaaaactatcaagttctatatagtttagagccgaaataaattcattgccatgaaaatgcagtactgaaggatgcattgtccacaatataccacaattacatttaaacttatgtaaacaataccacaagaaaatatatatgaatccctttatatatatgtacgcatgccaagacgtcatttcacgtaaaaacgatattcaaccgttttaacagaaaacgtacttttgcggtttttgacaacaaaaatgtgactaatcggttttaaagggaaaacatgtgattgtgcggttgttgatgaaaaacagggattatgctttttggagagaaaacatgattctaaaatatctaatttttcatactgaattaaaaaacgaacaaccctatatttcatattctcaaatttatccttccagccaggaacatgttacacgtgtgcatatatgatgcgcataattagtgtgaataaggccacatatgatacgcatatatgatcagttgttccaaaaaacaatattagcggttgcatgaacgagaaaacagaacccacaaggacaattcacatttcttgagctatactatatatagttagtataacgtggaaacggaaaaaataatcacaaacgaaattttttgctttcatttgcgtttcacgtttacttatagaaacaatcgaatcattaaagacagaacataccagccgctgcagcgccaacaacatcgtctctagagtcggcaaagttaagaagaagcctggtccgagattctggacgagaagagtaaaagtctgagagagacatgttaatggcgagcaagctcaagttggaggcagttgtcccaacatcagtcacaaccccaacattaattacttggattgtcgtattctgtcccttccccaatttcacgccgaagataaaaacgagaaacactaagacgacgtcgttgagatgtctcttcatttttcttttgtttttggttttggttaagtaccgtggaatgtatacatcttgaaaatattttgaactcatatttataaatggataagatttaacgccaaaaggtgtttggttcgaagaagtttttgtttttagaagtaaattatacatattaacgaccctttctgctaatgacgtaatataaaagttacatttccataagaaacattcttttcttttttgtttaattgaagatataaatccttacatcatctcttgtcaaaaaccagcatacaataaagtacttatcttattaaactattaaataactaataatatggttgaaattttaacaaaataggtttttattaattaaccagtactggactaacgtacctttgcaaaattaactttttttccattttaacttgacaagggcattattggacctccctacacacgcatgcatttacatagtagacgttataactcccatgttaacatattaaactcatatcatatgttatatgtgccacaaattaaatctctgctcaagtggccgcaaatttcagtatctcatattttctgttctaacttaaaagttaacacggttacttttcattcctcggtctcaagtctttcgtgatccatccagttttgtataaaaacacaaaagtaacaaaattatagatgcagcaagtcgcgggtagtggtgaaaaataagtttcatcagtaaaactaaataaagaaagcatatatatatgccttttgtaagtgatatcatgcaaccccgtttctgattaactaatattacagaactagatgtaaaaagagaagacaaatatattttacttatctaacatacagtttttaagttttgatataagaaaaacattgtttaattaacaagacgaatgtagtagtaaaagacattgcagtaaggcgtaaccacgtagtattcattcaccatcacccgtgacccgaaacattttattttatatcgttgaaatgacttggtttgtaaggaagagagatagtcaaacaacaaaaagaaagaattagtcagatatcgtactcccggaaaagaaaataaaaaacgattccgtgattgaaacaggttgcttaagagaataatcattggcagaaatttgtttaacacgaacttttttaatcaaggccaagttgcaaaaaaaggtcaaacaaaattacacattattttgaggagaaaaggtttatatatatatattttttatttttttttgaacacggaaggtttatatatatatatatatatatgtatcaaattttcttcaaaataaactaatgctatgttttttctgtttgaaattattatttcatgaatttaggaagaagaaaatgataaaagggccatcgggcccataatcgcagaaaacggcccatataaatccaccaaacgaatcttctctcttggtataaatatgctgtcttgcgttacagagaaaccctagacgtcgaagatg

SEQ ID NO: 21297 - DNA, 3003 bp, Unknown; identical to SEQ ID NO: 21296
  misc_feature (1)..( 3003): 2750-1469P.txt file - cDNA_ID_1976638; gDNA_ID_1620671; Annot_ID_164112

SEQ ID NO: 21298 - DNA, 3000 bp, Unknown
  misc_feature (1)..( 3000): 2750-1469P.txt file - cDNA_ID_1976638; gDNA_ID_2926200; Annot_ID_141481
ccagtttccctggcttttgaaaacactcttgaagcaaggaaccgattcatatgaactacaaacactctggttggtttggtcatcaatttgagaaggtccacagagatttcatcatccgttgcattgggagaaatcaccgtcctataaggtatacggatgttaatcgcttgtaatgcatcagtaagaccaggcattataccttctccaaacgcattgttctcatacacaggtacgacctctctccaaccaaacacctttatgatctcacttatggcttgcacttgtgatgagtcgtcgtaagtagagcgaaagaagtatggactacggccagagtcaaggaaagggctcgttgcagaaaatgaaataattggcacctgagatttttggcctacctcgatcacgaaagaagcttgcatcgtcgttcttggccccagaattgctttcacttccttgttctttataagatcaagagctgcggaaacaaacataagacatgtggtgttatatgagaaacttgaaaacagaagaccaaatggaaggtagtgatgactatatctttgtggagctgaaaactatcaagttctatatagtttagagccgaaataaattcattgccatgaaaatgcagtactgaaggatgcattgtccacaatataccacaattacatttaaacttatgtaaacaataccacaagaaaatatatatgaatccctttatatatatgtacgcatgccaagacgtcatttcacgtaaaaacgatattcaaccgttttaacagaaaacgtacttttgcggtttttgacaacaaaaatgtgactaatcggttttaaagggaaaacatgtgattgtgcggttgttgatgaaaaacagggattatgctttttggagagaaaacatgattctaaaatatctaatttttcatactgaattaaaaaacgaacaaccctatatttcatattctcaaatttatccttccagccaggaacatgttacacgtgtgcatatatgatgcgcataattagtgtgaataaggccacatatgatacgcatatatgatcagttgttccaaaaaacaatattagcggttgcatgaacgagaaaacagaacccacaaggacaattcacatttcttgagctatactatatatagttagtataacgtggaaacggaaaaaataatcacaaacgaaattttttgctttcatttgcgtttcacgtttacttatagaaacaatcgaatcattaaagacagaacataccagccgctgcagcgccaacaacatcgtctctagagtcggcaaagttaagaagaagcctggtccgagattctggacgagaagagtaaaagtctgagagagacatgttaatggcgagcaagctcaagttggaggcagttgtcccaacatcagtcacaaccccaacattaattacttggattgtcgtattctgtcccttccccaatttcacgccgaagataaaaacgagaaacactaagacgacgtcgttgagatgtctcttcatttttcttttgtttttggttttggttaagtaccgtggaatgtatacatcttgaaaatattttgaactcatatttataaatggataagatttaacgccaaaaggtgtttggttcgaagaagtttttgtttttagaagtaaattatacatattaacgaccctttctgctaatgacgtaatataaaagttacatttccataagaaacattcttttcttttttgtttaattgaagatataaatccttacatcatctcttgtcaaaaaccagcatacaataaagtacttatcttattaaactattaaataactaataatatggttgaaattttaacaaaataggtttttattaattaaccagtactggactaacgtacctttgcaaaattaactttttttccattttaacttgacaagggcattattggacctccctacacacgcatgcatttacatagtagacgttataactcccatgttaacatattaaactcatatcatatgttatatgtgccacaaattaaatctctgctcaagtggccgcaaatttcagtatctcatattttctgttctaacttaaaagttaacacggttacttttcattcctcggtctcaagtctttcgtgatccatccagttttgtataaaaacacaaaagtaacaaaattatagatgcagcaagtcgcgggtagtggtgaaaaataagtttcatcagtaaaactaaataaagaaagcatatatatatgccttttgtaagtgatatcatgcaaccccgtttctgattaactaatattacagaactagatgtaaaaagagaagacaaatatattttacttatctaacatacagtttttaagttttgatataagaaaaacattgtttaattaacaagacgaatgtagtagtaaaagacattgcagtaaggcgtaaccacgtagtattcattcaccatcacccgtgacccgaaacattttattttatatcgttgaaatgacttggtttgtaaggaagagagatagtcaaacaacaaaaagaaagaattagtcagatatcgtactcccggaaaagaaaataaaaaacgattccgtgattgaaacaggttgcttaagagaataatcattggcagaaatttgtttaacacgaacttttttaatcaaggccaagttgcaaaaaaaggtcaaacaaaattacacattattttgaggagaaaaggtttatatatatatattttttatttttttttgaacacggaaggtttatatatatatatatatatatgtatcaaattttcttcaaaataaactaatgctatgttttttctgtttgaaattattatttcatgaatttaggaagaagaaaatgataaaagggccatcgggcccataatcgcagaaaacggcccatataaatccaccaaacgaatcttctctcttggtataaatatgctgtcttgcgttacagagaaaccctagacgtcgaagatg

SEQ ID NO: 21299 - DNA, 3000 bp, Unknown; identical to SEQ ID NO: 21298
  misc_feature (1)..( 3000): 2750-1469P.txt file - cDNA_ID_1976638; gDNA_ID_2926200; Annot_ID_201795

SEQ ID NO: 21300 - DNA, 3003 bp, Unknown
  misc_feature (1)..( 3003): 2750-1469P.txt file - cDNA_ID_1976665; gDNA_ID_1620632; Annot_ID_47280
atcattgataagattgagtgtatataattaaaataaaatgcataagactgaaattttgtttaaaccaaaaattattaaattaaagatcagaaaaatatatagattggtatacaatattcaaatattatcgataaaaaaatatttttctatcttacacccgtctaaataggcggaccttatctagtatatatatatatatatatatattttgtaaacgattgagtaaaaaatgtttggaaaaataaaatgagtgacttaaaaatgattagaattgttttaattcctgatagagttagagaagatttatacttaccaaaacaaaagttaaagaacatttcttatttggaaatatttttccagattatcaccaagtttaaaactatttttataataatataattttaaagaaaaaaacgagtcttctccatctgaatggctgtgtttctcaatgtatttggacgaattagagaacgataaaaaaatattcacagattttttaaaaatattgaatctcttataacgtaaatgttaaagcggataatttgacaagaaaggttcatatccaaccgcattatatcatatatgtaaacaaaattgctcagaaatgactatattaaactctaactaatatcggttgacaacaaaataatcaagtacttgattccatcaattgaaaatttaagattttgatttaaacattaaagtagaaaatctaaatagaattaaaataaatacttataaagttataatgtaaacttcttttgctttctgattttaaatgggctcagtcaaatcttaataatatttatcttttccaagagctgtataatgataccaagttaggtcagaatgccgaccacaattataaatgaaaattttctaaatgtaaaagccatgtgaaatcaatattttactccatttctttttaaaagagaataaaataaaataaagtcgcggaggaaatgcacatcgagcacatcactctaattattttatttaacagaaaagacttatttaaacatggtaatgaaaagaaaacattagacgattaatatatggttcgttcttatctaaactctggttattttattaatcttcatttttctgcgaattagatttggatttctattggtcaatgactcgatgcttggtggtcccaaataaaattgtattaaaataattttacgattcatgattgcttccatttcctgtaatttaattaaaatttgtgttcatcaaatattttatacagattgagagaattaaatgaactttcattatattattattagctaaaagagccagaaaaaaaaaaactgaaaagaaaagaatatctagaaattgattttagtaggtcaacattatttatatttaagtaatctaaaacttgtaactgaaaaactacggattagagtttattactgctgttttcaaatgggcataaattagttgggtaagctataattgtgacgaagactttgggaaatgtaaaaggaaagaaatgaatgtaaagcaaacacaaaacaatactccaactaattaaaagggtttgcaaaataaaagcccttcggatttccacaaatacacgaaagaatataaaatggtactgtagtaaattctaacaatcagattggaattcaattttcagaaaacaattttatcgaattaagtgtttaagcacccaccaagtattccatttaattactaatttgttagtaccattttttttgttatgcaccaaattaattacaaaactctataatcatcgacacagtcgacctggtgatctacaaaactttaacttttattccggtataggttttaaaacattgagtaaaagtgaacatgtattaggagattcatgttcgtcgtagataaacttgaccaacactacatattagtatattaccatctcttgactcgttacatgtttaaacatttcaatatacctaggtttttaacccatcatcgatcacgtttatgtcctattgtttgttcagtggaaagaattgggctctatgtcttacattgaaaattgaaagaaatggataaattgggagttagatttagatgttggttcttttaagttattatagttatgcgatttaatacgtttttgctggcctcatatattgttagatgttaaattaatttaaattatttccatactaaatgatttatttatcattttagcagcctagttttacttgtcctttactccaaagcccgattattaattaaggaaaaagtatttttcaactggagaaattgaatatttataaataaaataaagcacacgtaaagaaaatatattttattatttttaagaaaacaatatacgcaggccatctttgtctttcccaaaaaaaatttaattgaattttgtatacccactttaattttgtctactatactatttcttattttattatgtatatttattaattccctcccatcggattccagctaaaaacacgaatatctatatattcctaaatgaaaatttaatataaatccagtgcgagctatattaaaataatcacgctattaaagatttccttttcgcattattgtataaaagtaaaaaaatggacagacataaacaaatcttacaatataaaaaatcattatataaaaagataaaataccttatttaatgacaagataaataaaccattttttatttcttcaatctaattcacaaagcataaataaatctaatttccttcactttcctctccaacattttcttattttccttcctaatttccaacctctgttcttagcaatatattttttctccaaaaataattctcagtttgattttcttcttctagctcttaagtatatttctttgttgttatttatcttttaatcctttaatctcatctttgtttatctttaatcaaaacccaaaatttacatgggttcttgaaaatctagaagaaataaaggaaacataacaaaaatagaaagaaaaagaagctaatggtcttaaatatg

SEQ ID NO: 21301 - DNA, 3003 bp, Unknown; identical to SEQ ID NO: 21300
  misc_feature (1)..( 3003): 2750-1469P.txt file - cDNA_ID_1976665; gDNA_ID_2926154; Annot_ID_139436

SEQ ID NO: 21302 - DNA, 3000 bp, Unknown; identical to SEQ ID NO: 10902
  misc_feature (1)..( 3000): 2750-1469P.txt file - cDNA_ID_1976682; gDNA_ID_2214461; Annot_ID_132991

SEQ ID NO: 21303 - DNA, 3003 bp, Unknown
  misc_feature (1)..( 3003): 2750-1469P.txt file - cDNA_ID_1976682; gDNA_ID_2214711; Annot_ID_189893
tacccttgaagacgttttgtgtactattatgttaacgcgttgaaattaacgatgatgggtattgttacgacgaagacgaagacttatacaactactaacttcgatttctccaataaaggttttggtgttggtggtttgaaacagtttgtgtacggaaacactttcattgttctcgatgctttctgggtttctttctctaatctcttcaggtaaacgtttttgcttcttctttattattctttgttctctgtttttttgagttcttattggttaatgggtttgtttttatttagagttaatccagacaaagagacaagcttggtcttgttcgagaaacagaacacaaaagattcctctgtttttggagatcatcaagatcaaaaccaaatttgtggaacacaagacgatgatcagatggaaagctctctggtttcgattagcaagagatgcgagttttattccgacaacaaaagtatcgttggttttgtagaagaacctaaagcgtttagctttaagtttcatgagtattctgctattactgttcaggaggaggagaagaagaagatggtgagtttctctgatgaaaaaacgagttccatggttttggagaaatcagaatcagatggttttatgaaggaacacgtgaaagaagagatgttggtttatgagttcatgagttgtggtgttttaaaagagtcattggttcacgagaatcttgttggtggtgaagacaacttgtttgatgatgatgatgggtttatagaactaaacccaagtttacagatttcaaactttgcttatggagaagaagaagaagaagagtttatacacagagaagaagagatgaaaatgggctttgatgaacaagaagaggtatatgatgagtttgatgatggttcagattcagatgatgatgagtttgagcatagtgatgtgattgagaagttgaaaacagaattaaggactgcaaggacaggaggattgtgcactattcttgaggaatcagagactccattacaagagctgaaaccactcaagattgaaccaaaaccagatcaacacaaagacagaattgctgaaattcacaaggtttacaagaactacgcggttaaaatgcgaaaactcgatgtcatcgattctcaaacaatgcattccatcagtaagtcaatctattctcaattcaattttcaatcaatgttcttagcagactattacatcattagcaatgacgtatctacagagtcttaaatttttgtctgattccagcttttactttgattgtgaggacatattgttgaagaatgtctctttccttcttaaatgttttctcaactactcaaaagtgttagttgagtatatagttaacatttttggatttgatttaacaggtttgctaaagctaaaagattcatctaaacctagtagaaacactgataaaccgcctaaatcgtctctgcatcagaatatatggccattcaagaaacatacgcttgaatgtgacccgagtgagagacttgtgaaagaagcaagcagagactttgagactgtctatgtaggccaagtttgtctctcgtgggagatgcttcgatggcaatacgacaaagtcttggaatttgattcacaggttactacttatcaatacaacttagtagctggagagtttcagttattccaagttctgcttcaacggtttgtggagaatgaaccgtttcagaactcctctagagttgagacttacttaaagaaccgtcgccatttccagaatttccttcagattccacttgttagaggtaacaaaacatgttttcattattctttatagtatatactgaacctttcttgctaataccataatctgcaaagttttcagatgaccgttcttcgaagaagaaatgtagatatgaaggagaattcgcggtaaagactgaaatgttgagagagattatccgagagtcgatgagtgttttctgggagtttctttgtgcagacaaagacgagtttacttcaatgatgaaagtttctcaccaaactcaagtctctccacaggattctttagaccttgagctcttgacagatatcagaactcatctccaaaaggtatttaaaaacttcaaattcttgctctcattttgtcagattacatcaatgtttaacaattcactcaagaacctgttcttggcctaatgtagaaagagaagaagctaaaggaaatacaaagaagccaaagctgtatagtgaagaagttaaagaagaatgaatcaaagagtagtattggtgtgaaggatgaattactaatagctaaaattgaactgagactggtttcaagagtgatgtacatgtcgaaacttactactgagaagttacattggtgtcaggagaaacttgaaaagatcagcttcaacggtcggaagattcatatggaaccatatttctcgttgttaccttgttgagccatctctgcgtatagattagatcatagatgttggaacaatatggcttcatcagatccaggaagatgtctttttgttgttgttcatatcttcctgagaacaatagtatatctaatgaatgatatgtggtagcttagcgtttttctttctcctctaatcaccacaacatctggaatcacctcgaagaacattttgagaactagaagtaaagttgattaacatttggtacatgaacacaaatcttcttgaacgttgttgaactagtgattactgattaatgaataattaaagaaaagacaaacgttcgaaagatgggcctttgggccaagtcatatttggattattatgtaagcattaacaagcccataaaatgtcgtccattgatgatcataagtcaatatgtaatctgaaccgtccgatctagggctttaggtgttgaagtgaaaaaagaccctatataaagataatatagcttataaagtctcttctctgctccgtcaagctgaggaggataaaaaccctagggtgagtgagacagagagaagcgaaaatg

SEQ ID NO: 21304 - DNA, 3000 bp, Unknown; identical to SEQ ID NO: 10902
  misc_feature (1)..( 3000): 2750-1469P.txt file - cDNA_ID_1976682; gDNA_ID_2214461; Annot_ID_182787

SEQ ID NO: 21305 - DNA, 3003 bp, Unknown
  misc_feature (1)..( 3003): 2750-1469P.txt file - cDNA_ID_1976699; gDNA_ID_2214535; Annot_ID_134362
ggacaaaactactttatataccatttacatatagaatttgctaaaagccttttttttttttaatgtaaaatatatggtttttgtagggttgtgatgcatcgatcttgcttgacaattccacatcattccggactgagaaagatgctgctccgaacgcaaattcggctcgagggtttaatgtcatagatagaatgaaagtagcccttgagagagcttgcccaggaagagtctcttgtgcagatattctcaccatcgcctctcaaatatcagtgcttttggtatataaatatacatacatgacgtatcttttattaaactaatcgaaaatgttatcaattaaaagtctatgttttatatagtcgggaggtccatggtggccggttccgttggggaggagagacagtgtagaagctttcttcgctctggctaatacagctctgccctctccgtttttcaatcttactcaacttaaaacagcctttgctgacgttggcctaaaccgcacttccgatctagttgctctttccggtaaaaaaattcatgttacatcatctaactctaattaagatatgcatgtgtttaaaatgcaattcctttttatatattgatagctagctaagctagacagacacattcctagactaagtctagaatttacatagtaatttgtaagtaataaaattacaatgttaactcaatgttttagattattttgttagagtgatctacaaaatttactttttatgtattttttttctttcttatagatatgatttggtttgagctttgaaattgtcttataatatttaagggttttatttttctacaatgtttgagttcgaattttagcaatatttatttattagaaagtttttgaaggtatatgaattagttaacatgagttaaagatagaaaaacattttcttggaatacatgaccaaatagctgttaagaaaaacatgaccgaatgtaaatgaaaaaaagaaagaaaatctaatcaaatacaaatcatctagcacgtgatttttcaattttaactgagttggtaaacgacaaatcatgtttatctttaaataaaatcactaattccatttatctaaaccttaatgttttgtcaaaacgttttaggtggtcacacatttggaagagcacaatgccagttcgtgacgcctcgtctctacaacttcaatggtacaaacagtccagacccaagtctgaacccaacttaccttgtcgaactccgtcgattgtgtcctcaaaacggaaacggcaccgttctggtcaacttcgatgtcgtgactccagatgctttcgatagtcaatactacaccaaccttcgtaatgggaaaggtcttattcagagtgaccaggaactcttttcgactccaggagccgatacgatccctttagtaaaccaatacagcagcgacatgtccgtgttctttcgagcattcattgacgcaatgattaggatgggaaatcttagacctttgactggaactcaaggagagattagacaaaattgtagggttgtgaatccacgaattagggttgtggagaacgacgatggtgttgtgagttctatctgattatgcatgttgccatgttggggatatatatatggatatgtaagaaagtataaaatgcgcacgtgagaacaatttcgactaataaaagttttcacgagttatgagatttatgaaattggtattaagtacacttacaatgcatatatacgtggtgtttataacacttcaatttctgacatgtattcaagtagcttttgatttaacatcacgtcgaaatttataatatatattcaagcaaattgttgaaataaaatgtcctagtttttgtcagctttcgttacttataaatgagaagaaaagacaaggagctaaactgctaaagtattagattaggttaacttttgttaaccacaaaatctagcacatggacgcgtatgaagttgataaatcatatatgtattaggtaacattgttatttcagattaaattgttttgagcaagaattgtataaaaagtttatcgatttgtgaaggtggcttctgaggctacatttgcgggattcacggggaagagaaggacaaaacataaggaattctatttttcataaaatattaattaggaagatagtttgaaaatgtttgccaattaggaaggacaatccttttagaaggttttccgagatttttttttttgtcttgtatccaattataaatgtacgtacctcgtgtataaattaaaaaaaaaaaagtttaaacattcctttgaaactacaacaaactcatttatacaaatatccgtcccctcaaaaattcagatatatcaacaagaacacgtcacaaataaaacgtaattatggtaacatgatgatattatattttcctacatagacataacttgtgtctaacatgaatcaacaaacatatcttttacgaccctacataatccaaaattgatatcaaatatcgtactaatttcattttccgtaccactgttgaaatttgtgtcgtttataaattatttatcaaacttgaaaaatatctaagaataagaatatattggcggaattgagaaacattagatacgtacgtcgatttgtagtaagtaaaaaatgtaggggagacggttctaaaaagttgtaattgaagttaaaatgatcaatcttacttgatttatcacagcgtcggacaaatacagccaaacactacgagcaagtttaattctgtccaaagaatatatagcacgtcgaaattagtttattttaaattctaattattatttatccttcaaccactctagtaaaacacatggccttaaaaaaagacctaatagtattttttaagaacacaatacctaatagtctaaaataccattaaagaaagactcgaacatctctatatagtgttccttctaggcccttagttaatacacacactcacaactcaaatcatctttttgtctccctcctgaaaaaatg

SEQ ID NO: 21306 - DNA, 3003 bp, Unknown; identical to SEQ ID NO: 21305
  misc_feature (1)..( 3003): 2750-1469P.txt file - cDNA_ID_1976699; gDNA_ID_2214535; Annot_ID_185062

SEQ ID NO: 21307 - DNA, 3000 bp, Unknown
  misc_feature (1)..( 3000): 2750-1469P.txt file - cDNA_ID_1976717; gDNA_ID_2214533; Annot_ID_134327
ccatgaaaatataggctggtataaaatcaattattatgaaaggtatatgagtatttaggatcttacaaaaatatatttcaaatatcttatttaatttgctaatacatatatttagccgagttgtttttagcgatcaaaaccttttttttttccgaacgatcaaaacattataaaactcaaatacttcaaacattataagactttgtgatttgtaagcttatttccaagccgtaatttacatcatttggaaagagaaaaattcgaggcttcacactaccattgctaaaccagcagctaatctggtcaaagagattcaggtcaccatttgtgctaaattagatcgtctagatcgcagcaaaataatattacattcaccttcagctggtccaactcggcagtctcaagaaagacctttcaacctgatttcgatttattcaaccttaaatttcttgggtaactccttcacctatggtcttgtgtttcactttatttctctcttcaaaaaaaaaaatttaagcagtgtaatttcaaatgatgtcttctttagtaaagaaagatgaataaaggttcttaaagataaacaaaaagaaaagaaaggatagttattaggagatttcggggattatgagattgatttgaaaggaaagttaatatcataaaatatattcttattattaaataggtagatttcctattgttccatatgcaaagaacttgttaatcaagttataattttgtataaataagcatattagcctattgaataaaattgagagaaactatatcacttctaaaatttcctccaaacttatcatggttttttctgtcgttataacttcaaatacgatgtagccacatagatgatgaactccaacgggtatatgtggatccaacaaagatgatgacatgatgttgctgtgaattatgagcatgaaccgattgatgatttcgttcacttcacatggtgacataagatgatggagatacacaactactaaagtattttgctatcgaattgataatcttatggcgaggtataaacgccattagtgacccaatagtgggtataaaaactgtgaagatgatttaatgattgtccaatgttatacgtgttaccacgtatgagcttgcggaagagtattagaaaatctcgaagattacgagatcaatttgaaaagaaagttaatattgtaaaatatatgtctattgtgaaataggtatatttcctattgtcccaatataaaaaacttattaatcaaattataactttatataaataagtatattagactattgaataaaattgagaaaaactattctactattaacgttttctctccaaacttatcaatagtctttctattaagcggacctatgactacatgtttgtctaggtgagcctatgcaatttagttaggcttagatatcacccggcagtagctacataactaattgaagtcttttctatgtttcttattactataaatcggtgcgtttaggtttccaactcgggtcatagacggtcgatagtcatgtgaaaatgtttctttccaaataaagggaagttatttcaagtaattttcatgagtactagcataatgtgaaatgtattcaaatatgtgtataattgtagaaaatgttaatgcttaaatcgtaaatgcgtgttggcaaaacagttaagagaaatgaaaaggcagaggaaacgcctcaattatgttttttttttgtataattcaatgtctcctctactaaccatacatgtcttgattctttaatggcgttgtagttttgttatgaatatataagttcactattcaaaatattttaggtgctcattaaaatatcgttgaaattactctattattatgctatttttatataaccattcaaagcattttggccgcacaatttgctcgatttgtgttgtttcttccgtatgaagtgcttttcttcaatccaactgatttgcctacaaataataggggatctcgctggtataattaatgtaatgaaaaaacataaattttatttccaccaactacttttatgacaaaaaaatgaaaaatatagataaacaaaaaatcaaccaattacgttgtataaaatcggtgatggcaattgggaaagaaaagaaaatcggtgatggtggactattttaaattaattaaaaacaatacaaaccggttatttaggtaaaataaatcagagtgatgtgccacttatatttaaattttcctcagctaactaatttctagtactatatattaatactaacctttgattttagatttgctttttcttttattgcgagtttgtcatttttttttaacttcttgtcatttttacatttaattttcttttactactatatactactattagccatcagttttctcctatttagtttttaggataactaaaatttcaagaaatattgtatttggtgcataatacattggggttggtagattctccatagtaagaaatgaatataatttagttggtatacttggtacgtgcaaggaaaaaccaagaaatattcatcttcttatcacaattgcttatattaggaaataaatcagagaaatatattcttaacttacacgaattgaaatggtgaaacaaattatggtaaagttttgttcttcttaaaattttattacttactttagcgtgcgtgtcacacatttctgaccaattttgttttcacttaacaacgtaaccaaaagtattaaacagcaactttaacccaaaaaaacagcaaaattacccattttatccttcaaataaataaaaagttataagaaaacaaaaacaaaaattggagtctttctcattgtcgacacatcttctctctttatataaacaaatctcacaaaccccaaaaattcatcaaaccctttcttcaccacattattttcactgagcgcataacatttttgagacaagagactctctctctctctcttctctctttctctccccctctctccggcgatg

SEQ ID NO: 21308 - DNA, 3000 bp, Unknown; identical to SEQ ID NO: 21307
  misc_feature (1)..( 3000): 2750-1469P.txt file - cDNA_ID_1976717; gDNA_ID_2214533; Annot_ID_185002

SEQ ID NO: 21309 - DNA, 3003 bp, Unknown
  misc_feature (1)..( 3003): 2750-1469P.txt file - cDNA_ID_1976739; gDNA_ID_1620628; Annot_ID_47190
aactcctaatgttatacatgttgtggcagctatcgtcaaaaggcacggcatgggatgagattgacttcgagtttttgggaaatcgcacaggacatccttacactatccacaccaatgtgttcaccggaggtaaaggcgaccgtgagatgcagttccgtctctggttcgatcccactgcggatttccacacctacaccgtccactggaaccctgttaacatcatgtgagtatatagtctatcaggaaaccctaaattgatagtaaattatacaatataatccagtatattaacaaacgttttattaattagttcatttattatcaattggtttttatataataagcttatgaacattgacagcgtctaatctcatatatttcctcttttgatgtgatcccttacattgagcactataaaaaaaaaaaacgagttctcttgacatctatagacatatttgatatatatttcttgacattcatgttggtttcttgtgtctgaagcttccttgtggatgggatcccaattcgggtgttcaagaacaacgagaaaaatggggtggcttaccctaagaaccagccgatgaggatatactcaagcctttgggaagccgatgactgggctacagaaggcggtcgcgtgaagatcgactggagcaacgcaccattcaaggcctcttacagaaacttcaacgaccaaagctcatgcagcaggacatcaagctcaaaatgggtgacttgcgagccaaacagcaactcgtggatgtggacgactctcaatcctgcccagtacggaaaaatgatgtgggtgcaacgagacttcatgatctacaactattgtaccgattttaagagattccctcaaggcctccccaaggagtgtaaactttgattctattatgggaattttcaagcatttttctttccgttttgtttcatcttgtgatgttactttgatttattttgttctttcttttggtgtttctgagatacgatattacatgtatacgtattcttcctgagaaaataagaagttgtattactcgataatacattttatctctcaatgtggtgtgattgtttattgggtttggcgtacaatgaaagctacatcaatgtgctttagaaaaatgcatacgaaaagaaaaacacaacaatcaaaaacccgtgaggtaactaaattatctccatttacaaatatactaacaatactactaatttattgctaagctgtcagctgtcacgaccatgataatgaaaaaaaaaatcatctctgttttcttctaaactttagagtttctcgaattttcacatataataaaaataaccaacagttatggtactctgttgggtgaagatttgctatgtggatatgtaaaatgcttagagtctttacattgtgattttagtggctggttagtggttattaggttattacaaacgcttttatctttgtacatgatcttcttaagtagttacagaaatctcaacttttcttaaactaaacgaatatctttgatttttattttctttacatcactcttattgggtctaactcactgtaaaattcctgcatgtttatattatgaaattgagaaaatagtaaatatatgttttaatttcaaagtttaatgaacgcgttggttggtccaactaactaatagggcccaacattaaagactttaagacccacatttaggaaatgaatttggacagtccaatttaaagcacagaacgtgtctcaatacttattcagtttatttcttcgacaatgatttttcaaactaaattgctatttttgatattcaggatatttcatttcatataattcagttgcattttcaggatttacaaactttgtaattgtctcctcataatgtcactttttccttcattccatccaatttgtcgtcaaagggcaataaaaataataatcacaatgctaaattctgataatcaaatctcaacaaaatatgactcaaatcaaaccctgttgattggaccaacgaattagacacttgagctttagctcctgtgattttaatgtggtatgcttgcagaaaatttcttaccaaaatgtcaactcatctccgagattaagcgtactatttgccaatacccgagtactcggagctaaataatagaaaaagaaaaaaagaatacatatctcatgtccaaacaatattttatatacttatttcatgacaaaaatcaggaacaaattaaaattttacagatataaaataggtccacgcaacaaacacacgttaagtttcattaggtttagattattgaataagatgcagaattgtcattttcaatattgattagtttctggtttaagtcaatatcacctggtttagagccactcgtgacaatgtataaaaaaattacgtaccatctctatatccaaaactagagacagagatgtgtcgaccatgaaactgtcttaagaactatgacaatttggtcataggcatagcctaggcaaaaaaacttcatttaaaaaaaaaagatcaaaatgtttcgattataaaagattcgtaaggttatataaaatacagaaagcatgagatataagttttctcaatattacaaggttattctcaaataattcaaacgaagattctcgtctaactatcacttttagaggataaggacagaaaattaaattagaaagtcctgacggaccaaattcattagacgcagttggctaatcatacattcaatgccaatggagaagtccaactgtatttcatttcaatcttactcatacaactatacaagtgatctgcaaattgccgcgtacatatatgaataagaaaaatacattaaaattttatatccacctgccaaatcctttcaacgccaaaccattcccctatataattatatatacaattacaaattttatgttacagtcttcatttattcgcgtaaagatttcaaaaagtagtgaatatattcttgtaggaagctgcaggggttaaggagagaaaagggatg

SEQ ID NO: 21310 - DNA, 3003 bp, Unknown; identical to SEQ ID NO: 21309
  misc_feature (1)..( 3003): 2750-1469P.txt file - cDNA_ID_1976739; gDNA_ID_2926188; Annot_ID_140869

SEQ ID NO: 21311 - DNA, 3003 bp, Unknown
  misc_feature (1)..( 3003): 2750-1469P.txt file - cDNA_ID_1976743; gDNA_ID_2214576; Annot_ID_135182
atagaaggtagttttggtaagctactggtaatagttttcgtattaatttatactatatatctcgtgtttgtgtaattagaaaacaaacgtatatactgaaacctagacttatccatcacacatatagaaagtcaaatattctatgatgattcttgtgaatgcatgtatgcaacatacacaaatacactcatataaacatgtcttgtttttttgccttgtacgatattctatatggtttatataattctttagggggttcggtcacggtggaggcaaggatttgcaaatcgaggagccaaaagttcaagggaccgtgcgtgagtgaagacaactgtgccaacgtttgccacaccgaaggttttcccgatggtgattgcgacggactcctccggcgttgctactgcaacacacattgctgattctcattacatatatcaaattaaatcaactatatagtaaactaactctatatatttacatgtttattttcttcgatcttattgacgtacactttactttaaattcggttcatgcaacttatgtgaggaaaaaaatcctactatattatttgggaagtacattttaaatataaccttaatttttgtaagaaattacataggtatgccattagaaataaaattttaaagagtaaattaatttatctctttaaggattaaaaaatcaattactaatttaattaattaaatttaattaaaaaacgaaatacattattaattttcaaaaataataaccaatcaaaataaacatataagatttgatatctaaatttttattaatttaatttaattagaaaaacgaaatacattattaatttccaaaagagtaacctattaaaatcaacaaattagatttgatatctaaattatcatattaattttttattaatcattatagttcacttcttatctttatatgattctatttttgcaaaaaataatatcatcattataaaaaataattagagttttttcgcatatctcataatttaaatttttgaaaattgtgaatataaactgttcaatacatgaaaaatattataacgggtgaaaaatagatttaagaaaactttctactgagtaaggggtcatatttgaaatatttatattcaatttcatacatattatattgaaaatttataatcttatatactacaataattaataacatattagattattttatgtgtatgatatgattcaatttttaatacaagatagaaaatcctagaattgacgggtttagatcgatattaatacaagatggtatactacaggtgaaactcttaaattaacaatcaaactacaagtgtataatcttaaacactaaacaatatagataatatcaacaaaacatatacaactcacagtttacttttaatattttatatacaaaatcaattaaatcttaattaaatcttaatcacataaaaattagcacaaaaaaaaaaattcaacaattaaattttttatcaaatctctgtgttatataagttttgatactatattcgaataaagtgtaatataccttttcaatttgtattctttaactaattcaagctaactaatatatttgctaatcttatacctatcaaaaccgactatcgtttcttatctctatagtatttttgcaagacttttttggtggattggggtaaaaatgcattcgggtcatatggtatattcccctattaaataaaaatggtatactcctatgttattagctaaaatgtttagattataattcagagtcatatcattaataaaattaatattaataaaataaatggctttttggcaagacggatttggagtgacgggtttttgaatcaacattaataaaaaagtaaaatataattaatacaccgtttcaatacgggttaaatctttaatttattattttttaagaccactaatattaaacatatcaaatcatcctaatttagaaaagattatataaaaccaaaaatgttatgtggtatgtataatgttactatatataaaatataaatgtattagagaatgatataatttgcaaaacttttatctataaaaaataattcttaaattttaaaaattactactttaaaaaaagaaatcacgggaggggtaaagaaattatagaacgggttttattttggaattgggttatatggtggatgtatttgaatcaatatttataaaattttaaaatattattaatatgctgttttaatagaggttacaacttcgttttttaacaattgtctcatagattcgtggtatagccttacttaataacaattataaagtgtaaaatataaatattttataaaaataaaatttgcaaattttaatatatattacttttaaaaaataaatcgtcctgcggtataccgcgggttaaaatctagttatcatatatagtcgtaatttgtaaacaaattaacaaccaagaaaaagtttattaaagcaaattaacaattactaaacaaagtagtaattaaacacatcctgatttttttaaaaagtatttggagggtcgaatttaataattaatcaggatttcattatgtagcttaattaagatttaagggtgcaaatttaccataaacgtgtaaaatttattattcatctcttgtcattaagtaagatgtataaagaagagaaaaattagaaaagttttattcgttgatcaagacgattatgcattcttctttgttataagttttttccttgttctttaggattaaatactaatttgattatttaattgattggtcagcctttaattacgactgcatctatatgggtaaaggttttaactggttcacgttttgtttctattttttgtaaggccataaattatttatattaatttgtaaaaacaaaaccaaacattttaccaacaaaagaattcatcccctttatatagtgtcatcttcttgatcttcttaactaccattagctttctctaaacatttgtatcttaatctctttaaaaatg

SEQ ID NO: 21312 - DNA, 3003 bp, Unknown; identical to SEQ ID NO: 21311
  misc_feature (1)..( 3003): 2750-1469P.txt file - cDNA_ID_1976743; gDNA_ID_2214576; Annot_ID_186350

SEQ ID NO: 21313 - DNA, 3000 bp, Unknown; identical to SEQ ID NO: 1711
  misc_feature (1)..( 3000): 2750-1469P.txt file - cDNA_ID_1976766; gDNA_ID_1620437; Annot_ID_157046

SEQ ID NO: 21314 - DNA, 3000 bp, Unknown; identical to SEQ ID NO: 5603
  misc_feature (1)..( 3000): 2750-1469P.txt file - cDNA_ID_1976770; gDNA_ID_1620806; Annot_ID_50548

SEQ ID NO: 21315 - DNA, 3000 bp, Unknown; identical to SEQ ID NO: 5603
  misc_feature (1)..( 3000): 2750-1469P.txt file - cDNA_ID_1976770; gDNA_ID_1620806; Annot_ID_168862

SEQ ID NO: 21316 - DNA, 3000 bp, Unknown; identical to SEQ ID NO: 5603
  misc_feature (1)..( 3000): 2750-1469P.txt file - cDNA_ID_1976770; gDNA_ID_2926172; Annot_ID_140162

SEQ ID NO: 21317 - DNA, 3000 bp, Unknown; identical to SEQ ID NO: 5603
  misc_feature (1)..( 3000): 2750-1469P.txt file - cDNA_ID_1976770; gDNA_ID_2926172; Annot_ID_199576

SEQ ID NO: 21318 - DNA, 3003 bp, Unknown
  misc_feature (1)..( 3003): 2750-1469P.txt file - cDNA_ID_1976806; gDNA_ID_1621174; Annot_ID_57302
ttactaagtatctcgacaaagtcagtttcttggagagtgctgattacaggcagtttgagaaagagagagacgctagtttgagaagacacgatgagaccgactcctctaacgttcttctacatctgctgtaagtaatcttgttttctgttctgttagagaagtcttctttagtagactttgtagcattttctcaagtgatttggtcacattctttggcagtgtctaaaccgagtccccgttttcttgattgattcggatttatttcttatgtctctctcgagagagagttcaaaactgagaccatcctctctgaaggccatggccaatgaaatgggcttgcaatgcaacgtaagcccaacttgaatcccacgattctaattcgagccgatatctgaaacaacaattcatttgtgactgcaatctacaccaatctacaccttgttcttgtaaatcgtttgttttcttagtttctacctaatgaagctcatttggtctctatacaacataaatttcttcttttggttttgaaatctaaaacctgaagtaaagcttgattgatttggtttatggattgcaggggaaaaagtggctctctctttaacatttacaaaaaaaaaaaaaagtggctctctacagagttgatagtcgtaaacaagcaagctcgtgttaggttttttctattgttggatggttttgtatcaatgttctcaatattgttttactagataatgaagataacttttatattgtaaatatattaaattcattttgtaattattattttttggacaaatataaatgcatatataagtaaaaatgtgataacacgtttcattgagtgtatatttaaaatgtaattatgcaaaaaaaaaattaaaaaatatttaattagcaatttagaagtttaaacatcaattctgttttgagaaaatagtatagtttatagacatgtagtatagctaatgtttatttcacacatatgccaatttttagtaaataaatcgtgaagtgatcatcaccataaaatctgatggccgcaattcaaacccatgtaatcgaattttgtttctaagatagaatctaacacaaaataaattagtatacatacatgatatattaattttttttttgtaacatgatagattaattaatttaaagataagaaaccacacacataaattatttatagatttttaaaagtttcaatatttattacatagaaacccaaaaaatccatcataaaagcggttatcaggaggcgtgtaaaatttcacttgagcaaatttgttttggttgcagagatttttgcaagcaattctcacaaaaaggaagagttgccgttttagaatctttcatgcactgatttgggacacaatgtttaacacatacttctatcgtactcgcgtatgttgaaactatcatcgttaataaaactacaatcatcaaaacactatatatctttttcattgtttcagttgccattatttgaaaatatgagtttgtgaatgtttgaggtaataaaaatattgtttaggttatatagcaaaaaaaaattaacaagataattagtgttgagttggctttttgtagttttgtactttatatagcaaaagtatttttatccacttaaaattattgattttggaagtatatccgtttcttattaattaaaaagttagttttttttttgtttatgttattagctgtccaaacaatcttgcaatgttaaatcgtcatttaccaaaaaaattgccaaattttcaccattgtcaataataagtcaaatattttataatcttaattcaaaaactatcccctaaaacatgattatataaaaaaaaaatcgtattgatgggtcgagatatttagcattaacttataaaccaaaatgaatttacaggttgatttgatctatttaaatttattggattcataggttgacctaattaatttagctaaataatttatctaacactcaactaattaagacaatagatggtacccataatagattaaatttgagtaacttcaaaagtttctattcagttttttttcttacaatttttttgtggtattaattctaaagcattatcaataatattgtcacatttttaaaaatcttatttcagaaattatcccctaaaaaagattataaactagaaccttttttttgtattgatgggtagagatatgtaatcatttaacttacaaaccaaattgaatttacatgttgatttgatctatttaaatttgatggattcatgggttaacaacaacaagaaaaacaaaattagtttaatattataccacatgtcacgctctagtgagaatgttaagagtttatgtaataacactaacaaattttgtatatttttcctatactataaacatttttaatttttttttttgaatatattaacaacaacaaaattaatagaatgaggttaatagtttaatatattagcattttttatataagaagtaaattttatttatttttgaatatttaacaaaaacaaagtttaataaaattagtttaacagtttaaaatagcaataacaaaagtcgaacataaaaacaattttttttcttacttaatatatatatttcttttttcgataggattaagaacttttgtatttctatttttaaaaatattaacaaaattaagtttaacatcttaagttttaaaaatttggcaaatttttaaattacatatatttttattcttttgtttttgaaaatagggagtaatagttaatgtagttatagactatagagatgcattgtcaacaataaaacgccacgtcgcagcataattaaaatcttttgcacaaaaatgtggttggccttagccttggccctggaattaaaacattatccagaaaatcttacatttccaccaatccttcacttcctttcacgatccaaaacaaaacacaagaaaatgcaacaaaatcttctccatctctgaactcaaaaactcattcactgagaaaaatg

SEQ ID NO: 21319 - DNA, 3000 bp, Unknown; identical to SEQ ID NO: 13058
  misc_feature (1)..( 3000): 2750-1469P.txt file - cDNA_ID_1976820; gDNA_ID_2214594; Annot_ID_135462

SEQ ID NO: 21320 - DNA, 1333 bp, Unknown; identical to SEQ ID NO: 6186
  misc_feature (1)..( 1333): 2750-1469P.txt file - cDNA_ID_1976868; gDNA_ID_1620863; Annot_ID_51296

SEQ ID NO: 21321 - DNA, 3003 bp, Unknown
  misc_feature (1)..( 3003): 2750-1469P.txt file - cDNA_ID_1976868; gDNA_ID_1620422; Annot_ID_156619
cttatttcaccacacaatctctggagaatgttctaaatgagataatttttgtggacgttgtgcaaatatcacacatgacaaaaaaaataaaaattggtataatcgtatgaatgatctttcaaactgtcttttattcgaaagatgattgtatatgtggatagatgtcaacacaccaacaaacattttgatcctatctgtatagcgaacaaaatatttgtgagaatattgaaccaagtcttaacaatgggaagattcatatcttagagatcagtgcaaaatttgagggatcaaaagattaacgtcaagtgtgtcatcagacgaactcctacttttatgatacccataatctttcaatctgttccgatttaaaaattttaaatgtaattactgattgtttgtaattgataataaaaaaaaactatttcatattttcaatttctaacattattgtttattgtttgtaattaataaaagaaaaaaacatttaatagtttttcatttttgacattatactttcttcaaatctaaaactaccaacgatgatatttatattttattaatccatttattctttgatattttcaaaaatgtccattaatgttttcattgttactattactaagtaataaataatataaataaacactgacaaactgaagttacagactataaataatttaccatactaaatgtaacatcaaagctttcatagctcagttggttagagcacccgtttagtaagcgggaggtcttgagttcaactctcaatgaaagcatttttctccttcttcttttttattgaacccataccctcgaaagctttttcttttgttattttttgaagtctatttctcttttcactgtctctcgcaatctccgactctctccttcttatttcgtcgccgtcgctactctttctcgtcggtaagttcccctctgtcatttccttcttctccaacatctaatcttattgtcgattgtgtaaattgctatgttttccagttatttactcgggcacgaaacatgttcgatgaaatgtctcaaagagtatttttttagactcataacgaaactgcttatctctttgcttttgttcgtgattttgtattgcggttctaacgttaatatgaactgggttagctttcaaattgtaaaaaaagtttaccagattcgtctggatctaatgctcatgttttagttttggaataaaaaatgtccagtctttagaaactattgttaaggaaacggaacctagttttggagaatcgttagttagagttgatcgcattgacatagcaaccttaattttatggtctcatagtttgcagattctcgtatttcagaagctactgtatttcaacatcaaagtttgtacctttctatgatgcatttaccattttggctttgaagaagatatatctgaattttgattgaaatgtttacgtttttttgttaaatctatcagactataatgagtgattttgtttcattgtgttgcttacgttaaggtggtatagtgtcaactttcaaggaagatggctagtggtagcctgaagagccttatatcttcagcagtgggtcgaggtgtgaccgaagcaagagcaaggattttcggacatatgcttaacccaacgggacagagatctcctcataagatattaaggaagaagcttattggtgataaggttgcagaatggtatccatacgacatcaagaatgaggatcccaatgtcttggctagagaagaaaaagagtactttcctaaacctctcttttcttgtttactttccaattgattgctttgtttatcatagaaaactctttgagtgggattgagctggaacatgtttccacaagctttttagttcaattgctatttgggggttagtatccaaaatcctagacatgagaaagaaactagatgtagattgtatgagccttcttgtgatttgtggagcttacgcagagtcatgttctttggtttctggtgtaaaatgcaacatagtcacgaactaatcttatttggcaaggatagtactgtctttgaaattcacttacacttggttttatattcactgcttatgttatcattgttttctctctgttgagaggcattttaacttaagtttgggtgttgttgttgtaggcggatatcgaagcttgagatgttgaaacgtcgtgacaaaggaccaccaaagaagggtcatggaaaacgtgctgcgaagcgtaacaagtagaagtaataaccatagctacaaaaaattctctgcactcttagagtcaaactcttctggttgaatcagatagaacttataagtgaaaatttctcctacttaaaactgaattggtttccaatgatgttactatgttgagacatagttgaaagctatttgcttcccttttgactaaaaatgtcaatggcttttgtttctcttctcttactcttttagtctttagagttttttgagattaatattggtgagatgtttgtacttttttgatctagtttttcttatctcgtgatagatttcaaatcctctttgtcagtctttgatgttggattgaaagtgaatttatagatttttaccttttcgaatttaaatattaaggtgactaaatactgaagtggtaggtcggccattctaattctgagtactagttcaactattctgaggtggtaggtcgaccattctaatactgaaatggaacgtgtcacttgttacttgttcttattgagaattgattttttacagggatcctaattaccacggatttacttgaatgagtttagtccatcaaaaagttgaaaaagaaccaaatattaaaagatggttggtgtaacctgtctgcttatataatccacgtgtgaaaaatgcataaaactcaaacgacaacattttgaaaacgatggcaaattcttgaatgattcttctttttatgttccctttttactaaagctaaaaggattcattagcaagtgtttgtgaaagggagagagaaatg

SEQ ID NO: 21322 - DNA, 1333 bp, Unknown; identical to SEQ ID NO: 6186
  misc_feature (1)..( 1333): 2750-1469P.txt file - cDNA_ID_1976868; gDNA_ID_1620863; Annot_ID_170399

SEQ ID NO: 21323 - DNA, 3000 bp, Unknown; identical to SEQ ID NO: 13249
  misc_feature (1)..( 3000): 2750-1469P.txt file - cDNA_ID_1976891; gDNA_ID_2214608; Annot_ID_135703

SEQ ID NO: 21324 - DNA, 3000 bp, Unknown; identical to SEQ ID NO: 13249
  misc_feature (1)..( 3000): 2750-1469P.txt file - cDNA_ID_1976891; gDNA_ID_2214608; Annot_ID_187281

SEQ ID NO: 21325 - DNA, 3003 bp, Unknown
  misc_feature (1)..( 3003): 2750-1469P.txt file - cDNA_ID_1976939; gDNA_ID_2214644; Annot_ID_136332
ggttatttttatgatccttcattcaagctcttcttctttgtctactctttgtttagtgtgatccattgttcatatttcaagctaggttcttttttctgtctagaccgatgcgcttaagaagctctcttcgaggtatcaagttgttgtttccacaggtggaggtgcagttataagacccattaactggtgtgttcccttcatcctgttcaaagtataatgatacaaaactcggttccttgtttaacttgtttggtaatctgatgatattatcaggaagtatatgcataaaggaatcagcatttggctagatgtgcctctagaagcattagcccatagaatcgctgctgttggaactgattcacgaccactgctacacgatgaatcaggagatgcatactcagtggtactgattctgactgttgtacaatcataagccttggatacttcaaacaaaacattcatctttttttctgtttgtgcttgtgaatgaattactcgtaggctttcaaacgtctctcggctatttgggacgagcgcggtgaagcatacacaaacgcaaatgccagagtctccttagaaagtatgtcttcttcatccatcttatctgccatagcctttgttcaatctgtgtaacttcttctggaaattttgctctccttccttgtacgcgaatcatcagatattgcagcaaagcgtggctataaaaatgtctcagatctcacaccaactgaaattgctatcgaggtaagccaggtcctttctcagttacttcatcattaatcatttcaaatcaaactcaacaaagcaaatcactcatcaccaggccttcgagcaagttctgagctttctagagaaagaagaaactatggagatcccagacggcgacctctaatttcccagccttcttttctccgtctcttcatttatctgtttaatcaactaaacgaagcaatcactcatcaccaggccattgagcaagttcagagacaaagaagacctctagttactggttccgggtcattggagcttacacgagcctaattttgactggaactatggtttattgaaagaagattcaatacatgtatatataaaatatatacttttttttttgtttcagtatcatccttcttctcttttccttacaataagaattaagaaaaagtagccgtgtttgttaacatgggccaagaacaagcaaagtgatcattcaaatataaaagtagctttctcatggaatacaacaaagaaatgcacatgcagaagaaagtagatttaactctaaaagtacagaagcaaatctatgaattttactacaccggcaagtgtttcatcttggctcagggcattaagccaagctatactctttgtcgattcactagttccggcaaagtagtctaaaccactatgctcataacaatgattgttgctcacggacatacataacacaaccaataacgatgaatcagaagcagacctgtgtggtatatcatggatgatgaagatatgatgacagtatacatgtatgcatcatcatcaaactgtagctgccaagcaattcacaatggcagattcattaggaaccgtaagcacggtaccagaccattcaatttttccccaaatctccctttctccacgccttccaacatcaatctccgcacaccaaatctccattctcctagaaccaccactaccagctttaccttcccacaaaaccgtaagctttccaccacgattagccattgtagccccacaaagaaactttggaagtgactccacacctttcagctctctccaaatcctctcttttggatcataccctctaatcttccccaagtaatcataacaatacaatatgttctcaatcacacaagctcttcctctccatcccaaatcaagcctcttctcaggcatctcccatttcttttccttgggttcgtaaacaacaccgtttcgatcagccattgcgtaaaccttcccttccataaccgcacttgcgtgcatccatttctcacgaacctccatacctggactagccactggctcccaagtttgagtctttatatcaaacatctctgcccagttaatcgatcgagcccaattatcaactacacatcctccaatcacataaatcttcccatcaattacaccagctgctgcaaattcacgacctactctcatattagagactcgtcgccaagtatgaaatctgcaatcgagaacccacacgctcgaagaaggcacgtctctaatagatccaccgatcacgtaaatctctgaatctaccacaacgtaagcggatccgactagagacggtgaaggacaagatgggattggaacaagcattttcgaattcgttgagttcgataaggttcgatggaggagagtgaaccaacacgcaccagattcaggaggtatacggattgctacgtagaggatgttttcagtggctccgacgagagctctcgtggcgtagagaagaggtgatgttgggagagatcggaaagtcttggagacgagtgagaggattggatagtgacatctagggacgcgagcaaggcaactgagagcaacgtcttctgataacaacggaatcaattgcgccggtgattttgtttccggtggttcgtcgccggagctcgttgtagccgccattgatccgttttgatcagtctttatttccttctcaatttaaaagagaaaattaattttgcaattattcggttcggttcgattcgattaagtcagacaaatccgagaagagaaagttattttagaaactaaaccgtatttaaaccgatatgattgtgccgttatctacaagtgctgacgtggcgggaagcatgatctcgtggtttgaaagaagccacgcgcttcctcgtcttcccttcgtcctccgacgtttccaattgggagaagaagaagacgacgatgaagcatttatctgattctgggtctgttgaaaatcaaaattttcttgagaactttttttgaagagttatg

SEQ ID NO: 21326 - DNA, 3003 bp, Unknown
  misc_feature (1)..( 3003): 2750-1469P.txt file - cDNA_ID_1976954; gDNA_ID_1971815; Annot_ID_58209
atagagaagctttatccatcttagacacattaggaaccacagctcttaaagaatagaatctctgattcaacttctctcttctctgtctctctgcctctacatgattcaaaggctcttctcttccattcgccggttttctccctcgtttcctcggtttcttctccggttcaaccacaactctgttactctcagcttctttagccactgaagcttcaagatcagagtgattcgagtcacatggaagaacagaggtaaaagaaagcatcccttcttcattattcgaaaccggtgatctcttcttattactactatcttcttcttgaccattctcaatcccattcttgaaattcaccatttcacaagatttcagaactttagggttagggttttcaacagagcttccattacaaagcttagaaattggttgagaatcagaattagaagttgagtcatttccaccattattcatcaccggagcagctacaagaccagagtcaacaccattaggttcactaatccacaaacctggatcattctctccttgatctggattcaaattaaacgcccaagaaccaaattcaccaccaccattgttaaaattgaaaaaggtgtcaactttatcaacaagatctgaactttgatgaataatctccgacgaaccaagctcaacgacaccattctctgtcgctacacacaccattgtttgtaacccataaatctgaccttgacgagctctctcacaacttgatccagctaaagcattagaaccagataaccaaatcgtgtctgaatttgagaaagcttgaccaggtaaaccagtacccttgacaaagctctgtgtcattgaaactaagaagaaccattcagtatctgtaacttcttcatctccagcttcatctcctcctcctacaccaccggagattaaagagttgagctctctaatcactctcttacgatgctcttgttcagctgcactagctggatttgatttcttctttctagacttctcttcttctcctttgtaataaccatctccccaacctaacaacactgtgttgttgttgttgttgtcttctccggcgaaaccgtgagatgattgccagaacacggcgtaagtccagttctcgtttgctccttcgattaaagcttggagacgttgctggagattatcttcgttgacttgaggaagaggaggaggaggaagtggaggaaaaagagaagaatgatcggagccgccgccgatgaaagcttccattaccgatgcatcgtcgtcggttgaccagagatttgttgtatccgtttttgattggttgagatggtaatcggttacttgaacattcgtcggagacataacagttctctgacgtagttataaaagagaagactttttgtttttccggtgagagacagaggagagaagtaagttctttaagcaaaatatttgtgtttggtttgattgtttcgggaaaaggaatctgtttatattcattttttttttttaactctaaagaaaaagaaatagtacttttattttcaccaaatatgaattattgattgagttatttctgaagttgggttatatacataacttgattgaaaacaatttttttctgaatagtaattgttttacaagaaaattactaatctatgtaagagaatcggatcaaatttgtcaaggagccttttacatcaaagttgataattaagaacaattaaagaatgaaaatgatatttcacttacaataatgatcttgtctccctcacttttggtattggtgtcaatatctgcttttcttgtgattaatcccatcatttaattcttgtaagcaagtagcatcaattaatttaaacaatgagtttgtagaattgcagttgttctttgaggcaggaaaatatgatttaaagggattaagggagtgttaacaccaaagatttggatacaacatttatatacaaaacctataaagcaaatattgtagacttgtagtttaacattttcttataaacatatttttgttggcttcgttattggacacaactttttgcaatgataaagaacaaaaaaaagacatgggtgattttgatatcaaaggtgaaagagacgcaagagcataaaggaaaataaaaggtatagtattaaaacagaattagatttaattacgaaaattatacgaccacacaaaaataatcacattatgtcgtgtgggtctcgtgtttttagtggccagatttcataatatgctttctttttcagtgagagcaaatgcccaaaaatgttggtctctctatgttcatatccgacgaaactatagtgtctactgtacagtgacatttcggaatcgcataaaagcaaacaaaacaaattaagctgggctttactttatattgggcctcacacattttgggtagttaataaaactagcccgcaaatatttcacatttgacattttttagtgtatggtcaacaacaagtatagcgaaacttttagcatataatatgtgtgagacatattatggaaagaaggcaaaaatgaaaaccgttagttagtttgaaaacctggagttataaaaagtcgtattttaatttactaatacatgttaacttcagatattaaaaacaaatcctgtacgtattaaaccatatgataaacataatattaatacgaaaaatgtataacacacgattagacaaattaggaagtaatctttgaattgaggtttaagaaaaggtgaaaatgataagctttcgtccgttttatatcatccatgttgcttcagaaacggaatttacacactacgtgtcgtttctacgtaatgccattttcgtaatttctagagtttattcagggtgttttcgtcagtctagtcagatcaaatgtttccatcaaacgttagtactgtttcctttagatttacagattttgaagaagaaagatttcaaattaaaaaatctttcaaatttcttcaaggaggtgatcaaattgaacaatttgatctacaatg

SEQ ID NO: 21327 - DNA, 3003 bp, Unknown; identical to SEQ ID NO: 21326
  misc_feature (1)..( 3003): 2750-1469P.txt file - cDNA_ID_1976954; gDNA_ID_2926169; Annot_ID_140036

SEQ ID NO: 21328 - DNA, 3003 bp, Unknown
  misc_feature (1)..( 3003): 2750-1469P.txt file - cDNA_ID_1976972; gDNA_ID_1620842; Annot_ID_50910
ttttcgtaaatggcaaagaataatttatctcgagaatgaggaatataaacaatgactttataatataagtattatactatattatgtataatttaatattgtgtaaactatatataaagtccttttacagcatttaaatatagatatttattgacacactagtgcaacaatggaaatatcttgaattgattaaaaaaagttgttatctatacaatatgaaactctttgtatatcttaggtgcaaaactatttgataatataccgatacatagtataacgatattattggataatcctccaaaactcagctttttgtctcgaaacttaagttataacaaagttaattgaaaataatgagacagtactagagatgtatgataaaccaattaaagttgaaaaagttatattcttatttagctttgccgtcaaaaggtacgataaatggaaaatatgctcttgtcttctgagcctcaaaaccttaagaagattcttacatatcttacatgtcaaagtaaagagatagttggtaacacattcccatgtggtccggaaaacaaaagcttcctttattgttttggaatattaatcagcaactgtgtagtagtattctatgttgcatacgtaaaacatataaataacattataatcatattagtttgaataatagattctaataaaagatgatgtatctttagcctagtgatacgtctaatgatcttaattaaacttgtttaatgtaatgagttaacactcaatattaacaaacaaaaacttcatattctggactacgtatgttatacatatttcaaatatacatcaattgtctattctcaacttattatttatagtctctttgttttcttgacaaattattggtcatatttttctttcacatggttccgaaggttacgttttcatgtatatatacatttgtaaaaaaagtatatatataacatttgtacaaaaagcataaaaaaattaaaatgtttatcccgattgctttttgtttgtcacatcaatatttagtgctctaaatattttggttgagtcacgaaactgtaaattaaaatcgttgaagttgctcaattatatatacgtcaccgaagttgttgtatattaacattgcatgctaaaatatatttcagatgtttaggacacataatgcattttccgtaaaataaagcttaaaaataaattaaaatatggttttataagacactattttatcttcttttttttttttttttttttttttttttttttttgccaaacccctattttatctttttatcttttgaaattttttatgatgtatctatgaaaatgatttgtgactaatgcaccgaggcttcatatgatttcattaatcacatcccatataaaatcacgggttatgttcataatttgtttattcaatattagactactatgtgaacttttagtgaattcacttttttttttatccaatcaaacctctggtttcagaatttagtttccagttttaaacttttttcttgagacgtaaaagctctcatgctttgttgatgatgtagtggtggagaatcgtgatcttcaacactttcatgtaaaaaggcttcatcatcgttaatggcatcttgggtttactcttggctgaatataaaaaagaaataataggattgatatagactctatatattaagaaataaagtaagacagtccacggcaacgcatgtgattataggaaccactatcatgcaacgacgtggatcagtgggaaccgttgctttcgaaagcataagagagacatcaattaattacaaagaaattgtgtaaacacatttatatatatcagtgacatttgagattggttttgacaaagatatacaacttctctcccgacataaatgtctacaagaatacgcaagttaatcatatttggagctctttcatctatagttgtagacaatttgtacactctattagggagttctagacttttgatgaatagaaacattttcagaatttgctttatttttttaatataggaatgtgaatattattttaaatgattcgtttcaaactttggatatatagtcatgtattcttataactagaaacttcgggtatttgggtaaaattttcgattatttggatacaaattcgggtattgggtaaaatttcgggtatttggatataaaccgatctgaaaccgattggatccgaaccgaatccgaaccgagattttctatttaccctattgggtcctagaatagcatatccgacatatccgtattcgaccgattattacccaaacccgaccagcatacctgaataccaagccgtaatttagatatgcaatttataaaggctaaaaaatcgtgaaaaaccattgtgatatattataaattattttttgggagccctaaaaacattacatattttggaagctcgagacaaaagcctttcttttttttaaccctttaggcacggttatatgaatcatatgacatgtaatatagcagtttgtaatagtaccgtcatattgtttaaccttcaaattcaaatatgcatgatttatgttcttgacaaaaatatgtatatttatgcaaaattaaatattcatctataacgatcatattatctatactgttaattttaaaaggatcatatcatctatactgttaatttttaagtgatttttttttataatttggatcccattttatttgctcttaaaaactttggatatacttgatagctttttaacaaacaaaaataaaataaaaagtacttcgagcccacgtaaaatcgaataaacaaaaatttaatttgttgaacaagttggtgttttgaactaaggcccaataatagtaagaatactaaaatgggcttaagccgggtcgtcggatcgggtttaagaaaaaacagggtcgaggtttcaagagaaacccttgttactcaggcgactaaaaccccaaatctcatttgtgtgttcgcctttctctcgtacaagtcaaaatg

SEQ ID NO: 21329 - DNA, 3000 bp, Unknown; identical to SEQ ID NO: 5109
  misc_feature (1)..( 3000): 2750-1469P.txt file - cDNA_ID_1976972; gDNA_ID_1620763; Annot_ID_50073

SEQ ID NO: 21330 - DNA, 3003 bp, Unknown; identical to SEQ ID NO: 21328
  misc_feature (1)..( 3003): 2750-1469P.txt file - cDNA_ID_1976972; gDNA_ID_1620842; Annot_ID_170091

SEQ ID NO: 21331 - DNA, 3000 bp, Unknown; identical to SEQ ID NO: 5109
  misc_feature (1)..( 3000): 2750-1469P.txt file - cDNA_ID_1976972; gDNA_ID_1620763; Annot_ID_167258

SEQ ID NO: 21332 - DNA, 3000 bp, Unknown; identical to SEQ ID NO: 5109
  misc_feature (1)..( 3000): 2750-1469P.txt file - cDNA_ID_1976972; gDNA_ID_2926194; Annot_ID_141197

SEQ ID NO: 21333 - DNA, 3000 bp, Unknown; identical to SEQ ID NO: 5109
  misc_feature (1)..( 3000): 2750-1469P.txt file - cDNA_ID_1976972; gDNA_ID_2926194; Annot_ID_201307

SEQ ID NO: 21334 - DNA, 3003 bp, Unknown
  misc_feature (1)..( 3003): 2750-1469P.txt file - cDNA_ID_1977060; gDNA_ID_2214589; Annot_ID_135393
tttagagaattctggtttcttatgagttaatattgatattggatctttgatctctctctctctcggtttcagaatgtgtaatccggatgttgaatctgaaccaacctttgaatccaagtggaactgcgaacgaagaagtttacaagatcttgatttacgataggttttgtcagaacattctatctccattgacccatgtcaaggatctgcgtaagcatggagttacactcttctttctcatagacaaagatcgacaacctgttcatgatgttcccgctgtctactttgttcaaccaactgaatccaacctccagaggatcatagccgatgcttctagatctctctacgatacctttcatctgaatttctcgtcttcgatccctcgtaagtttcttgaagagctagcttctgggactcttaaatctggttctgttgagaaagtctcgaaagtgcatgatcagtatctggagtttgtgactttggaagataacttgttctcgctggctcagcaatctacctatgttcaaatgaatgacccatcagcaggggagaaagagattaatgagattatcgaaagggtcgctagtggtttgttttgtgtgttggtaacgcttggtgtggttcctgttatccgatgccctagtggtggacctgcagagatggtggcgtctttgttggatcagaaactgagggatcatcttttgtccaagaacaatctgtttactgaaggtggcggtttcatgagctcgtttcagcgtcccctcttgtgcatatttgataggaactttgagctctcggttgggattcagcatgatttcagataccggcctctcgttcacgatgttctcgggttaaagctcaaccaattgaaagtgcagggagagaaaggaccaccgaaatcgtttgagctggacagttcggacccattctggtcagcaaacagtactctggagtttccagatgtcgctgtggagatcgaaacacagttgaacaagtacaagagagacgttgaagaggttaacaagaaaaccggaggtgggagcggcgctgagtttgatgggacagatctgattggaaacatccacaccgagcatctcatgaacactgtgaaatcgctcccggagttaactgagcgaaagaaagtgattgacaaacacaccaatatcgcaacagcgctcttaggacagatcaaggagagatctattgacgctttcactaagaaagaaagcgacatgatgatgaggggcggaatcgacagaactgaacttatggctgctctgaaaggcaaagggacaaagatggacaagctccggtttgcaatcatgtacctgatctccacagaaaccataaaccaatcggaagttgaagcagtggaggcagcattgaatgaagctgaggctgatacaagtgcgtttcagtatgtaaagaaaatcaaatcgttaaacgcatcttttgcagctacatcagcgaattcagctagcagaagcaacattgtagactgggccgagaagctttacggacagtctataagcgcagtgactgcaggagtcaagaatctgttatctagtgatcaacaattggcagtgactcgaacagtcgaagctttaacagaaggaaaaccaaacccggagatcgattcttaccgcttcctggacccaagagctccaaagtcgtctagctccggtggtagccatgtaaaaggaccgttcagagaagctatagtgttcatgatcggtggaggtaactatgttgagtatggaagtttgcaggagttgactcagagacagttaaccgttaaaaacgttatttatggagccactgagattcttaacggaggtgagttggtggagcagcttggacttttgggaaagaagatgggattaggaggtccggtcgcttcaacgtcattgtctggtggtcactgagtgttactcactgttactttcttttttcttttggcttttgagagtttttttttattaatctataaaatataaatccccagtggtgaattatttaacaaacagtttacagtctcgttataacattttctacagaacattttaaggtgtgtttataactccattagttaagattgttaaatggtttttgtcataatctttgaaaaagtaaatgacaattagctaggttgtcattaataataaaaataaataaaaaggtatgaacaaaagtctgaaaaagaaatttgtaatctaacattactaatttctaattaacattttttatgccatttagtacagtgtttttccaaaataaaatatactcctatgatattttgcataagaatatattatactaaaaaagagaagaggaaaaaagcaaaaaatcaaaagaaaaaaaaaaagtaaaggagcaacaaaagcaaagcaggtggtccgttcccatttctctgtaatttgtcttcgtctctaccttccatctctctcacccactctcctcggaaaccacagcgacggacggacggacggacgataaaacttttgcctctaatttgctcctacaaatctggaatcagccggagcgaatctcgaagcttatgatctcgacttgtgaggatcctcttttccttttctttttcttttgtataataataattatctcatccccgatcgatttcgattttcatatggtttctcgccagaaatgatcgattctctcgtttatttcaatagcctcagatgattgaagatgataattcaacagttaataacgcttctcttttttttagtggctttgtgttttgaccagccaatctaaatcactggtcacctttgttttgatctctgttttgttgaatttttgtttcaaacttaaacgaagctaaaaggctaatgggttggtcttaattctgaattttgagagagttttaaaatcatcttttatgagctaagccatgtttgaagctagatctgcctttaactttggttttggttttaaacttttttgtttctaacttgttgtaggctgaagaggctgggaatg

SEQ ID NO: 21335 - DNA, 3003 bp, Unknown; identical to SEQ ID NO: 21334
  misc_feature (1)..( 3003): 2750-1469P.txt file - cDNA_ID_1977060; gDNA_ID_2214589; Annot_ID_186725
